(19) United States
(12) Patent Application Publication
(10) Pub. No.: US 2024/0382605 A1
(43) Pub. Date: Nov. 21, 2024

(54) CONJUGATED OLIGONUCLEOTIDES AND USES THEREOF

(71) Applicants: Ionis Pharmaceuticals, Inc., Carlsbad, CA (US); BicycleTx Limited, Cambridge (GB)

(72) Inventors: Punit P. Seth, Carlsbad, CA (US); Michael Oestergaard, Carlsbad, CA (US); Michele Carrer, San Marcos, CA (US); Michael Tanowitz, Solana Beach, CA (US); Michael Rigby, Cambridge (GB); Michael Skynner, Cambridge (GB); Steven Stanway, Cambridge (GB); Liudvikas Urbonas, Cambridge (GB); Katerine Van Rietschoten, Cambridge (GB)

(73) Assignees: Ionis Pharmaceuticals, Inc., Carlsbad, CA (US); BicycleTx Limited, Cambridge (GB)

(21) Appl. No.: 18/696,199

(22) PCT Filed: Sep. 29, 2022
(86) PCT No.: PCT/US2022/077301

§ 371 Date: Mar. 27, 2024

Related U.S. Application Data
(60) Provisional application No. 63/340,130, filed on May 10, 2022.
(60) Provisional application No. 63/250,135, filed on Sep. 29, 2021.

(51) Int. Cl. A61K 47/64; A61K 9/00; A61P 21/00; C12N 15/113

(52) U.S. Cl. CPC A61K 47/64; A61K 9/0019; A61P 21/00; C12N 15/1137; C12N 2310/14; C12N 2310/314; C12N 2310/315; C12N 2310/321; C12N 2310/322; C12N 2320/33; C12Y 207/11

(57) ABSTRACT

Provided herein are oligomeric compounds comprising a bicycle ligand and a modified oligonucleotide. This compound may comprise a bicycle ligand as the cell-targeting moiety, and may also comprise a conjugate linker to connect the bicycle ligand and modified oligonucleotide. This compound may be used in conjunction with a pharmaceutically acceptable salt.

### SEQUENCE LISTING

[0001] The present application is being filed along with a Sequence Listing in electronic format. The Sequence Listing is provided as a file entitled CHEM0103WOSEQ.xml created Sep. 29, 2022, which is 3,314 kb in size. The information in the electronic format of the sequence listing is incorporated herein by reference in its entirety.

### FIELD

[0002] The present embodiments provide compounds and methods for targeting cells of interest with an oligonucleotide.

### BACKGROUND

[0003] Oligomeric compounds, such as siRNA and single-stranded antisense oligonucleotides (ASOs), have been shown to be useful for regulating gene expression and have proven to be therapeutically effective. Certain chemical modifications of oligomeric compounds can improve the potency, efficacy, and unwanted side effects of oligomeric compounds, allowing for administration of lower doses, reducing the potential for toxicity, and decreasing the overall cost of therapy. Oligomeric compounds can be modified with a conjugate group, e.g., a ligand for a receptor expressed on a cell of interest, which results in targeting the oligomeric compound to one or more tissues of interest.

[0004] The type 1 transferrin receptor (TfR1), also known as CD71, is a transmembrane glycoprotein that binds to and internalizes iron-bound transferrin by receptor-mediated endocytosis. Antibody-drug conjugates with an anti-TfR1 antibody have been used to deliver drugs to various tissues, including the CNS and muscle.

[0005] Cyclic peptides are able to bind with high affinity and specificity to protein targets and hence are an attractive molecule class for the development of therapeutics. In fact, several cyclic peptides are already successfully used in the clinic, as for example the antibacterial peptide vancomycin, the immunosuppressant drug cyclosporine, or the anti-cancer drug octreotide (Driggers et al. (2008), Nat. Rev. Drug. Discov. 7(7), 608-24). Good binding properties result from a relatively large interaction surface formed between the peptide and the target as well as the reduced conformational flexibility of the cyclic structures. Typically, macrocycles bind to surfaces of several hundred square angstrom, as for example the cyclic peptide CXCR4 antagonist CVX15 (400 Å2; Wu et al. (2007), Science 330, 1066-71), a cyclic peptide with the Arg-Gly-Asp motif binding to integrin αVb3 (355 Å2) (Xiong et al. (2002), Science 296(5565), 151-5) or the cyclic peptide inhibitor upain-1 binding to urokinase-type plasminogen activator (603 Å2; Zhao et al. (2007), J. Struct. Biol. 160(1), 1-10).

[0006] Due to their cyclic configuration, peptide macrocycles are less flexible than linear peptides, leading to a smaller loss of entropy upon binding to targets and resulting in a higher binding affinity. The reduced flexibility also leads to locking target-specific conformations, increasing binding specificity compared to linear peptides. This effect has been exemplified by a potent and selective inhibitor of matrix metalloproteinase 8 (MMP-8) which lost its selectivity over other MMPs when its ring was opened (Chemey et al. (1998), J. Med. Chem. 41(11), 1749-51). The favorable binding properties achieved through macrocyclization are even more pronounced in multicyclic peptides having more than one peptide ring as for example in vancomycin, nisin and actinomycin.

[0007] Different research teams have previously tethered polypeptides with cysteine residues to a synthetic molecular structure (Kemp and McNamara (1985), J. Org. Chem; Timmerman et al. (2005), ChemBioChem). Meloen and co-workers utilized tris(bromomethyl)benzene and related molecules for rapid and quantitative cyclisation of multiple peptide loops onto synthetic scaffolds for structural mimicry of protein surfaces (Timmerman et al. (2005), ChemBioChem). Methods for the generation of candidate drug compounds wherein said compounds are generated by linking cysteine containing polypeptides to a molecular scaffold as for example 1,1′,1″-(1,3,5-triazinane-1,3,5-triyl)triprop-2-en-1-one (TATA) (Heinis et al. (2014) Angewandte Chemie, International Edition 53(6) 1602-1606).

[0008] Phage display-based combinatorial approaches have been developed to generate and screen large libraries of bicyclic peptides to targets of interest (Heinis et al. (2009), Nat. Chem. Biol. 5(7), 502-7 and WO 2009/098450). Briefly, combinatorial libraries of linear peptides containing three cysteine residues and two regions of six random amino acids (Cys-(Xaa)6-Cys-(Xaa)6-Cys) were displayed on phage and cyclized by covalently linking the cysteine side chains to a small molecule scaffold.

### SUMMARY

[0009] Embodiments provided herein are directed to oligomeric compounds that comprise an oligonucleotide and a conjugate group. In certain embodiments, the conjugate group comprises a cell-targeting moiety. In certain embodiments, the conjugate group comprises a conjugate linker that links the cell-targeting moiety to the oligonucleotide. In certain embodiments, the cell-targeting moiety comprises or consists of a polypeptide comprising two polypeptide loops attached to a molecular scaffold. In certain embodiments, the cell-targeting moiety comprises or consists of a bicycle ligand. In certain embodiments, the conjugate linker links the oligonucleotide to the polypeptide. In general, conjugate linkers have sufficient length and/or structure to separate the oligonucleotide and the bicycle ligand such that the bicycle ligand does not inhibit an activity of the oligonucleotide (e.g., antisense activity) and the oligonucleotide does not inhibit an activity of the bicycle ligand (e.g., binding the transferrin receptor).

### DETAILED DESCRIPTION

[0010] It is to be understood that both the foregoing general description and the following detailed description are exemplary and explanatory only and are not restrictive of the embodiments, as claimed. Herein, the use of the singular includes the plural unless specifically stated otherwise. As used herein, the use of “or” means “and/or” unless stated otherwise. Furthermore, the use of the term “including” as well as other forms, such as “includes” and “included”, is not limiting.

[0011] The section headings used herein are for organizational purposes only and are not to be construed as limiting the subject matter described. All documents, or portions of documents, cited in this application, including, but not limited to, patents, patent applications, articles, books, treatises, and GenBank, NCBI, and ENSEMBL reference sequence records are hereby expressly incorporated by reference for the portions of the document discussed herein, as well as in their entirety.

[0012] It is understood that the sequence set forth in each SEQ ID NO of an oligonucleotide in the examples contained herein is independent of any modification to a sugar moiety, an internucleoside linkage, or a nucleobase. As such, oligonucleotides defined by a SEQ ID NO may comprise, independently, one or more modifications to a sugar moiety, an internucleoside linkage, or a nucleobase.

[0013] It is understood that throughout the specification, the first letter in a peptide sequence is the first amino acid of the peptide at the N-terminus and the last letter in a peptide sequence is the last amino acid of the peptide at the C-terminus unless indicated otherwise.

### Definitions

[0014] Unless specific definitions are provided, the nomenclature used in connection with, and the procedures and techniques of, analytical chemistry, synthetic organic chemistry, and medicinal and pharmaceutical chemistry described herein are those well-known and commonly used in the art. Where permitted, all patents, applications, published applications and other publications and other data referred to throughout in the disclosure are incorporated by reference herein in their entirety.

[0015] Unless otherwise indicated, the following terms have the following meanings:

[0016] As used herein, “2′-deoxynucleoside” means a nucleoside comprising a 2′-H(H) deoxyfuranosyl sugar moiety. In certain embodiments, a 2′-deoxynucleoside is a 2′-β-D-deoxynucleoside and comprises a 2′-β-D-deoxyribosyl sugar moiety, which has the β-D ribosyl configuration as found in naturally occurring deoxyribonucleic acids (DNA). In certain embodiments, a 2′-deoxynucleoside may comprise a modified nucleobase or may comprise an RNA nucleobase (uracil).

[0017] As used herein, “2′-MOE” means a 2′-OCH₂CH₂OCH₃ group in place of the 2′—OH group of a furanosyl sugar moiety. A “2′-MOE sugar moiety” means a sugar moiety with a 2′-OCH₂CH₂OCH₃ group in place of the 2′—OH group of a furanosyl sugar moiety. Unless otherwise indicated, a 2′-MOE sugar moiety is in the β-D-ribosyl configuration. “MOE” means O-methoxyethyl.

[0018] As used herein, “2′-MOE nucleoside” means a nucleoside comprising a 2′-MOE sugar moiety.

[0019] As used herein, “2′-OMe” means a 2′-OCH₃ group in place of the 2′—OH group of a furanosyl sugar moiety. A “2′-O-methyl sugar moiety” or “2′-OMe sugar moiety” means a sugar moiety with a 2′-OCH₃ group in place of the 2′—OH group of a furanosyl sugar moiety. Unless otherwise indicated, a 2′-OMe sugar moiety is in the β-D-ribosyl configuration.

[0020] As used herein, “2′-OMe nucleoside” means a nucleoside comprising a 2′-OMe sugar moiety.

[0021] As used herein, “2′-F” means a 2′—F group in place of the 2′—OH group of a furanosyl sugar moiety. A “2′-fluoro sugar moiety” or “2′-F sugar moiety” means a sugar moiety with a 2′—F group in place of the 2′-OH group of a furanosyl sugar moiety. Unless otherwise indicated, a 2′-F sugar moiety is in the β-D-ribosyl configuration.

[0022] As used herein, “2′-F nucleoside” means a nucleoside comprising a 2′-F sugar moiety.

[0023] As used herein, “2′-NMA” means a —O—CH₂—C(═O)—NH—CH₃ group in place of the 2′—OH group of a ribosyl sugar moiety. A “2′-NMA sugar moiety” is a sugar moiety with a 2′-O—CH₂—C(═O)—NH—CH₃ group in place of the 2′—OH group of a ribosyl sugar moiety. Unless otherwise indicated, a 2′-NMA sugar moiety is in the β-D configuration. “NMA” means O—N-methyl acetamide.

[0024] As used herein, “2′-NMA nucleoside” means a nucleoside comprising a 2′-NMA sugar moiety.

[0025] As used herein, “2′-substituted nucleoside” means a nucleoside comprising a 2′-substituted sugar moiety. As used herein, “2′-substituted” in reference to a sugar moiety means a sugar moiety comprising at least one 2′-substituent group other than H or OH.

[0026] As used herein, “5-methyl cytosine” means a cytosine modified with a methyl group attached to the 5 position. A 5-methyl cytosine is a modified nucleobase.

[0027] As used herein, “administering” means providing an oligomeric agent or pharmaceutical composition to a subject.

[0028] As used herein, an “aliphatic amino acid” is an amino acid having a side chain composed of H and C. Aliphatic amino acids include, but are not limited to, glycine, alanine, leucine, isoleucine, valine, beta-alanine, 2-aminoisobutyric acid.

[0029] As used here in, an “amino acid” is a compound or a monomer subunit of a polypeptide having an amino group, a carboxylate group, and at least one carbon covalently linked between the amino group and carboxylate group that comprises an optional side chain. An “α-amino acid” contains exactly one carbon between the amino group and carboxylate group that bears an optional side chain. A “β-amino acid” contains exactly two optionally substituted carbons between the amino group and the carboxylate group.

[0030] As used here in, an “amino acid mimetic” is a compound or a monomer subunit of a peptidomimetic having an amino group surrogate, a carboxylate group surrogate, and at least one carbon covalently linked between the amino group surrogate and carboxylate group surrogate that comprises an optional side chain.

[0031] As used herein, an “aromatic amino acid” is an amino acid having an aromatic ring in its side chain. Aromatic amino acids include, but are not limited to, phenylalanine, tyrosine, and tryptophan.

[0032] As used herein, “bicycle ligand” means a ligand comprising a polypeptide or peptidomimetic covalently bound to a molecular scaffold at three distinct sites, forming two polypeptide loops. Typically, such peptides or peptidomimetics comprise a polypeptide having natural or non-natural amino acids or amino acid mimetics, including a first, a second, and a third amino acid comprising reactive groups that form covalent bonds to the scaffold. In certain embodiments, the peptides or peptidomimetics comprise at least three cysteine residues (referred to herein as Cᵢ, Cᵢᵢ and Cᵢᵢᵢ), which are the reactive groups. As used herein, “loop polypeptide” refers to the portion of the bicycle ligand that forms the two polypeptide loops, including the reactive groups, but excluding any N-terminal or C-terminal extensions. As used herein, “loop sequences” refers to the amino acids or amino acid mimetics between the reactive groups.

[0033] As used herein, “bicyclic nucleoside” or “BNA” means a nucleoside comprising a bicyclic sugar moiety.

[0034] As used herein, “bicyclic sugar” or “bicyclic sugar moiety” means a modified sugar moiety comprising two rings, wherein the second ring is formed via a bridge connecting two of the atoms in the first ring thereby forming a bicyclic structure. In certain embodiments, the first ring of the bicyclic sugar moiety is a furanosyl moiety. In certain embodiments, the bicyclic sugar moiety does not comprise a furanosyl moiety.

[0035] As used herein, “cell-targeting moiety” means a conjugate group or portion of a conjugate group that is capable of binding to a particular cell type or particular cell types. In certain embodiments, a cell-targeting moiety is capable of binding the cell-surface receptor or the cell-surface moiety. In certain embodiments, a cell-targeting moiety is capable of being internalized when it interacts with or binds the cell-surface receptor or the cell-surface moiety. In certain embodiments, a cell-targeting moiety comprises a bicyclic polypeptide or a bicycle ligand. In certain embodiments, a cell-targeting moiety consists of a bicyclic polypeptide or a bicycle ligand.

[0036] As used herein, “cell-surface moiety” means a moiety present on the surface of a cell that is available to interact with matter external to the cell. In certain embodiments, a portion of the cell-surface moiety is integral with the cell membrane of the cell. Non-limiting examples of cell-surface moieties are lipids, proteins, and carbohydrates. In certain embodiments, a cell-surface moiety is a cell-surface receptor. In certain embodiments, the cell-surface receptor is the transferrin receptor.

[0037] As used herein, “cell-surface receptor” means a protein receptor expressed on the surface of a cell that is available to interact with a corresponding ligand. The ligand may be endogenous or exogenous. In certain embodiments, the cell-surface receptor is the transferrin receptor.

[0038] As used herein, a “charged amino acid” is an amino acid having a side chain that comprises a positive charge or a negative charge when in solution at pH=7.0. A “basic amino acid” has a side chain that comprises a positive charge when in solution at pH=7.0. Basic amino acids include, but are not limited to, lysine, arginine, and ornithine. A “acidic amino acid” has a side chain that comprises a negative charge when in solution at pH=7.0. Acidic amino acids include, but are not limited to, glutamic acid and aspartic acid.

[0039] As used herein, “chirally enriched population” means a plurality of molecules of identical molecular formula, wherein the number or percentage of molecules within the population that contain a particular stereochemical configuration at a particular chiral center is greater than the number or percentage of molecules expected to contain the same particular stereochemical configuration at the same particular chiral center within the population if the particular chiral center were stereorandom. Chirally enriched populations of molecules having multiple chiral centers within each molecule may contain one or more stereorandom chiral centers. In certain embodiments, the molecules are oligomeric compounds disclosed herein. In certain embodiments, the oligomeric compounds are antisense compounds. In certain embodiments, the molecules are modified oligonucleotides. In certain embodiments, the molecules are oligomeric compounds comprising modified oligonucleotides.

[0040] As used herein, “cleavable moiety” means a bond or group of atoms that is cleaved under physiological conditions, for example, inside a cell, or a subject.

[0041] As used herein, “complementary” in reference to an oligonucleotide means that at least 70% of the nucleobases of the oligonucleotide and the nucleobases of another nucleic acid or one or more regions thereof are capable of hydrogen bonding with one another when the nucleobase sequence of the oligonucleotide and the other nucleic acid are aligned in opposing directions. “Complementary region” in reference to a region of an oligonucleotide means that at least 70% of the nucleobases of that region and the nucleobases of another nucleic acid or one or more regions thereof are capable of hydrogen bonding with one another when the nucleobase sequence of the oligonucleotide and the other nucleic acid are aligned in opposing directions. Complementary nucleobases mean nucleobases that are capable of forming hydrogen bonds with one another. Complementary nucleobase pairs include adenine (A) and thymine (T), adenine (A) and uracil (U), cytosine (C) and guanine (G), 5-methyl cytosine (mC) and guanine (G). Certain modified nucleobases that pair with natural nucleobases or with other modified nucleobases are known in the art and are not considered complementary nucleobases as defined herein unless indicated otherwise. For example, inosine can pair, but is not considered complementary, with adenosine, cytosine, or uracil. Complementary oligonucleotides and/or nucleic acids need not have nucleobase complementarity at each nucleoside. Rather, some mismatches are tolerated. As used herein, “fully complementary” or “100% complementary” in reference to oligonucleotides means that oligonucleotides are complementary to another oligonucleotide or nucleic acid at each nucleoside of the oligonucleotide.

[0042] As used herein, “conjugate group” means a group of atoms that is directly attached to an oligonucleotide. In certain embodiments, a conjugate group comprises a conjugate moiety and a conjugate linker that attaches the conjugate moiety to the oligonucleotide. In certain embodiments, a conjugate group comprises a bicycle ligand.

[0043] As used herein, “conjugate linker” means a single bond or group of atoms comprising at least one bond that connects a conjugate moiety to an oligonucleotide.

[0044] As used herein, “conjugate moiety” means a group of atoms that is attached to an oligonucleotide via a conjugate linker. In certain embodiments, a conjugate moiety comprises a cell-targeting moiety. In certain embodiments, a cell-targeting moiety comprises or consists of a bicycle ligand. In certain embodiments, a cell-targeting moiety comprises or consists of a bicyclic polypeptide.

[0045] As used herein, “contiguous” in the context of an oligonucleotide refers to nucleosides, nucleobases, sugar moieties, or internucleoside linkages that are immediately adjacent to each other. For example, “contiguous nucleobases” means nucleobases that are immediately adjacent to each other in a sequence.

[0046] As used herein, a “cyclic amino acid” is an amino acid where the side chain connects to the backbone amide to form a cyclic structure. “Cyclic amino acid” includes, but is not limited to, proline or hydroxyproline.

[0047] As used herein, “gapmer” means a modified oligonucleotide comprising an internal region having a plurality of nucleosides that support RNase H cleavage positioned between external regions having one or more nucleosides, wherein the nucleosides comprising the internal region are chemically distinct from the nucleoside or nucleosides comprising the external regions. The internal region may be referred to as the “gap” and the external regions may be referred to as the “wings.” Unless otherwise indicated, “gapmer” refers to a sugar motif Unless otherwise indicated, the sugar moiety of each nucleoside of the gap is a 2′-β-D-deoxyribosyl sugar moiety. Thus, by way of example, the term “MOE gapmer” indicates a gapmer having a gap comprising 2′-β-D-deoxynucleosides and wings comprising 2′-MOE nucleosides. Unless otherwise indicated, a MOE gapmer may comprise one or more modified internucleoside linkages and/or modified nucleobases and such modifications do not necessarily follow the gapmer pattern of the sugar modifications.

[0048] As used herein, “hybridization” means the annealing of oligonucleotides and/or nucleic acids. While not limited to a particular mechanism, the most common mechanism of hybridization involves hydrogen bonding, which may be Watson-Crick, Hoogsteen or reversed Hoogsteen hydrogen bonding, between complementary nucleobases. In certain embodiments, complementary nucleic acid molecules include, but are not limited to, an antisense compound and a nucleic acid target. In certain embodiments, complementary nucleic acid molecules include, but are not limited to, an oligonucleotide and a nucleic acid target.

[0049] As used herein, “identical,” or “percent identical”, with regards to an amino acid sequence, means the percentage of amino acids that are identical between two amino acid sequences when the amino acid sequences are aligned for maximal similarity. “Identical” means that each atom of the amino acid is the same; that is, amino acids with substitutions or modifications do not count as “identical” amino acids.

[0050] As used herein, the term “internucleoside linkage” is the covalent linkage between adjacent nucleosides in an oligonucleotide. As used herein “modified internucleoside linkage” means any internucleoside linkage other than a phosphodiester internucleoside linkage. “Phosphorothioate internucleoside linkage” is a modified internucleoside linkage in which one of the non-bridging oxygen atoms of a phosphodiester internucleoside linkage is replaced with a sulfur atom.

[0051] As used herein, “non-bicyclic modified sugar moiety” means a modified sugar moiety that comprises a modification, such as a substituent, that does not form a bridge between two atoms of the sugar to form a second ring.

[0052] As used herein, “N-terminal modification” or “C-terminal modification” means a terminal non-peptidic chemical modification to a bicycle ligand on either side of the polypeptide, such as acylation or amidation, and that does not become part of a conjugate linker As used herein, “N-terminal extension” or “C-terminal extension” means a non-peptidic chemical modification to a bicycle ligand on either side of the polypeptide that is between terminus of the polypeptide of the bicycle ligand and the functional group that becomes part of the conjugate linker upon conjugation to an oligonucleotide.

[0053] As used herein, “mismatch” or “non-complementary” means a nucleobase of a first oligonucleotide that is not complementary with the corresponding nucleobase of a second oligonucleotide or target nucleic acid when the first and second oligonucleotide are aligned.

[0054] As used herein, “motif” means the pattern of unmodified and/or modified sugar moieties, nucleobases, and/or internucleoside linkages, in an oligonucleotide.

[0055] As used herein, “natural amino acid” means Gly or the _{L}-isomer of each of the following: Ala, Arg, Asn, Asp, Cys, Gln, Glu, His, Ile, Lys, Leu, Met, Phe, Pro, Ser, Thr, Trp, Tyr, Val.

[0056] As used herein, a “neutral amino acid” is an amino acid having a side chain that does not comprise a positive charge or a negative charge when in solution at pH=7.0. Neutral amino acids include, but are not limited to, 20 glycine, alanine, leucine, isoleucine, valine, serine, cysteine, methionine, proline, threonine, tyrosine, phenylalanine, tryptophan, beta-alanine, and 2-aminoisobutyric acid.

[0057] As used herein, “non-natural amino acid” means any amino acid other than the standard twenty amino acids encoded by the human genetic code, including _{D}-isomers of each of the following: Ala, Arg, Asn, Asp, Cys, Gln, Glu, His, Ile, Lys, Leu, Met, Phe, Pro, Ser, Thr, Trp, Tyr, Val.

[0058] As used herein, “nucleobase” means an unmodified nucleobase or a modified nucleobase. A nucleobase is a heterocyclic moiety. As used herein an “unmodified nucleobase” is adenine (A), thymine (T), cytosine (C), uracil (U), or guanine (G). As used herein, a “modified nucleobase” is a group of atoms other than unmodified A, T, C, U, or G capable of pairing with at least one other nucleobase. A “5-methyl cytosine” is a modified nucleobase. A universal base is a modified nucleobase that can pair with any one of the five unmodified nucleobases.

[0059] As used herein, “nucleobase sequence” means the order of contiguous nucleobases in a nucleic acid or oligonucleotide independent of any sugar or internucleoside linkage modification.

[0060] As used herein, “nucleoside” means a compound or fragment of a compound comprising a nucleobase and a sugar moiety. The nucleobase and sugar moiety are each, independently, unmodified or modified.

[0061] As used herein, “molecular scaffold” means a chemical group that forms covalent bonds with the reactive groups of a polypeptide to form at least two polypeptide loops joined by the molecular scaffold. In certain embodiments, the molecular scaffold is 1,1′,1″-(1,3,5-triazinane-1,3,5-triyl)triprop-2-en-1-one (TATA). In certain embodiments, the molecular scaffold is 1,1′,1″-(1,3,5-triazinane-1,3,5-triyl)tris(2-bromoethanone) (TATB).

[0062] As used herein, “oligomeric agent” means an oligomeric compound and optionally one or more additional features, such as a second oligomeric compound. An oligomeric agent may be a single-stranded oligomeric compound or may be an oligomeric duplex formed by two complementary oligomeric compounds.

[0063] As used herein, “oligomeric compound” means an oligonucleotide and optionally one or more additional features, such as a conjugate group or terminal group. An oligomeric compound may be paired with a second oligomeric compound that is complementary to the first oligomeric compound or may be unpaired. A “singled-stranded oligomeric compound” is an unpaired oligomeric compound.

[0064] The term “oligomeric duplex” means a duplex formed by two oligomeric compounds having complementary nucleobase sequences.

[0065] As used herein, “oligonucleotide” means a strand of linked nucleosides connected via internucleoside linkages, wherein each nucleoside and internucleoside linkage independently may be modified or unmodified. Unless otherwise indicated, oligonucleotides consist of 8-50 linked nucleosides. As used herein, “modified oligonucleotide” means an oligonucleotide, wherein at least one nucleoside or internucleoside linkage is modified. As used herein, “unmodified oligonucleotide” means an oligonucleotide that does not comprise any nucleoside modifications or internucleoside modifications.

[0066] As used herein, “polypeptide” or “peptide” means a compound or a fragment of a compound consisting of 3 or more amino acids linked together via amide bonds. Unless otherwise indicated, polypeptides consist of 3-50 amino acids.

[0067] As used herein, “peptidomimetic” means a compound or a fragment of a compound consisting of 3 or more amino acids or amino acid mimetics linked together, wherein at least two subunits are linked by a bond that is not an amide bond. Unless otherwise indicated, peptide mimetics consist of 3-50 amino acids or amino acid mimetics.

[0068] As used herein, “pharmaceutically acceptable carrier or diluent” means any substance suitable for use in administering to a subject. Certain such carriers enable pharmaceutical compositions to be formulated as, for example, tablets, pills, dragees, capsules, liquids, gels, syrups, slurries, suspension, and lozenges for the oral ingestion by a subject. In certain embodiments, a pharmaceutically acceptable carrier or diluent is sterile water, distilled water for injection, sterile saline, sterile buffer solution or sterile artificial cerebrospinal fluid.

[0069] As used herein “pharmaceutically acceptable salt(s)” means physiologically and pharmaceutically acceptable salt(s) of oligomeric compounds. Pharmaceutically acceptable salts retain the desired biological activity of the parent compound and do not impart undesired toxicological effects thereto.

[0070] As used herein “pharmaceutical composition” means a mixture of substances suitable for administering to a subject. For example, a pharmaceutical composition may comprise an oligomeric compound and a sterile aqueous solution. In certain embodiments, a pharmaceutical composition shows activity in free uptake assay in certain cell lines.

[0071] As used herein “prodrug” means a therapeutic agent in a first form outside the body that is converted to a second form within a subject or cells thereof. Typically, conversion of a prodrug within the subject is facilitated by the action of an enzyme (e.g., endogenous or viral enzyme) or chemicals present in cells or tissues and/or by physiologic conditions. In certain embodiments, the first form of the prodrug is less active than the second form.

[0072] As used herein, “reactive group” means an atom or group of atoms of an amino acid that can form bonds with another compound, e.g., another atom or group of atoms of another amino acid or another compound. In certain embodiments, a reactive group is the sulfur atom of a cysteine amino acid.

[0073] As used herein, “self-complementary” in reference to an oligonucleotide means an oligonucleotide that at least partially hybridizes to itself.

[0074] As used herein, “side chain” has its ordinary meaning in the art and means a sub-structure of an amino acid that does not join the amino and carboxylate groups of an amino acid, and attaches to, e.g., the alpha or beta carbon of the amino acid.

[0075] As used herein, “stabilized phosphate group” refers to a 5′-chemical moiety that results in stabilization of a 5′-phosphate moiety of the 5′-terminal nucleoside of an oligonucleotide, relative to the stability of an unmodified 5′-phosphate of an unmodified nucleoside under biologic conditions. Such stabilization of a 5′-phophate group includes but is not limited to resistance to removal by phosphatases. Stabilized phosphate groups include, but are not limited to, 5′-vinyl phosphonates and 5′-cyclopropyl phosphonate.

[0076] As used herein, “stereorandom chiral center” in the context of a population of molecules of identical molecular formula means a chiral center having a random stereochemical configuration. For example, in a population of molecules comprising a stereorandom chiral center, the number of molecules having the (S) configuration of the stereorandom chiral center may be but is not necessarily the same as the number of molecules having the (R) configuration of the stereorandom chiral center. The stereochemical configuration of a chiral center is considered random when it is the results of a synthetic method that is not designed to control the stereochemical configuration. In certain embodiments, a stereorandom chiral center is a stereorandom phosphorothioate internucleoside linkage.

[0077] As used herein, “standard cell assay” means assay(s) described in the Examples and reasonable variations thereof.

[0078] As used herein, “subject” refers to a human or non-human animal, including, but not limited to, mice, rats, rabbits, dogs, cats, pigs, and non-human primates, including, but not limited to, monkeys and chimpanzees.

[0079] As used herein, “sugar moiety” means an unmodified sugar moiety or a modified sugar moiety. As used herein, “unmodified sugar moiety” means a 2′-OH(H) ribosyl moiety, as found in RNA (an “unmodified RNA sugar moiety”), or a 2′-H(H) deoxyribosyl sugar moiety, as found in DNA (an “unmodified DNA sugar moiety”). Unmodified sugar moieties have one hydrogen at each of the 1′, 3′, and 4′ positions, an oxygen at the 3′ position, and two hydrogens at the 5′ position. As used herein, “modified sugar moiety” or “modified sugar” means a modified furanosyl sugar moiety or a sugar surrogate.

[0080] As used herein, “sugar surrogate” means a modified sugar moiety having other than a furanosyl moiety that can link a nucleobase to another group, such as an internucleoside linkage, conjugate group, or terminal group in an oligonucleotide. Modified nucleosides comprising sugar surrogates can be incorporated into one or more positions within an oligonucleotide and such oligonucleotides are capable of hybridizing to complementary oligomeric compounds or target nucleic acids.

[0081] As used herein, “target nucleic acid” and “target RNA” mean a nucleic acid that an oligomeric compound is designed to affect. Target RNA means an RNA transcript and includes pre-mRNA and mRNA unless otherwise specified.

[0082] As used herein, “target region” means a portion of a target nucleic acid to which an oligomeric compound is designed to hybridize.

[0083] As used herein, “terminal group” means a chemical group or group of atoms that is covalently linked to a terminus of an oligonucleotide.

[0084] As used herein, “transferrin receptor”, “TfR1”, and “CD71” mean the mammalian type 1 transferrin receptor. “Human transferrin receptor” and “human TfR1” means the protein encoded by the gene represented by ENSEMBL ID ENSG00000072274 and/or GenBank Gene ID 7037. “Mouse transferrin 25 receptor” and “mouse TfR1” means the protein encoded by the gene represented by ENSEMBL ID ENSMUSG00000022797 and/or GenBank Gene ID 22042.

[0085] As used herein, “antisense activity” means any detectable and/or measurable change attributable to the hybridization of an antisense compound to its target nucleic acid. In certain embodiments, antisense activity is a decrease in the amount or expression of a target nucleic acid or protein encoded by such target nucleic acid compared to target nucleic acid levels or target protein levels in the absence of the antisense compound. In certain embodiments, antisense activity is the modulation of splicing of a target pre-mRNA.

[0086] As used herein, “antisense agent” means an antisense compound and optionally one or more additional features, such as a sense compound.

[0087] As used herein, “antisense compound” means an antisense oligonucleotide and optionally one or more additional features, such as a conjugate group.

[0088] As used herein, “sense compound” means a sense oligonucleotide and optionally one or more additional features, such as a conjugate group.

[0089] As used herein, “antisense oligonucleotide” means an oligonucleotide, including the oligonucleotide portion of an antisense compound, that is capable of hybridizing to a target nucleic acid and is capable of at least one antisense activity. Antisense oligonucleotides include but are not limited to antisense RNAi oligonucleotides and antisense RNase H oligonucleotides.

[0090] As used herein, “sense oligonucleotide” means an oligonucleotide, including the oligonucleotide portion of a sense compound, that is capable of hybridizing to an antisense oligonucleotide.

[0091] As used herein, “RNAi agent” means an antisense agent that acts, at least in part, through RISC or Ago2 to modulate a target nucleic acid and/or protein encoded by a target nucleic acid. RNAi agents include, but are not limited to double-stranded siRNA, single-stranded RNAi (ssRNAi), and microRNA, including microRNA mimics. RNAi agents may comprise conjugate groups and/or terminal groups. In certain embodiments, an RNAi agent modulates the amount and/or activity, of a target nucleic acid. The term RNAi agent excludes antisense agents that act through RNase H.

[0092] As used herein, “RNase H agent” means an antisense agent that acts through RNase H to modulate a target nucleic acid and/or protein encoded by a target nucleic acid. In certain embodiments, RNase H agents are single-stranded. In certain embodiments, RNase H agents are double-stranded. RNase H agents may comprise conjugate groups and/or terminal groups. In certain embodiments, an RNase H agent modulates the amount and/or activity of a target nucleic acid. The term RNase H agent excludes antisense agents that act principally through RISC/Ago2.

[0093] As used herein, “splice-modulating agent” means an antisense agent that acts, at least in part, by modulating the splicing of a target nucleic acid. A “splice-modulating” agent comprises a “splice-modulating oligonucleotide”.

[0094] As used herein, “steric-blocking agent” means an antisense agent that acts, at least in part, due to directly binding to a target nucleic acid, thus blocking the interaction of the target nucleic acid with other nucleic acids or proteins.

[0095] As used herein, “treating” means improving a subject's disease or condition by administering an oligomeric agent or oligomeric compound described herein. In certain embodiments, treating a subject improves a symptom relative to the same symptom in the absence of the treatment. In certain embodiments, treatment reduces in the severity or frequency of a symptom, or delays the onset of a symptom, slows the progression of a symptom, or slows the severity or frequency of a symptom.

[0096] As used herein, “therapeutically effective amount” means an amount of a oligomeric agent or pharmaceutical composition that provides a therapeutic benefit to a subject. For example, a therapeutically effective amount improves a symptom of a disease.

### CERTAIN EMBODIMENTS

[0097] The present disclosure provides the following non-limiting numbered embodiments:

[0098] Embodiment 1. An oligomeric compound comprising a modified oligonucleotide and a conjugate group, wherein the modified oligonucleotide consists of 10 to 300 linked nucleosides, and the conjugate group comprises a bicycle ligand and a conjugate linker, wherein
[0099] the bicycle ligand comprises a polypeptide consisting of 13-22 linked amino acids or amino acid mimetics and a molecular scaffold, wherein
   [0100] each of a first, a second, and a third amino acid of the polypeptide comprises a reactive group, each of which separately forms a bond with the molecular scaffold, thereby forming two polypeptide loops attached to the molecular scaffold; and
[0101] wherein a portion of the bicycle ligand binds to a type 1 transferrin receptor; and
[0102] wherein the modified oligonucleotide is covalently linked to the bicycle ligand through the conjugate linker.

[0103] Embodiment 2. The oligomeric compound of embodiment 1, wherein the conjugate group consists of the bicycle ligand and a conjugate linker.

[0104] Embodiment 3. The oligomeric compound of embodiment 1 or 2, wherein the oligomeric compound consists of the modified oligonucleotide and the conjugate group.

[0105] Embodiment 4. The oligomeric compound of any of embodiments 1-3, wherein the three reactive groups are each the thiol of a cysteine.

[0106] Embodiment 5. The oligomeric compound of any of embodiments 1-4, wherein the polypeptide has the following formula, from N-terminal to C-terminal:

[B]ₙ—[Zᵢ]-[J]ₘ—[Zᵢᵢ]—[O]ₒ—[Zᵢᵢᵢ]—[U]ₚ, wherein:
[0107] Zᵢ, Zᵢᵢ, and Zᵢᵢᵢ are the first, second, and third amino acids comprising a reactive group;
[0108] each B, J, O, and U is independently selected amino acids or amino acid mimetics;
[0109] n is from 0 to 5;
[0110] m is from 3 to 7;
[0111] o is from 3 to 7;
[0112] p is from 0 to 5;
[0113] wherein the sum of m+o is less than 12.

[0114] Embodiment 6. The oligomeric compound of embodiment 5, wherein m is 7 and o is 3.

[0115] Embodiment 7. The oligomeric compound of embodiment 5, wherein m is 2 and o is 9.

[0116] Embodiment 8. The oligomeric compound of embodiment 5, wherein m and o are both 6.

[0117] Embodiment 9. The oligomeric compound of embodiment 5, wherein m is 3 and o is 8.

[0118] Embodiment 10. The oligomeric compound of any of embodiments 5-9, wherein n is 0.

[0119] Embodiment 11. The oligomeric compound of any of embodiments 5-9, wherein n is 3 or 4.

[0120] Embodiment 12. The oligomeric compound of any of embodiments 5-11, wherein p is 0.

[0121] Embodiment 13. The oligomeric compound of any of embodiments 5-11, wherein p is 3 or 4.

[0122] Embodiment 14. The oligomeric compound of any of embodiments 1-13, wherein the polypeptide has an N-terminal modification.

[0123] Embodiment 15. The oligomeric compound of embodiment 14, wherein the N-terminal modification is an acetyl group.

[0124] Embodiment 16. The oligomeric compound of embodiment 14, wherein the N-terminal modification is an azidopropyl group.

[0125] Embodiment 17. The oligomeric compound of any of embodiments 1-13, wherein the polypeptide has a C-terminal modification.

[0126] Embodiment 18. The oligomeric compound of embodiment 14, wherein the C-terminal modification is an amide group.

[0127] Embodiment 19. The oligomeric compound of any of embodiments 1-18, wherein the conjugate linker is attached to the N-terminal amino acid of the bicycle ligand.

[0128] Embodiment 20. The oligomeric compound of any of embodiments 1-19, wherein the conjugate linker is attached to the C-terminal amino acid of the bicycle ligand.

[0129] Embodiment 21. The oligomeric compound of any of embodiments 1-20, wherein the conjugate linker is attached to a side chain of an amino acid within one of the polypeptide loops of the bicycle ligand.

[0130] Embodiment 22. The oligomeric compound of any of embodiments 1-21, wherein the bicycle ligand comprises a C-terminal extension.

[0131] Embodiment 23. The oligomeric compound of embodiment 22, wherein the C-terminal extension is selected from PEG10 or PEG24.

[0132] Embodiment 24. The oligomeric compound of any of embodiments 1-23, wherein the bicycle ligand comprises an N-terminal extension.

[0133] Embodiment 25. The oligomeric compound of embodiment 24, wherein the N-terminal extension is selected from PEG10 or PEG24.

[0134] Embodiment 26. The oligomeric compound of any of embodiments 1-25, wherein the conjugate group is attached to the 5′-terminal nucleoside of the modified oligonucleotide.

[0135] Embodiment 27. The oligomeric compound of embodiment 26, wherein the conjugate group is attached to the 5′-position of the 5′-terminal nucleoside of the modified oligonucleotide.

[0136] Embodiment 28. The oligomeric compound of any of embodiments 1-25, wherein the conjugate group is attached to the 3′-terminal nucleoside of the modified oligonucleotide.

[0137] Embodiment 29. The oligomeric compound of embodiment 28, wherein the conjugate group is attached to the 3′-position of the 3′-terminal nucleoside of the modified oligonucleotide.

[0138] Embodiment 30. The oligomeric compound of any of embodiments 1-25, wherein the conjugate group is attached to an internal nucleoside of the modified oligonucleotide.

[0139] Embodiment 31. The oligomeric compound of embodiment 1-25, wherein the conjugate group is attached through a modified internucleoside linkage.

[0140] Embodiment 32. The oligomeric compound of embodiment 28-30, wherein the conjugate group is attached through a 2′-modified furanosyl sugar moiety.

[0141] Embodiment 33. The oligomeric compound of any of embodiments 1-32, wherein the bicycle ligand has an amino acid sequence with at least 80% identity to any of SEQ ID NO: 26-27, 36-56, 58-65, 67-76, 79-88, 90-152, or 192-246.

[0142] Embodiment 34. The oligomeric compound of embodiment 33, wherein the bicycle ligand has an amino acid sequence with at least 85%, at least 90%, at least 95%, or 100% identity to any of SEQ ID NO: 26-27, 36-56, 58-65, 67-76, 79-88, 90-152, or 192-246.

[0143] Embodiment 35. The oligomeric compound of any of embodiments 5-34, wherein [Zᵢ]-[J]ₘ—[Zᵢᵢ]-[O]ₒ-[Zᵢᵢᵢ] has an amino acid sequence with at least 85%, at least 90%, at least 95%, or 100% identity to any of SEQ ID NO 26-27, 35-56, 58-65, 67-76, 79-88, 90-152, or 192-246.

[0144] Embodiment 36. The oligomeric compound of any of embodiments 5-35, wherein [Zᵢ]-[J]ₘ—[Zᵢ]-[ ]o-[Zᵢᵢᵢ] has an amino acid sequence of CXXDXXXGCISYC (SEQ ID NO: 35), wherein each “X” is an independently selected amino acid.

[0145] Embodiment 37. The oligomeric compound of any of embodiments 1-36, wherein the bicycle ligand comprises at least one, at least two, or at least three non-natural amino acids.

[0146] Embodiment 38. The oligomeric compound of embodiment 37, wherein at least one non-natural amino acid is selected from a _{D}-amino acid, allo-isoleucine, 2-amino-3-ethyl-pentanoic acid, aminoisobutyric acid, aminobutyric acid, azetidine, 7-azatryptophan, 6-azidolysine, β-cyclobutylalanine, β-methyl isoleucine, 4, 4-biphenylalanine, cis-hydroxyproline, cyclobutyl glycine, cyclohexyl glycine, cyclopentyl alanine, cyclopentyl glycine, 2,6-dimethyl tyrosine, 3,3-diphenyl alanine, 4-trans-hydroxy-L-proline, 1-napthaylalanine, 2-napthylalanine, N-methyl alanine, 1-methyl histidine, 3-methyl histidine, N-methyl-tryptophan, pipecolic acid,4-pyridylalanine, sarcosine, t-butyl alanine, or 3-t-butyl tyrosine.

[0147] Embodiment 39. The oligomeric compound of embodiment 38, wherein at least one non-natural amino acid is selected from 4-trans-hydroxy-L-proline, 6-azidolysine, and t-butyl glycine.

[0148] Embodiment 40. The oligomeric compound of any of embodiments 1-39, wherein the molecular scaffold is 1,1′,1″-(1,3,5-triazinane-1,3,5-triyl)triprop-2-en-1-one (TATA).

[0149] Embodiment 41. The oligomeric compound of any of embodiments 1-39, wherein the molecular scaffold is 1,1′,1″-(1,3,5-triazinane-1,3,5-triyl)tris(2-bromoethanone) (TATB).

[0150] Embodiment 42. The oligomeric compound of any of embodiments 1-41, wherein the bicycle ligand does not inhibit the binding of transferrin to the transferrin receptor.

[0151] Embodiment 43. The oligomeric compound of any of embodiments 1-42, wherein at least one nucleoside of the modified oligonucleotide comprises a modified sugar moiety.

[0152] Embodiment 44. The oligomeric compound of embodiment 43, wherein at least one modified sugar moiety comprises a bicyclic sugar moiety.

[0153] Embodiment 45. The oligomeric compound of embodiment 44, wherein the bicyclic sugar moiety comprises a 2′-4′ bridge selected from —O-CH2-; and —O—CH(CH3)-.

[0154] Embodiment 46. The oligomeric compound of embodiment 43-45, wherein at least one modified sugar moiety comprises a non-bicyclic modified sugar moiety.

[0155] Embodiment 47. The oligomeric compound of embodiment 46, wherein the non-bicyclic modified sugar moiety is a 2′-MOE sugar moiety or 2′-OMe sugar moiety.

[0156] Embodiment 48. The oligomeric compound of any of embodiments 43-47, wherein at least one nucleoside of the modified oligonucleotide compound comprises a sugar surrogate.

[0157] Embodiment 49. The oligomeric compound of any of embodiments 1-48, wherein the modified oligonucleotide comprises at least one modified internucleoside linkage.

[0158] Embodiment 50. The oligomeric compound of embodiment 49, wherein at least one modified internucleoside linkage is a phosphorothioate internucleoside linkage.

[0159] Embodiment 51. The oligomeric compound of any of embodiments 49-50, wherein each internucleoside linkage is a modified internucleoside linkage.

[0160] Embodiment 52. The oligomeric compound of embodiment 51, wherein each internucleoside linkage is a phosphorothioate internucleoside linkage.

[0161] Embodiment 53. The oligomeric compound of any of embodiments 1-50, wherein the modified oligonucleotide comprises at least one phosphodiester internucleoside linkage.

[0162] Embodiment 54. The oligomeric compound of any of embodiments 1-50 or 53, wherein each internucleoside linkage of the modified oligonucleotide is independently selected from a phosphodiester or a phosphorothioate internucleoside linkage.

[0163] Embodiment 55. The oligomeric compound of embodiment 49, wherein at least one modified internucleoside linkage is a mesyl phosphoramidate internucleoside linkage.

[0164] Embodiment 56. The oligomeric compound of any of embodiments 49-55, wherein each internucleoside linkage is independently selected from a phosphodiester, a phosphorothioate internucleoside, or a mesyl phosphoramidate internucleoside linkage.

[0165] Embodiment 57. The oligomeric compound of any of embodiments 49-55, wherein each internucleoside linkage is independently selected from a phosphorothioate internucleoside or a mesyl phosphoramidate internucleoside linkage.

[0166] Embodiment 58. The oligomeric compound of any of embodiments 1-57, wherein the modified oligonucleotide comprises at least one modified nucleobase.

[0167] Embodiment 59. The oligomeric compound of embodiment 58, wherein the modified nucleobase is 5-methylcytosine.

[0168] Embodiment 60. The oligomeric compound of any of embodiments 1-59, wherein the modified oligonucleotide comprises a deoxy region consisting of 5-12 contiguous 2′-deoxynucleosides.

[0169] Embodiment 61. The oligomeric compound of embodiment 60, wherein each nucleoside of the deoxy region is a 2′-β-D-deoxynucleoside.

[0170] Embodiment 62. The oligomeric compound of embodiment 60 or 61, wherein the deoxy region consists of 7, 8, 9, 10, or 7-10 linked nucleosides.

[0171] Embodiment 63. The oligomeric compound of any of embodiments 60-62, wherein each nucleoside immediately adjacent to the deoxy region comprises a modified sugar moiety.

[0172] Embodiment 64. The oligomeric compound of any of embodiments 60-63, wherein the deoxy region is flanked on the 5′-side by a 5′-region consisting of 1-6 linked 5′-region nucleosides and on the 3′-side by a 3′-region consisting of 1-6 linked 3′-region nucleosides; wherein the 3′-most nucleoside of the 5′-region comprises a modified sugar moiety; and the 5′-most nucleoside of the 3′-region comprises a modified sugar moiety.

[0173] Embodiment 65. The oligomeric compound of embodiment 64, wherein each nucleoside of the 3′-region comprises a modified sugar moiety.

[0174] Embodiment 66. The oligomeric compound of embodiment 64 or 65, wherein each nucleoside of the 5′-region comprises a modified sugar moiety.

[0175] Embodiment 67. The oligomeric compound of any of embodiments 1-66, wherein the modified oligonucleotide has a sugar motif comprising:
[0176] a 5′-region consisting of 1-6 linked 5′-region nucleosides;
[0177] an internal region consisting of 6-10 linked internal region nucleosides; and a 3′-region consisting of 1-6 linked 3′-region nucleosides;
[0178] wherein each of the 5′-region nucleosides and each of the 3′-region nucleosides comprises a modified sugar moiety; and each of the internal region nucleosides is selected from a 2′-deoxynucleoside and a 2′-substituted nucleoside.

[0179] Embodiment 68. The oligomeric compound of embodiment 67, wherein the modified oligonucleotide has a sugar motif comprising:
[0180] a 5′-region consisting of 1-6 linked 5′-region nucleosides;
[0181] an internal region consisting of 6-10 linked internal region nucleosides; and a 3′-region consisting of 1-6 linked 3′-region nucleosides;
[0182] wherein each of the 5′-region nucleosides and each of the 3′-region nucleosides is a cEt nucleoside or a 2′-MOE nucleoside; and each of the internal region nucleosides is a 2′-β-D-deoxynucleoside.

[0183] Embodiment 69. The oligomeric compound of any of embodiments 1-59, wherein each nucleoside of the modified oligonucleotide comprises a 2′-sugar moiety.

[0184] Embodiment 70. The oligomeric compound of embodiment 69, wherein each 2′-sugar moiety is selected from 2′-OMe, 2′-MOE, or 2′-NMA.

[0185] Embodiment 71. The oligomeric compound of embodiment 69 or 70, wherein each nucleoside of the modified oligonucleotide comprises the same 2′-sugar moiety.

[0186] Embodiment 72. The oligomeric compound of any of embodiments 1-71, wherein the conjugate linker is cleavable.

[0187] Embodiment 73. The oligomeric compound of any of embodiments 1-72, wherein the conjugate linker comprises 1-3 linker nucleosides.

[0188] Embodiment 74. The oligomeric compound of any of embodiments 1-72, wherein the conjugate linker does not comprise any linker nucleosides.

[0189] Embodiment 75. The oligomeric compound of any of embodiments 1-74, wherein the conjugate group comprises:

[chemical structure]

[0190] Embodiment 76. The oligomeric compound of any of embodiments 1-74, wherein the conjugate group comprises:

[chemical structure]

[0191] Embodiment 77. The oligomeric compound of any of embodiments 1-74, wherein the conjugate group comprises:

[chemical structure]

[0192] Embodiment 78. The oligomeric compound of any of embodiments 1-74, wherein the conjugate group comprises:

[chemical structure]

optionally

[chemical structure]

[0193] Embodiment 79. The oligomeric compound of any of embodiments 1-74, wherein the conjugate group comprises:

[chemical structure]

[0194] Embodiment 80. The oligomeric compound of any of embodiments 1-74, wherein the conjugate group comprises:

[chemical structure]

[0195] Embodiment 81. The oligomeric compound of any of embodiments 1-74, wherein the conjugate group comprises:

[chemical structure]

[0196] Embodiment 82. The oligomeric compound of any of embodiments 1-74, wherein the conjugate group comprises:

[chemical structure]

[0197] Embodiment 83. The oligomeric compound of any of embodiments 1-82, wherein the modified oligonucleotide is complementary to a target nucleic acid expressed in muscle.

[0198] Embodiment 84. The oligomeric compound of any of embodiments 1-83, wherein the modified oligonucleotide is capable of reducing the amount of a target nucleic acid through the activation of Rnase H.

[0199] Embodiment 85. The oligomeric compound of any of embodiments 1-83, wherein the modified oligonucleotide is capable of reducing the amount of a target nucleic acid through the activation of RISC/Ago2.

[0200] Embodiment 86. The oligomeric compound of any of embodiments 1-83, wherein the modified oligonucleotide is capable of modulating the splicing of a target nucleic acid.

[0201] Embodiment 87. The oligomeric compound of any of embodiments 1-83, wherein the modified oligonucleotide is a guide RNA, a tracrRNA, or a scout RNA.

[0202] Embodiment 88. The oligomeric compound of any of embodiments 1-87, wherein the modified oligonucleotide is complementary to the complement of a target nucleic acid expressed in muscle.

[0203] Embodiment 89. The oligomeric compound of any of embodiments 83-88, wherein the target nucleic acid is associated with a muscle disease.

[0204] Embodiment 90. The oligomeric compound of any of embodiments 83-89, wherein the target nucleic acid is selected from CaMK2d, NLRP3, PLN, DMD, DMPK, DNM2, DUX4, or HPRT.

[0205] Embodiment 91. The oligomeric compound of any of embodiments 83-90, wherein the muscle target nucleic acid has a sequence selected from any of SEQ ID NO: 1-15.

[0206] Embodiment 92. The oligomeric compound of any of embodiments 83-91, wherein the target nucleic acid is expressed in at least one of expressed in at least one of the following tissues: skeletal muscle (including but not limited to quadriceps, gastrocnemius, tibialis anterior, triceps, masseter, extensor digitorum longus (EDL), soleus, diaphragm), heart, sciatic nerve, aorta, or liver.

[0207] Embodiment 93. The oligomeric compound of any of embodiments 1-92, wherein the nucleobase sequence of the modified oligonucleotide comprises at least 12, at least 13, at least 14, at least 15, or at least 16 contiguous nucleobases of any of the nucleobase sequences of any of SEQ ID NO: 167-191.

[0208] Embodiment 94. The oligomeric compound of any of embodiments 1-93, wherein the modified oligonucleotide consists of 10 to 25, 10 to 30, 12 to 20, 12 to 25, 12 to 30, 13 to 20, 13 to 25, 13 to 30, 14 to 20, 14 to 25, 14 to 30, 15 to 20, 15 to 25, 15 to 30, 16 to 18, 16 to 20, 16 to 25, 16 to 30, 17 to 20, 17 to 25, 17 to 30, 18 to 20, 18 to 25, 18 to 30, 19 to 20, 19 to 25, 19 to 30, 20 to 25, 20 to 30, 21 to 25, 21 to 30, 21 to 50, 22 to 25, 22 to 30, 23 to 25, 23 to 30, 20 to 100, 40 to 100, 50 to 100, 50 to 200, 100 to 300, 150-300, or 200-300 linked nucleosides.

[0209] Embodiment 95. An oligomeric duplex, comprising a first oligomeric compound comprising a first modified oligonucleotide and a second compound oligomeric comprising a second modified oligonucleotide consisting of 16 to 30 linked nucleosides, wherein the nucleobase sequence of the second modified oligonucleotide comprises a complementary region of at least 12 nucleobases that is at least 90% complementary to an equal length portion of the first modified oligonucleotide, and wherein the second oligomeric compounds is an oligomeric compound of any of embodiments 1-86 or 89-94.

[0210] Embodiment 96. The oligomeric duplex of embodiment 95, wherein the first modified oligonucleotide is complementary to a muscle target nucleic acid.

[0211] Embodiment 97. The oligomeric duplex of embodiment 96, wherein the duplex is capable of reducing the amount of a target nucleic acid through the activation of RISC/Ago2.

[0212] Embodiment 98. The oligomeric duplex of any of embodiments 95-97, wherein at least one nucleoside of the second modified oligonucleotide comprises a modified sugar moiety.

[0213] Embodiment 99. The oligomeric duplex of embodiment 98, wherein the modified sugar moiety of the second modified oligonucleotide comprises a bicyclic sugar moiety.

[0214] Embodiment 100. The oligomeric duplex of embodiment 99, wherein the bicyclic sugar moiety of the second modified oligonucleotide comprises a 2′-4′ bridge selected from —O—CH₂—; and —O—CH(CH₃)—.

[0215] Embodiment 101. The oligomeric duplex of embodiment 100, wherein the modified sugar moiety of the second modified oligonucleotide comprises a non-bicyclic modified sugar moiety.

[0216] Embodiment 102. The oligomeric duplex of embodiment 101, wherein the non-bicyclic modified sugar moiety of the second modified oligonucleotide is a 2′-MOE sugar moiety, a 2′-F sugar moiety, or 2′-OMe sugar moiety.

[0217] Embodiment 103. The oligomeric duplex of any of embodiments 95-102, wherein at least one nucleoside of the second modified oligonucleotide comprises a sugar surrogate.

[0218] Embodiment 104. The oligomeric duplex of any of embodiments 95-102, wherein at least one internucleoside linkage of the second modified oligonucleotide is a modified internucleoside linkage.

[0219] Embodiment 105. The oligomeric duplex of embodiment 104, wherein at least one modified internucleoside linkage of the second modified oligonucleotide is a phosphorothioate internucleoside linkage.

[0220] Embodiment 106. The oligomeric duplex of any of embodiments 95-105, wherein at least one internucleoside linkage of the second modified oligonucleotide is a phosphodiester internucleoside linkage.

[0221] Embodiment 107. The oligomeric duplex of any of embodiments 95-104 or 106, wherein each internucleoside linkage of the second modified oligonucleotide is independently selected from a phosphodiester or a phosphorothioate internucleoside linkage.

[0222] Embodiment 108. The oligomeric duplex of any of embodiments 95-107, wherein the second modified oligonucleotide comprises at least one modified nucleobase.

[0223] Embodiment 109. The oligomeric duplex of embodiment 108, wherein the modified nucleobase of the second modified oligonucleotide is 5-methylcytosine.

[0224] Embodiment 110. The oligomeric duplex of any of embodiments 95-109, wherein the first oligomeric compound comprises a 5′-stabilized phosphate group.

[0225] Embodiment 111. The oligomeric duplex of any of embodiments 95-109, wherein the second oligomeric compound comprises a 5′-stabilized phosphate group.

[0226] Embodiment 112. The oligomeric duplex of embodiment 110 or 111, wherein the stabilized phosphate group comprises a cyclopropyl phosphonate or a vinyl phosphonate.

[0227] Embodiment 113. The oligomeric duplex of any of embodiments 95-112, wherein the first modified oligonucleotide of comprises a glycol nucleic acid (GNA) sugar surrogate.

[0228] Embodiment 114. The oligomeric duplex of any of embodiments 95-113, wherein first modified oligonucleotide comprises a 2′-NMA sugar moiety.

[0229] Embodiment 115. The oligomeric duplex of any of embodiments 95-114, wherein the second modified oligonucleotide comprises a glycol nucleic acid (GNA) sugar surrogate.

[0230] Embodiment 116. The oligomeric duplex of any of embodiments 95-115, wherein the second modified oligonucleotide compound comprises a 2′-NMA sugar moiety.

[0231] Embodiment 117. A method of modulating a nucleic acid target in a subject, comprising administering to the subject an oligomeric compound according to any of embodiments 1-94 or an oligomeric duplex of any of embodiments 95-116.

[0232] Embodiment 118. The method of embodiment 117, wherein the nucleic acid target is expressed in at least one of skeletal muscle (including but not limited to quadriceps, gastrocnemius, tibialis anterior, triceps, masseter, extensor digitorum longus (EDL), soleus, diaphragm), heart, sciatic nerve, aorta, or liver.

[0233] Embodiment 119. The method of embodiment 117 or 118, wherein administration of the oligomeric compound of any of embodiments 1-94 or the oligomeric duplex of any of embodiments 95-116 results in reduction of the nucleic acid target.

[0234] Embodiment 120. The method of embodiment 117 or 118, wherein administration of the oligomeric compound of any of embodiments 1-94 or the oligomeric duplex of any of embodiments 95-116 results in a change in the splicing of the nucleic acid target.

[0235] Embodiment 121. The method of any of embodiments 117-120, wherein the oligomeric compound or oligomeric duplex is administered via intravenous or subcutaneous dosing.

[0236] Embodiment 122. The method of any of embodiments 117-120, wherein the oligomeric compound or oligomeric duplex is administered at a dose of 5 mg, 10 mg, 15 mg, 20 mg, 25 mg, 30 mg, 35 mg, 40 mg, 45 mg, 50 mg, 55 mg, 60 mg, 65 mg, 70 mg, 75 mg, 80 mg, 85 mg, 90 mg, 95 mg, 100 mg, 105 mg, 110 mg, 115 mg, 120 mg, 125 mg, 130 mg, 135 mg, 140 mg, 145 mg, 150 mg, 155 mg, 160 mg, 165 mg, 170 mg, 175 mg, 180 mg, 185 mg, 190 mg, 195 mg, 200 mg, 205 mg, 210 mg, 215 mg, 220 mg, 225 mg, 230 mg, 235 mg, 240 mg, 245 mg, 250 mg, 255 mg, 260 mg, 265 mg, 270 mg, 275 mg, 280 mg, 285 mg, 290 mg, 295 mg, 300 mg, 305 mg, 310 mg, 315 mg, 320 mg, 325 mg, 330 mg, 335 mg, 340 mg, 345 mg, or 350 mg.

[0237] Embodiment 123. The method of any of embodiments 117-122, comprising administering the oligomeric compound or oligomeric duplex once every 4 weeks, once every 6 weeks, once every 8 weeks, once every 12 weeks, once every 16 weeks, once every 20 weeks, once every 24 weeks, once every 6 months, or once a year.

[0238] Embodiment 124. A bicycle ligand specific for transferrin receptor 1 (TfR1) which comprises an amino acid sequence selected from: CP[HyP]DAYLGC[tBuGly]SYCEPWK (SEQ ID NO: 245, herein referred to as BCY21757) and CP[HyP]DAYLGC[tBuGly]SYCEPWC (SEQ ID NO: 246, herein referred to as BCY21758), wherein HyP represents trans-4-hydroxy-L-proline and tBuGly represents t-butyl-glycine.

[0239] Embodiment 125. The bicycle ligand of embodiment 124, which comprises an N-terminal acetyl group and a C-terminal CONH₂ group.

[0240] Embodiment 126. The bicycle ligand of embodiment 124 or 125, which is a pharmaceutically acceptable salt.

[0241] Embodiment 127. The pharmaceutical salt of embodiment 126, wherein the pharmaceutically acceptable salt is selected from the sodium, potassium, calcium or ammonium salt.

[0242] Embodiment 128. The bicycle ligand of embodiment 124, wherein the first, second and third cysteine residues within said peptide ligands are covalently bonded to a molecular scaffold such that two polypeptide loops are formed on said molecular scaffold.

[0243] Embodiment 129. The bicycle ligand of embodiment 125, wherein the molecular scaffold is 1,1′,1″-(1,3,5-triazinane-1,3,5-triyl)triprop-2-en-1-one (TATA).

### Certain Compounds

[0244] In certain embodiments, provided herein are compounds comprising one or more oligonucleotide and one or more conjugate groups. In certain embodiments, an oligonucleotide is a modified oligonucleotide. In certain embodiments, an oligonucleotide is an unmodified oligonucleotide. In certain embodiments, compounds comprise an oligonucleotide, a cell-targeting moiety, and a conjugate linker. In certain embodiments, oligomeric compounds comprise an oligonucleotide, a bicycle ligand, and a conjugate linker. In certain embodiments, oligomeric compounds comprise an oligonucleotide, a polypeptide, a conjugate linker, and optionally N-terminal or C-terminal modifications to the polypeptide. In certain embodiments, oligomeric compounds comprise an oligonucleotide, two or more polypeptides, a branching group, a conjugate linker, and optionally N-terminal or C-terminal modifications to the polypeptides. In certain embodiments, the conjugate linker connects the polypeptide and/or the bicycle ligand to the oligonucleotide.

[0245] In certain embodiments, the N-terminus of a bicycle ligand is covalently connected to the conjugate linker, and the conjugate linker is covalently connected to the 3′ end of an oligonucleotide. In certain embodiments, the C-terminus of a bicycle ligand is covalently connected to a conjugate linker, and a conjugate linker is covalently connected to the 3′ end of an oligonucleotide. In certain embodiments, an internal amino acid of a bicycle ligand is covalently connected to a conjugate linker, and a conjugate linker is covalently connected to the 3′ end of an oligonucleotide. In certain embodiments, the N-terminus of a bicycle ligand is covalently connected to a conjugate linker, and the conjugate linker is covalently connected to the 5′ end of an oligonucleotide. In certain embodiments, the C-terminus of a bicycle ligand is covalently connected to an conjugate linker, and the conjugate linker is covalently connected to the 5′ end of an oligonucleotide. In certain embodiments, an internal amino acid of a bicycle ligand is covalently connected to a conjugate linker, and the conjugate linker is covalently connected to the 5′ end of an oligonucleotide. In certain embodiments, the N-terminus of a bicycle ligand is covalently connected to a conjugate linker, and the conjugate linker is covalently connected at an internal position of an oligonucleotide. In certain embodiments, the C-terminus of a bicycle ligand is covalently connected to a conjugate linker, and the conjugate linker is covalently connected at an internal position of an oligonucleotide. In certain embodiments, an internal amino acid of a bicycle ligand is covalently connected to a conjugate linker, and the conjugate linker is covalently connected at an internal position of an oligonucleotide. In certain embodiments, the internal position of an oligonucleotide is the 2′-position of a modified sugar moiety. In certain embodiments, the internal position of an oligonucleotide is a modified internucleoside linkage.

### Certain Conjugate Groups

[0246] In certain embodiments, conjugate moieties modify one or more properties of the attached oligonucleotide, including but not limited to pharmacodynamics, pharmacokinetics, stability, binding, absorption, tissue distribution, cellular distribution, cellular uptake, charge and clearance. In certain embodiments, conjugate moieties impart a new property on the attached oligonucleotide.

[0247] In certain embodiments, a conjugate group comprises a conjugate moiety and a conjugate linker. In certain embodiments, a conjugate moiety comprises or consists of a cell-targeting moiety. In certain embodiments, a cell-targeting moiety is capable of binding the cell-surface receptor or the cell-surface moiety. In certain embodiments, a compound comprising a cell-targeting moiety is capable of being internalized when it interacts with or binds the cell-surface receptor or the cell-surface moiety. In certain embodiments, a cell-targeting moiety comprises a bicyclic polypeptide or a bicycle ligand. In certain embodiments, a cell-targeting moiety consists of a bicyclic polypeptide or a bicycle ligand.

[0248] In certain embodiments, a bicycle ligand comprises a polypeptide comprising at least three reactive groups, separated by at least two loop sequences, and a molecular scaffold which forms covalent bonds with the reactive groups of the polypeptide such that at least two polypeptide loops are formed on the molecular scaffold. In certain embodiments, the molecular scaffold is 1,1′,1″-(1,3,5-triazinane-1,3,5-triyl)triprop-2-en-1-one (TATA). In certain embodiments, the molecular scaffold is 1,1′,1″-(1,3,5-triazinane-1,3,5-triyl)tris(2-bromoethanone) (TATB).

[chemical structure]

[0249] In certain embodiments, reactive groups are cysteines. In certain embodiments, loop sequences comprise 2, 3, 4, 5, 6, 7, 8, or 9 amino acids. In certain embodiments, loop sequences comprise three cysteine residues separated by two loop sequences, the first of which consists of 2 amino acids and the second of which consists of 9 amino acids. In certain embodiments, the loop sequences comprise three cysteine residues by two loop sequences both of which consist of 6 amino acids. In certain embodiments, the loop sequences comprise three cysteine residues separated by two loop sequences the first of which consists of 3 amino acids and the second of which consists of 8 amino acids. In certain embodiments, the loop sequences comprise three cysteine residues separated by two loop sequences the first of which consists of 7 amino acids and the second of which consists of 3 amino acids.

[0250] In certain embodiments, a bicycle ligand comprises an amino acid sequence selected from:

CᵢXXCᵢᵢXXXXXXXXXCᵢ;
CᵢXXXXXXCᵢᵢXXXXXXCᵢᵢᵢ;
CᵢXXXCᵢᵢXXXXXXXXᵢᵢᵢ;
or
CᵢXXXXXXXCᵢᵢXXXC_{iii;}

wherein Cᵢ, Cᵢᵢ and Cᵢᵢᵢ represent first, second and third cysteine residues, respectively, and each “X” represents an independently selected natural or non-natural amino acid, or a pharmaceutically acceptable salt thereof. In certain embodiments, a bicycle ligand further comprises an N-terminal extension and/or a C-terminal extension.

[0251] In certain embodiments, a bicycle ligand comprises an amino acid sequence at least 80%, 85%, 90%, 95%, or 100% identical to any of the following sequences:

(SEQ ID NO: 26)
CᵢSPDAHLGCᵢᵢISYCᵢᵢᵢ;
(SEQ ID NO: 27)
CᵢSPDAYLGCᵢᵢISYCᵢᵢᵢ;
(SEQ ID NO: 93)
CᵢP[HyP]DAYLGCᵢᵢISYCᵢᵢᵢ;
(SEQ ID NO: 95)
CᵢS[HyP]DAHLGCᵢᵢISYCᵢᵢᵢ;
(SEQ ID NO: 128)
CᵢS[Aze]DAHLGCᵢᵢISYCᵢᵢᵢ;
(SEQ ID NO: 86)
CᵢP[HyP]DAYLGCᵢᵢ[tBuGly]SYCᵢᵢᵢ;
(SEQ ID NO: 150)
Cᵢ[K(N₃)]PDAHLGCᵢᵢISYCᵢᵢᵢ;
(SEQ ID NO: 151)
CᵢS[K(N₃)]DAHLGCᵢᵢISYCᵢᵢᵢ;
or
(SEQ ID NO: 152)
CᵢSPD[K(N₃)]HLGCᵢᵢISYCᵢᵢᵢ;

Cᵢ, Cᵢᵢ and Cᵢᵢᵢ represent first, second and third cysteines, respectively; [HyP] represents 4-trans-hydroxy-L-proline; [Aze] represents azetidine; [tBuGly] represents t-butyl glycine; and [K(N₃)] represents 6-azido lysine. In certain embodiments, a bicycle ligand further comprises an N-terminal extension and/or a C-terminal extension.

[0252] In certain embodiments, a bicycle ligand comprises an amino acid sequence of: CiXXDXXXGCᵢᵢISYCᵢᵢᵢ (SEQ ID NO: 35); wherein each X is independently selected from natural or non-natural amino acid, or a pharmaceutically acceptable salt thereof. In certain embodiments, a bicycle ligand further comprises an N-terminal extension and/or a C-terminal extension.

[0253] In certain embodiments, an oligomeric compound comprises two or more bicyclic ligands attached through a conjugate linker including a bivalent linker including a branching group. In certain embodiments, a bivalent linker comprises one or more PEG repeats. In certain embodiments, the bivalent linker is shown in the structure below:

[chemical structure]

[0254] In certain embodiments, aa bicycle ligand is capable of interacting with a cell surface receptor on a cell. In certain embodiments, a bicycle ligand is capable of interacting with a cell surface moiety on a cell. In certain embodiments, a bicycle ligand is capable of binding a cell surface receptor on a cell. In certain embodiments, a bicycle ligand is capable of binding a cell surface moiety on a cell. In certain embodiments, a bicycle ligand is capable of being internalized by the cell when it interacts with or binds a cell surface receptor or cell surface moiety. In certain embodiments, a cell surface receptor is not expressed ubiquitously (e.g., the cell surface receptor is undetectable in at least one tissue of a human subject), and a bicycle ligand selectively delivers an oligonucleotide to a tissue of interest or a cell of interest. By way of non-limiting example, tissue of interest may be any one of brain, spinal cord, retina, heart, kidney, liver, lung, skeletal muscle, cardiac muscle, smooth muscle, adipose, white adipose, brown adipose, spleen, bone, intestine, colon, testes, breast, ovary, placenta, uterus, bladder, pancreas, pituitary, prostate, skin, adrenal gland, and thyroid. By way of non-limiting example, the cell of interest may be any one of a myocyte, adipocyte, hepatocyte, cardiomyocyte, vascular smooth muscle cell, endothelial cell, neuron, blood cell, macrophage, lymphocyte, cancer cell, and immune cell.

[0255] In certain embodiments, a bicycle ligand is capable of interacting with or binding a cell surface receptor. In certain embodiments, the cell surface receptor is capable of internalizing the bicycle ligand. In certain embodiments, the cell surface receptor is capable of internalizing an oligonucleotide connected to the bicycle ligand via a conjugate linker. In certain embodiments, the cell surface receptor is human transferrin receptor.

[0256] In certain embodiments, a bicycle ligand is represented by the formula [B]n-[Zᵢ]-[J]ₘ—[Zᵢᵢ]—[O]ₒ—[Zᵢᵢᵢ]—[U]ₚ, wherein:
[0257] Zᵢ, Zᵢᵢ, and Zᵢᵢᵢ are the first, second, and third amino acids comprising a reactive group; each B, J, O, and U is independently selected amino acids or amino acid mimetics;
[0258] n is from 0 to 5;
[0259] m is from 3 to 7;
[0260] o is from 3 to 7;
[0261] p is from 0 to 5;
[0262] wherein the sum of m+o is less than 12.

[0263] In certain embodiments, a bicycle ligand comprises the following structure,

[chemical structure]

[0264] wherein each Xaa is an independently selected amino acid side chain;
[0265] each Baa is an independently selected amino acid or amino acid mimetic;
[0266] n is from 0 to 5;
[0267] m is from 3 to 7;
[0268] o is from 3 to 7;
[0269] p is from 0 to 5;
[0270] wherein the sum of m+o is less than 12.

[0271] In certain embodiments, the conjugate linker is attached through the N-terminus, the C-terminus, or through one of the loop amino acids.

[0272] In certain embodiments, a bicycle ligand comprises the formula [Zᵢ]-[J]ₘ[Zᵢᵢ]—[O]ₒ—[Zᵢᵢᵢ]. In certain embodiments, a bicycle ligand comprises the following structure:

[chemical structure]

[0273] wherein each Xaa is an independently selected amino acid side chain, each Baa is an independently selected amino acid or amino acid mimetic;
[0274] m is from 3 to 7 and;
[0275] o is from 3 to 7.

[0276] In certain embodiments, a bicycle ligand further comprises an N-terminal extension and/or a C-terminal extension.

[0277] In certain embodiments, a conjugate linker is attached through the N-terminus, the C-terminus, or through one of the loop amino acids.

[0278] In certain embodiments, a bicycle ligand comprises or consists of a sequence selected from the following table:

TABLE 1
Bicycle ligands

| | N- | | |
|---|---|---|---|
| Bicycle | terminal | | SEQ ID |
| Number | Mod. | Sequence | NO: |
| BCY13983 | none | ACSADDWLGCISWCA | 36 |
| BCY14474 | none | ACSADDWLGCISWCA[Sar]₆[K-Fl] | 37 |
| BCY13986 | none | ACSSDAYLGCISWCA | 38 |
| BCY14475 | none | ACSSDAYLGCISWCA[Sar]₆[K-Fl] | 39 |
| BCY15466 | none | ACPPDAHLGCISWCA | 40 |
| BCY15889 | Ac | CPPDAHLGCISWC | 41 |
| BCY15467 | none | ACPQDAYLGCISWCA | 42 |
| BCY15890 | Ac | CPQDAYLGCISWC | 43 |
| BCY13989 | none | ACPPDSWQGCISYCA | 44 |
| BCY14476 | none | ACPPDSWQGCISYCA[Sar]₆[K-Fl] | 45 |
| BCY15468 | none | ACSPDAHLGCISYCA | 46 |
| BCY15768 | none | ACSPDAHLGCISYC[Sar]₆[K-Fl] | 192 |
| BCY15934 | none | CSPDAHLGCISYC[Sar]₆[K-Fl] | 47 |
| BCY15937 | Ac | CSPDAHLGCISYCA[Sar]₆[K-Fl] | 48 |
| BCY15938 | Ac | CSPDAHLGCISYC[Sar]6[K-Fl] | 47 |
| BCY15940 | none | [Fl-G][Sar]₅ACSPDAHLGCISYCA | 49 |
| BCY18030 | none | N[1Nal]NCSPDAHLGCISYC | 50 |
| BCY18039 | Ac | CSPDAHLGCISYCE[Pip]W | 51 |
| BCY17994 | Ac | CSPDAHLGCISYCEPW | 52 |
| BCY18029 | none | NWNCSPDAHLGCISYC | 53 |
| BCY17109 | none | NWNCSPDAHLGCISYCA | 54 |
| BCY18037 | Ac | CSPDAHLGCISYCE[Aze]W | 55 |
| BCY17992 | Ac | NWNCSPDAHLGCISYC | 53 |
| BCY18038 | Ac | CSPDAHLGCISYCE[dP]W | 56 |
| BCY18034 | Ac | N[1Nal]NCSPDAHLGCISYC | 57 |
| BCY18031 | none | N[dW]NCSPDAHLGCISYC | 58 |
| BCY18035 | Ac | N[dW]NCSPDAHLGCISYC | 58 |
| BCY17110 | none | HWMCSPDAHLGCISYCA | 59 |
| BCY17115 | none | ACSPDAHLGCISYCPHP | 60 |
| BCY17114 | none | ACSPDAHLGCISYCEPW | 61 |
| BCY17112 | none | NEVCSPDAHLGCISYCA | 62 |
| BCY17120 | none | ACSPDAHLGCISYCPIVH | 63 |
| BCY15891 | Ac | CSPDAHLGCISYC | 26 |
| BCY17111 | none | HTSCSPDAHLGCISYCA | 64 |
| BCY18036 | Ac | N[NMeTrp]NCSPDAHLGCISYC | 65 |
| BCY18032 | none | N[NMeTrp]NCSPDAHLGCISYC | 65 |
| BCY15939 | Ac | ACSPDAHLGCISYCA | 66 |
| BCY17119 | none | ACSPDAHLGCISYCEHQE | 67 |
| BCY17113 | none | ESFCSPDAHLGCISYCA | 68 |
| BCY17870 | none | NWNCSPDAHLGCISYC[K(N₃)] | 69 |
| BCY17871 | Ac | NWNCSPDAHLGCISYC[K(N₃)] | 69 |
| BCY17872 | AzPro | NWNCSPDAHLGCISYC | 53 |
| BCY17873 | Ac | CSPDAHLGCISYCEPW[K(N₃)] | 70 |
| BCY17874 | AzPro | CSPDAHLGCISYCEPW | 52 |
| BCY17868 | Ac | CSPDAHLGCISYC[K(N₃)] | 71 |
| BCY17869 | AzPro | CSPDAHLGCISYC | 26 |
| BCY17882 | Ac | N[dY]NCSPDAHLGCISYC[K(N₃)] | 72 |
| BCY17890 | Ac | CSPDAHLGCISYCE-[dP]W[K(N₃)] | 73 |
| BCY17892 | Ac | CSPDAHLGCISYCE-[Aze]W[K(N₃)] | 74 |
| BCY17894 | Ac | CSPDAHLGCISYCE-[Pip]W[K(N₃)] | 75 |
| BCY17906 | Ac | CSPDAHLGCISYC[K(N₃)(PYA-maleimide)] | 76 |
| BCY19405 | Ac | CSPDAHLGCISYCEPW[PEG10][K(N₃)] | 77 |
| BCY19406 | Ac | CSPDAHLGCISYCEPW[PEG24][K(N₃)] | 78 |
| BCY19407 | Ac | CSPDAHLGCISYCEPWGGSGGS[K(N₃)] | 79 |
| BCY15469 | none | ACPGDAHLGCISYCA | 80 |
| BCY15892 | Ac | CPGDAHLGCISYC | 81 |
| BCY15470 | none | ACPPDSHLGCISYCA | 82 |
| BCY15893 | Ac | CPPDSHLGCISYC | 83 |
| BCY15471 | none | ACSADDWLGCISYCA | 84 |
| BCY15894 | Ac | CSADDWLGCISYC | 85 |
| BCY17991 | Ac | CP[HyP]DAYLGC[tBuGly]SYC | 86 |
| BCY17995 | Ac | CP[HyP]DAYLGC[tBuGly]SYCEPW | 87 |
| BCY17993 | Ac | NWNCP[HyP]DAYLGC[tBuGly]SYC | 88 |
| BCY16754 | none | ACP[HyP]DAYLGC[tBuGly]SYCA | 89 |
| BCY18033 | none | NWNCP[HyP]DAYLGC[tBuGly]SYC | 88 |
| BCY17896 | Ac | CP[HyP]DAYLGC[tBuGly]SYC[K(N₃)] | 90 |
| BCY17899 | Ac | NWNCP[HyP]DAYLGC[tBuGly]SYC[K(N₃)] | 91 |
| BCY17901 | Ac | CP[HyP]DAYLGC[tBuGly]SYCEPW[K(N₃)] | 92 |
| BCY17990 | Ac | CP[HyP]DAYLGCISYC | 93 |
| BCY17875 | Ac | CP[HyP]DAYLGCISYC[K(N₃)] | 94 |
| BCY17876 | AzPro | CP[HyP]DAYLGCISYC | 93 |
| BCY17989 | Ac | CS[HyP]DAHLGCISYC | 95 |
| BCY16047 | none | ACS[HyP]DAHLGCISYCA | 96 |
| BCY17877 | Ac | CS[HyP]DAHLGCISYC[K(N₃)] | 97 |
| BCY17878 | AzPro | CS[HyP]DAHLGCISYC | 95 |
| BCY16962 | none | ACP[Aib]DAHLGC[tBuGly]SYCA | 98 |
| BCY17117 | none | TYMNCPPDAHLGCISYCA | 99 |
| BCY16048 | none | ACPPDAHLGCISYCA | 100 |
| BCY16963 | none | ACP[Aib]DAYLGC[tBuGly]SYCA | 101 |
| BCY17987 | Ac | CSADAHLGCISYC | 102 |
| BCY16753 | none | ACS[Aib]DAHLGC[tBuGly]SYCA | 103 |
| BCY16046 | none | ACSPDAHLGC[EPA]SYCA | 104 |
| BCY16964 | none | ACPPDAYLGC[tBuGly]SYCA | 105 |
| BCY16965 | none | ACS[Aib]DAYLGC[tBuGly]SYCA | 106 |
| BCY17986 | Ac | CAPDAHLGCISYC | 107 |
| BCY16550 | none | ACP[Aib]DAHLGCISYCA | 108 |
| BCY16966 | none | ACSPDAYLGC[tBuGly]SYCA | 109 |
| BCY16051 | none | ACSPDAHLGC[tBuGly]SYCA | 110 |
| BCY17118 | none | IDSNCPNDAHLGCISYCA | 111 |
| BCY17116 | none | WGKSCPIDAHLGCISYCA | 112 |
| BCY16053 | none | ACSPDAYLGCISYCA | 113 |
| BCY16557 | none | ACPPDAYLGCISYCA | 114 |
| BCY16035 | none | ACS[Aib]DAHLGCISYCA | 115 |
| BCY16043 | none | ACSPDAHLGC[Chg]SYCA | 116 |
| BCY15769 | none | ACAPDAHLGCISYCA[Sar]₆[K-Fl] | 117 |
| BCY15648 | none | ACYLPDW[tBuAla]CGDEYCA | 118 |
| BCY16031 | none | ACSPDAHLGCIS[2Nal]CA | 119 |
| BCY16079 | none | ACSPDAHLGCIS[3tBuTyr]CA | 120 |
| BCY16036 | none | ACSPD[Aib]HLGCISYCA | 121 |
| BCY16029 | none | ACSPDAHLGCIS[1Nal]CA | 122 |
| BCY16089 | none | ACSPDAH[tBuAla]GCISYCA | 123 |
| BCY16088 | none | ACSPDAH[Cba]GCISYCA | 124 |
| BCY16052 | none | ACSPDAHLGCISWCA | 125 |
| BCY16033 | none | ACSPD[Abu]HLGCISYCA | 126 |
| BCY16039 | none | ACS[Aze]DAHLGCISYCA | 127 |
| BCY17988 | Ac | CS[Aze]DAHLGCISYC | 128 |
| BCY17879 | Ac | CS[Aze]DAHLGCISYC[K(N₃)] | 129 |
| BCY17880 | AzPro | CS[Aze]DAHLGCISYC | 128 |
| BCY16038 | Ac | ACSPDDHLGCISYCA | 130 |
| BCY16050 | none | ACSPDSHLGCISYCA | 131 |
| BCY16034 | none | ACSPDAH[Abu]GCISYCA | 132 |
| BCY16032 | none | ACSPDAHLGCIS[4Pal]CA | 133 |
| BCY16049 | none | ACP[dA]DAHLGCISYCA | 134 |
| BCY16558 | none | ACSPDAYLGC[tBuAla]SYCA | 135 |
| BCY16041 | none | ACSPDAHLGC[C5g]SYCA | 136 |
| BCY16042 | none | ACSPDAHLGC[Cbg]SYCA | 137 |
| BCY16045 | none | ACSPDAHL[dA]CISYCA | 138 |
| BCY16037 | none | ACSPDAH[Aib]GCISYCA | 139 |
| BCY16044 | none | ACSPDAHLGC[Cpg]SYCA | 140 |
| BCY16040 | none | ACSPDAHLGC[B-MeIle]SYCA | 141 |
| BCY15771 | none | ACSADAHLGCISYCA[Sar]₆[K-Fl] | 142 |
| BCY15772 | none | ACSPAAHLGCISYCA[Sar]₆[K-Fl] | 143 |
| BCY15773 | none | ACSPDAALGCISYCA[Sar]₆[K-Fl] | 144 |
| BCY15774 | none | ACSPDAHAGCISYCA[Sar]₆[K-Fl] | 145 |
| BCY15775 | none | ACSPDAHLACISYCA[Sar]₆[K-Fl] | 146 |
| BCY15776 | none | ACSPDAHLGCASYCA[Sar]₆[K-Fl] | 147 |
| BCY15777 | none | ACSPDAHLGCIAYCA[Sar]₆[K-Fl] | 148 |
| BCY15770 | none | ACSPDAHLGCISACA[Sar]₆[K-Fl] | 149 |
| BCY17903 | Ac | C[K(N₃)]PDAHLGCISYC | 150 |
| BCY17904 | Ac | CS[K(N₃)]DAHLGCISYC | 151 |
| BCY17905 | Ac | CSPD[K(N₃)]HLGCISYC | 152 |
| BCY23180 | none | C[HyP][HyP]DAYLGC[tBuGly]SYCEPW | 195 |
| BCY21757 | Ac | CP[HyP]DAYLGC[tBuGly]SYCEPWK | 245 |
| BCY21758 | Ac | CP[HyP]DAYLGC[tBuGly]SYCEPWC | 246 |
| BCY23181 | none | C[Oxa][HyP]DAYLGC[tBuGly]SYCEPW | 196 |
| BCY23182 | none | C[Cis-HyP][HyP]DAYLGC[tBuGly]SYCEPW | 197 |
| BCY23183 | none | CP[Oxa]DAYLGC[tBuGly]SYCEPW | 198 |
| BCY23184 | none | CP[Cis-HyP]DAYLGC[tBuGly]SYCEPW | 199 |
| BCY23185 | none | CP[HyP]DA[DOPA]LGC[tBuGly]SYCEPW | 200 |
| BCY23186 | none | CP[HyP]DA[pCaPhe]LGC[tBuGly]SYCEPW | 201 |
| BCY23187 | none | CP[HyP]DA[pCoPhe]LGC[tBuGly]SYCEPW | 202 |
| BCY23188 | none | CP[HyP]DA[hTyr]LGC[tBuGly]SYCEPW | 203 |
| BCY23189 | none | CP[HyP]DAYL[dS]C[tBuGly]SYCEPW | 204 |
| BCY23190 | none | CP[HyP]DAYL[dT]C[tBuGly]SYCEPW | 205 |
| BCY23191 | none | CP[HyP]DAYL[dD]C[tBuGly]SYCEPW | 206 |
| BCY23192 | none | CP[HyP]DAYL[dE]C[tBuGly]SYCEPW | 207 |
| BCY23193 | none | CP[HyP]DAYL[dN]C[tBuGly]SYCEPW | 208 |
| BCY23194 | none | CP[HyP]DAYL[dQ]C[tBuGly]SYCEPW | 209 |
| BCY23195 | none | CP[HyP]DAYL[dY]C[tBuGly]SYCEPW | 210 |
| BCY23196 | none | CP[HyP]DAYLSC[tBuGly]SYCEPW | 211 |
| BCY23197 | none | CP[HyP]DAYLDC[tBuGly]SYCEPW | 212 |
| BCY23198 | none | CP[HyP]DAYLYC[tBuGly]SYCEPW | 213 |
| BCY23199 | none | CP[HyP]DAYLNC[tBuGly]SYCEPW | 214 |
| BCY23200 | none | CP[HyP]DAYLGC[tBuGly]S[DOPA]CEPW | 215 |
| BCY23201 | none | CP[HyP]DAYLGC[tBuGly]S[pCaPhe]CEPW | 216 |
| BCY23202 | none | CP[HyP]DAYLGC[tBuGly]S[pCoPhe]CEPW | 217 |
| BCY23203 | none | CP[HyP]DAYLGC[tBuGly]S[hTyr]CEPW | 218 |
| BCY23204 | none | CP[HyP]DAYLGC[tBuGly]SYCE[HyP]W | 219 |
| BCY23205 | none | CP[HyP]DAYLGC[tBuGly]SYCE[Oxa]W | 220 |
| BCY23206 | none | CP[HyP]DAYLGC[tBuGly]SYCE[Cis-HyP]W | 221 |
| BCY23207 | none | CP[HyP]DAYLGC[tBuGly]SYCEPY | 222 |
| BCY23208 | none | CP[HyP]DAYLGC[tBuGly]SYCEP[DOPA] | 223 |
| BCY23209 | none | CP[HyP]DAYLGC[tBuGly]SYCEP[pCaPhe] | 224 |
| BCY23210 | none | CP[HyP]DAYLGC[tBuGly]SYCEP[pCoPhe] | 225 |
| BCY23211 | none | CP[HyP]DAYLGC[tBuGly]SYCEP[hTyr] | 226 |
| BCY23216 | none | CP[HyP]EAYLGC[tBuGly]SYCEPW | 227 |
| BCY23217 | none | CP[HyP][Gla]AYLGC[tBuGly]SYCEPW | 228 |
| BCY23218 | none | CP[HyP]DAYSGC[tBuGly]SYCEPW | 229 |
| BCY23219 | none | CP[HyP]DAYTGC[tBuGly]SYCEPW | 230 |
| BCY23220 | none | CP[HyP]DAYDGC[tBuGly]SYCEPW | 231 |
| BCY23221 | none | CP[HyP]DAYEGC[tBuGly]SYCEPW | 232 |
| BCY23222 | none | CP[HyP]DAYNGC[tBuGly]SYCEPW | 233 |
| BCY23223 | none | CP[HyP]DAYQGC[tBuGly]SYCEPW | 234 |
| BCY23224 | none | CP[HyP]DAYLGC[tBuGly][HSer]YCEPW | 235 |
| BCY23225 | none | CP[HyP]DAYLGC[tBuGly]TYCEPW | 236 |
| BCY23226 | none | CP[HyP]DAYLGC[tBuGly]DYCEPW | 237 |
| BCY23227 | none | CP[HyP]DAYLGC[tBuGly]EYCEPW | 238 |
| BCY23228 | none | CP[HyP]DAYLGC[tBuGly]NYCEPW | 239 |
| BCY23229 | none | CP[HyP]DAYLGC[tBuGly]QYCEPW | 240 |
| BCY23230 | none | CP[HyP]DAYLGC[tBuGly]SYCDPW | 241 |
| BCY23231 | none | CP[HyP]DAYLGC[tBuGly]SYC[Gla]PW | 242 |
| BCY23514 | none | CP[HyP]DAYLGCYSYCEPW | 243 |
| BCY23515 | none | CP[HyP]DAYLGC[3HyV]SYCEPW | 244 |

wherein Ac represents acetyl, AzPro represents azidopropyl, Abu represents aminobutyric acid, Aib represents aminoisobutyric acid, Aze represents azetidine, B-MeIle represents beta-methyl isoleucine, C5g represents cyclopentyl glycine, Cba represents β-cyclobutylalanine, Cbg represents cyclobutyl glycine, Chg represents cyclohexyl glycine, Cpg represents cyclopropyl glycine, EPA represents 2-amino-3-ethyl-pentanoic acid, HyP represents trans-4-hydroxy-L-proline, K(N₃) represents 6-azido lysine, 1Nal represents 1-naphthylalanine, 2Nal represents 2-naphthylalanine, 4Pal represents 4-pyridylalanine, Pip represents pipecolic acid: tBuAla represents t-butyl-alanine, tBuGly represents t-butyl-glycine, 3tBuTyr represents 3-t-Butyl-Tyrosine, Sar represents sarcosine, K-Fl represents fluorescein attached at the 6-position of a lysine, Fl-G represents fluorescein attached at the N-terminus of a glycine, NMeTrp represents N-methyl tryptophan, dP represents _{D}-proline, dA represents _{D}-alanine, dW represents _{D}-tryptophan, dS represents _{D}-serine, dT represents _{D}-threonine, dD represents _{D}-aspartic acid, dN represents _{D}-asparagine, dQ represents _{D}-glutamine, Cis-HyP represents cis-L-4-hydroxyproline, DOPA represents 3,4-dihydroxy-phenylalanine, Gla represents L-γ-carboxyglutamic acid, HSer represents homoserine, hTyr represents homo-tyrosine, 3HyV represents 3-hydroxy-L-valine, Oxa represents oxazolidine-4-carboxylic acid, pCaPhe represents L-4-carbamoylphenylalanine, pCoPhe represents 4-carboxy-L-phenylalanine, and [K(N₃)(PYA-Maleimide)] represents a modified lysine having the following structure:

[chemical structure]

[0279] In certain embodiments, a bicycle ligand has the structure:

[chemical structure]

or a salt thereof, wherein Q is N₃ (BCY17901, SEQ ID NO: 92), NH₂ (BCY21758, SEQ ID NO: 245), SH (BCY21758, SEQ ID NO: 246), a conjugate linker, or a conjugate linker covalently connected to an oligonucleotide.

[0280] In certain embodiments, a bicycle ligand comprises an amino acid sequence which is selected from CP[HyP]DAYLGC[tBuGly]SYCEPWK (SEQ ID NO: 245, herein referred to as BCY21757) and CP[HyP]DAYLGC[tBuGly]SYCEPWC (SEQ ID NO: 246, herein referred to as BCY21758), wherein HyP represents trans-4-hydroxy-L-proline and tBuGly represents t-butyl-glycine. In certain embodiments, the bicycle ligand comprises an N-terminal acetyl group and a C-terminal CONH₂ group. In certain embodiments, the first, second, and third cysteine residues within the bicycle ligand are covalently bonded to a molecular scaffold such that two polypeptide loops are formed on the molecular scaffold. In certain embodiments, the molecular scaffold is 1,1′,1″-(1,3,5-triazinane-1,3,5-triyl)triprop-2-en-1-one (TATA).

### Transferrin Receptor

[0281] In certain embodiments, a bicycle ligand is capable of interacting with the type 1 transferrin receptor. In certain embodiments, a bicycle ligand is capable of binding the type 1 transferrin receptor. In certain embodiments, a bicycle ligand is capable of binding the type 1 transferrin receptor while not interfering with the binding of the natural ligand transferrin. In certain embodiments, a bicycle ligand inhibits the binding of the natural ligand transferrin.

### Certain Conjugate Linkers

[0282] In certain embodiments, oligomeric compounds comprise an oligonucleotide and a conjugate group, wherein the conjugate group comprises a conjugate moiety and a conjugate linker. In certain embodiments, the conjugate linker links the conjugate moiety to the oligonucleotide. In certain embodiments, the conjugate linker is a single chemical bond (i.e., the conjugate moiety is attached directly to an oligonucleotide through a single bond). In certain embodiments, the conjugate linker comprises one or more atoms. In certain embodiments, the conjugate linker comprises a chemical group. In certain embodiments, the conjugate linker comprises a chain structure, such as a hydrocarbyl chain, or an oligomer of repeating units such as ethylene glycol, nucleosides, or amino acid units. In certain embodiments, the oligonucleotide is a modified oligonucleotide. In certain embodiments, the conjugate moiety is a bicycle ligand. In certain embodiments, the conjugate moiety comprises two polypeptide loops attached to a molecular scaffold.

[0283] In certain embodiments, a conjugate linker comprises one or more groups selected from alkyl, amino, oxo, amide, disulfide, polyethylene glycol, ether, thioether, and hydroxylamino. In certain such embodiments, the conjugate linker comprises groups selected from alkyl, amino, oxo, amide and ether groups. In certain embodiments, the conjugate linker comprises groups selected from alkyl and amide groups. In certain embodiments, the conjugate linker comprises groups selected from alkyl and ether groups. In certain embodiments, the conjugate linker comprises at least one phosphorus moiety. In certain embodiments, the conjugate linker comprises at least one phosphate group. In certain embodiments, the conjugate linker includes at least one neutral linking group.

[0284] In certain embodiments, conjugate linkers, including the conjugate linkers described above, are bifunctional linking moieties, e.g., those known in the art to be useful for attaching conjugate moieties to parent compounds, such as the oligonucleotides provided herein. In general, a bifunctional linking moiety comprises at least two functional groups. One of the functional groups is selected to react with a particular site on a parent compound and the other is selected to react with a peptide extender. Examples of functional groups used in a bifunctional linking moiety include but are not limited to electrophiles for reacting with nucleophilic groups and nucleophiles for reacting with electrophilic groups. In certain embodiments, bifunctional linking moieties comprise one or more groups selected from amino, hydroxyl, carboxylic acid, thiol, alkyl, alkenyl, and alkynyl.

[0285] In certain embodiments, conjugate linkers comprise chemical groups that are formed upon a reaction between a first functional group and a second functional group. In certain embodiments, a modified oligonucleotide is attached to the first functional group during synthesis, and a conjugate moiety is attached to a second functional group during synthesis. Then, the two compounds are mixed under specific conditions to yield the final oligomeric compound. In certain embodiments, the conjugate moiety is a bicycle ligand. In certain embodiments, the conjugate moiety comprises two polypeptide loops attached to a molecular scaffold. Such reactions that are compatible with both oligonucleotide and peptide chemistry have been previously described and are often called “bioconjugation” reactions. These reactions include strain promoted azido-alkyne cycloaddition (SPAAC), copper-catalyzed click reaction (CuAAC), active ester conjugation to an amino modified oligonucleotide, maleimide-thiol Michael addition, ketol/hydroxylamine ligation, the Staudinger ligation, reductive amination, thio ether formation, disulfide formation, reductive alkylation, catalyst-free N-arylation, sulfur fluoride exchange click reaction (SuFEx), and inverse demand Diels Alder reaction. Certain such reactions are described in, e.g., Jbara, et al., “Oligonucleotide Bioconjugation with Bifunctional Palladium Reagents”, Angew. Chem. Int. Ed. 2021, 60(21)12109-12115; Dong, et al., “Sulfur(VI) Fluoride Exchange (SuFEx): Another Good Reaction for Click Chemistry,” Angew. Chem. Int. Ed. 2014, 53(36):9430-9448.4; Zhang, et al., “Arylation Chemistry for Bioconjugation,” Angew. Chem. Int. Ed. Engl. 2019; 58(15): 4810-4839; Walsh, et al., “Site-selective modification strategies in antibody-drug conjugates” Chem. Soc. Rev., 2021, 50: 1305-1353; Tiefenbrunn, et al., “Chemoselective ligation techniques: modern applications of time-honored chemistry”, Biopolymers, 2010, 94(1):95-106; Drake, et al., Bioconjug. Chem. 2014, 25(7):1331-1341; Bode, Acc. Chem. Res., 2017, 50, 9, 2104-2115; J. Magano, B. Bock, et al, Org. Proc. Res. Dev. 2014, 18:142-151; Craig S. McKay and M. G. Finn, “Click Chemistry in Complex Mixtures: Bioorthogonal Bioconjugation”, Chemistry & Biology 2014; Mitchell P. Christy et al., Org. Lett. 2020, 22: 2365; Ren et al., Angew. Chem. Int. Ed. Engl. 2009, 48, 9658-9662; Rohrbacher, F. et al., Helv. Chim. Acta. 2018, 101; Baalmaan, et al, “A Bioorthogonal Click Chemistry Toolbox for Targeted Synthesis of Branched and Well-Defined Protein-Protein Conjugates”, Angew. Chem. Int. Ed. 2020 (59): 12885-12893; Lang, et al, “Biorthogonal Reactions for Labeling Proteins”, J. Am. Chem. Soc, 2014, 9(1):16-20; Nair, et al., “The Thiol-Michael Addition Click Reaction: A Powerful and Widely Used Tool in Materials Chemistry”, Chem. Mater. 2013 26(1):724-744; Kalia and Raines, “Hydrolytic Stability of Hydrazones and Oximes”, Angew. Chem. Int. Ed., 2008, 47:7523-7526.

[0286] Examples of conjugate linkers include but are not limited to pyrrolidine, 8-amino-3,6-dioxaoctanoic acid (ADO), succinimidyl 4-(N-maleimidomethyl) cyclohexane-1-carboxylate (SMCC) and 6-aminohexanoic acid (AHEX or AHA). Other conjugate linkers include but are not limited to substituted or unsubstituted C₁-C₁₀ alkyl, substituted or unsubstituted C₂-C₁₀ alkenyl or substituted or unsubstituted C₂-C₁₀ alkynyl, wherein a nonlimiting list of preferred substituent groups includes hydroxyl, amino, alkoxy, carboxy, benzyl, phenyl, nitro, thiol, thioalkoxy, halogen, alkyl, aryl, alkenyl and alkynyl.

[0287] In certain embodiments, the bicycle ligand comprises an N-terminal or a C-terminal extension azide group, which optionally may be joined with an oligomeric compound by cycloaddition with bicyclo[6.1.0]non-4-yn-9-ylmethyl carbamate-oligo or 2-(cyclooct-2-yn-1-yloxy)acetamide-oligo. In certain embodiments, the bicycle ligand comprises an N-terminal or a C-terminal extension amide group which optionally may be joined with an oligomeric compound by coupling with oligo-7-amido-7-oxoheptanoic acid. In certain embodiments, the bicycle ligand comprises an N-terminal or a C-terminal extension 2-(aminooxy)acetamide group which optionally may be joined with an oligomeric compound by condensation with 5-oxo-5-(4-oxopiperidin-1-yl)pentanamide-oligo. In certain embodiments, the bicycle ligand comprises an N-terminal or a C-terminal extension thiol group which optionally may be joined with an oligomeric compound by addition to 3-(2,5-dioxo-2,5-dihydro-1H-pyrrol-1-yl)propenamide-oligo.

[0288] In certain embodiments, conjugate linkers comprise 1-10 linker-nucleosides. In certain embodiments, conjugate linkers comprise 2-5 linker-nucleosides. In certain embodiments, conjugate linkers comprise exactly 3 linker-nucleosides. In certain embodiments, conjugate linkers comprise the TCA motif. In certain embodiments, such linker-nucleosides are modified nucleosides. In certain embodiments such linker-nucleosides comprise a modified sugar moiety. In certain embodiments, linker-nucleosides are unmodified. In certain embodiments, linker-nucleosides comprise an optionally protected heterocyclic base selected from a purine, substituted purine, pyrimidine or substituted pyrimidine. In certain embodiments, a cleavable moiety is a nucleoside selected from uracil, thymine, cytosine, 4-N-benzoylcytosine, 5-methyl cytosine, 4-N-benzoyl-5-methyl cytosine, adenine, 6-N-benzoyladenine, guanine and 2-N-isobutyrylguanine. It is typically desirable for linker-nucleosides to be cleaved from the oligomeric compound after it reaches a target tissue. Accordingly, linker-nucleosides are typically linked to one another and to the remainder of the oligomeric compound through cleavable bonds. In certain embodiments, such cleavable bonds are phosphodiester bonds.

[0289] Herein, linker-nucleosides are not considered to be part of the oligonucleotide. Accordingly, in embodiments in which an oligomeric compound comprises an oligonucleotide consisting of a specified number or range of linked nucleosides and/or a specified percent complementarity to a reference nucleic acid and the oligomeric compound also comprises a conjugate linker comprising linker-nucleosides, those linker-nucleosides are not counted toward the length of the oligonucleotide and are not used in determining the percent complementarity of the oligonucleotide for the reference nucleic acid. For example, an oligomeric compound may comprise (1) an oligonucleotide consisting of 8-30 nucleosides and (2) a conjugate linker comprising 1-10 linker-nucleosides that are contiguous with the nucleosides of the oligonucleotide. The total number of contiguous linked nucleosides in such an oligomeric compound is more than 30. Alternatively, an oligomeric compound may comprise an oligonucleotide consisting of 8-30 nucleosides and no conjugate linker. The total number of contiguous linked nucleosides in such an oligomeric compound is no more than 30. Unless otherwise indicated conjugate linkers comprise no more than 10 linker-nucleosides. In certain embodiments, conjugate linkers comprise no more than 5 linker-nucleosides. In certain embodiments, conjugate linkers comprise no more than 3 linker-nucleosides. In certain embodiments, conjugate linkers comprise no more than 2 linker-nucleosides. In certain embodiments, conjugate linkers comprise no more than 1 linker-nucleoside.

[0290] In certain embodiments, it is desirable for a conjugate moiety to be cleaved from the oligonucleotide. For example, in certain circumstances oligomeric compounds comprising a particular conjugate moiety are better taken up by a particular cell type, but once the oligomeric compound has been taken up, it is desirable that the conjugate moiety be cleaved to release the unconjugated or parent oligonucleotide. Thus, certain conjugate linkers may comprise one or more cleavable moieties. In certain embodiments, a cleavable moiety is a cleavable bond. In certain embodiments, a cleavable moiety is a group of atoms comprising at least one cleavable bond. In certain embodiments, a cleavable moiety comprises a group of atoms having one, two, three, four, or more than four cleavable bonds. In certain embodiments, a cleavable moiety is selectively cleaved inside a cell or subcellular compartment, such as a lysosome. In certain embodiments, a cleavable moiety is selectively cleaved by endogenous enzymes, such as nucleases.

[0291] In certain embodiments, a cleavable bond is selected from among: an amide, an ester, an ether, one or both esters of a phosphodiester, a phosphate ester, a carbamate, or a disulfide. In certain embodiments, a cleavable bond is one or both of the esters of a phosphodiester. In certain embodiments, a cleavable moiety comprises a phosphate or phosphodiester. In certain embodiments, the cleavable moiety is a phosphodiester linkage between an oligonucleotide and a conjugate moiety.

[0292] In certain embodiments, a cleavable moiety comprises or consists of one or more linker-nucleosides. In certain such embodiments, the one or more linker-nucleosides are linked to one another and/or to the remainder of the oligomeric compound through cleavable bonds. In certain embodiments, such cleavable bonds are unmodified phosphodiester bonds. In certain embodiments, a cleavable moiety is 2′-deoxy nucleoside that is attached to either the 3′ or 5′-terminal nucleoside of an oligonucleotide by a phosphate internucleoside linkage and covalently attached to the remainder of the conjugate linker or conjugate moiety by a phosphate or phosphorothioate linkage. In certain such embodiments, the cleavable moiety is 2′-deoxyadenosine.

[0293] In certain embodiments, oligomeric compounds disclosed herein comprise an oligonucleotide linked to conjugate moiety by a conjugate linker, wherein the oligomeric compound is prepared using Click chemistry known in the art. Compounds have been prepared using Click chemistry wherein alkynyl phosphonate internucleoside linkages on an oligomeric compound attached to a solid support are converted into the 1,2,3-triazolylphosphonate internucleoside linkages and then cleaved from the solid support (Krishna et al., J. Am. Chem. Soc. 2012, 134(28), 11618-11631), which is incorporated by reference herein in its entirety. Additional conjugate linkers suitable for use in several embodiments can be prepared by Click chemistry described in “Click Chemistry for Biotechnology and Materials Science” Ed. Joerg Laham, Wiley 2009, which is incorporated by reference herein in its entirety.

[0294] In certain embodiments, a Click reaction can be used to link a conjugate moiety and an oligonucleotide by reacting:

[chemical structure]

with an oligonucleotide having a terminal amine, including but not limited to the following compound:

[chemical structure]

wherein Y is the remainder of the oligonucleotide, to yield:

[chemical structure]

which can be reacted with a conjugate moiety having an azide to yield:

[chemical structure]

wherein N—N═N is formed from an azido group of the conjugate moiety, and wherein X represents the remainder of the conjugate moiety. In certain embodiments, the conjugate moiety comprises a bicycle ligand.

[0295] In certain embodiments, the conjugate moiety comprises a polypeptide. In certain embodiments, the azido group is attached to an amino-acid side chain of the polypeptide. In certain embodiments, the azido group is attached to the N-terminus of the polypeptide. In certain embodiments, the azido group replaces the amino group of a lysine of the polypeptide.

[0296] In certain embodiments, an oligomeric compound comprises an oligonucleotide linked to a conjugate moiety by a conjugate linker, wherein the conjugate linker is prepared from the following compound:

[chemical structure]

[0297] In certain embodiments, an oligomeric compound comprises an oligonucleotide linked to a conjugate moiety by a conjugate linker, wherein the conjugate linker comprises:

[chemical structure]

[0298] In certain embodiments, an oligomeric compound comprises an oligonucleotide linked to a conjugate moiety by a conjugate linker, wherein the conjugate linker comprises:

[chemical structure]

[0299] In certain embodiments, an oligomeric compound comprises an oligonucleotide linked to a conjugate moiety by a conjugate linker, wherein the compound comprises:

[chemical structure]

wherein N—N═N is formed from an azido group of the conjugate moiety; X represents the remainder of the conjugate moiety; and Y represents a portion of the oligomeric compound comprising the oligonucleotide. In certain embodiments, the conjugate moiety comprises a bicycle ligand. In certain embodiments, the conjugate moiety comprises a polypeptide. In certain embodiments, the azido group is attached to an amino-acid side chain of the polypeptide. In certain embodiments, the azido group is attached to the N-terminus of the polypeptide. In certain embodiments, the azido group replaces the amino group of a lysine of the polypeptide.

[0300] In certain embodiments, an oligomeric compound comprises an oligonucleotide linked to a conjugate moiety by a conjugate linker, wherein the oligomeric compound comprises:

[chemical structure]

wherein N—N═N is formed from an azido group of the conjugate moiety; X represents the remainder of the conjugate moiety; and Y represents the remainder of the oligonucleotide. In certain embodiments, the conjugate moiety comprises a bicycle ligand. In certain embodiments, the conjugate moiety comprises a polypeptide. In certain embodiments, the azido group is attached to an amino-acid side chain of the polypeptide. In certain embodiments, the azido group is attached to the N-terminus of the polypeptide. In certain embodiments, the azido group replaces the amino group of a lysine of the polypeptide.

[0301] In certain embodiments, an oligomeric compound comprises an oligonucleotide linked to a conjugate moiety by a conjugate linker, wherein the oligomeric compound comprises:

[chemical structure]

wherein N—N═N is formed from an azido group of the conjugate moiety; X represents the remainder of the conjugate moiety; and Y represents the remainder of the oligonucleotide. In certain embodiments, the conjugate moiety comprises a bicycle ligand. In certain embodiments, the conjugate moiety comprises a polypeptide. In certain embodiments, the azido group is attached to an amino-acid side chain of the polypeptide. In certain embodiments, the azido group is attached to the N-terminus of the polypeptide. In certain embodiments, the azido group replaces the amino group of a lysine of the polypeptide.

[0302] In certain embodiments, a Click reaction can be used to link a conjugate moiety and an oligonucleotide by reacting:

[chemical structure]

and F in solution together
with an oligonucleotide having a terminal amine, including but not limited to the following compound:

[chemical structure]

wherein Y is the remainder of the oligonucleotide, to yield:

[chemical structure]

which can be reacted with a conjugate moiety having an azide to yield:

[chemical structure]

wherein N—N═N is formed from an azido group of the conjugate moiety, and wherein X represents the remainder of the conjugate moiety. In certain embodiments, the conjugate moiety comprises a bicycle ligand. In certain embodiments, the conjugate moiety comprises a polypeptide. In certain embodiments, the azido group is attached to an amino-acid side chain of the polypeptide. In certain embodiments, the azido group is attached to the N-terminus of the polypeptide. In certain embodiments, the azido group replaces the amino group of a lysine of the polypeptide.

[0303] In certain embodiments, an oligomeric compound comprises an oligonucleotide linked to a conjugate moiety by a conjugate linker, wherein the conjugate linker is prepared from the following compound:

[chemical structure]

[0304] In certain embodiments, an oligomeric compound comprises an oligonucleotide linked to a conjugate moiety by a conjugate linker, wherein the conjugate linker comprises:

[chemical structure]

[0305] In certain embodiments, an oligomeric compound comprises an oligonucleotide linked to a conjugate moiety by a conjugate linker, wherein the conjugate linker comprises:

[chemical structure]

[0306] In certain embodiments, an oligomeric compound comprises an oligonucleotide linked to a conjugate moiety by a conjugate linker, wherein the compound comprises:

[chemical structure]

wherein N—N═N is formed from an azido group of the conjugate moiety; X represents the remainder of the conjugate moiety; and Y represents a portion of the oligomeric compound comprising the oligonucleotide. In certain embodiments, the conjugate moiety comprises a bicycle ligand. In certain embodiments, the conjugate moiety comprises a polypeptide. In certain embodiments, the azido group is attached to an amino-acid side chain of the polypeptide. In certain embodiments, the azido group is attached to the N-terminus of the polypeptide. In certain embodiments, the azido group replaces the amino group of a lysine of the polypeptide.

[0307] In certain embodiments, an oligomeric compound comprises an oligonucleotide linked to a conjugate moiety by a conjugate linker, wherein the oligomeric compound comprises:

[chemical structure]

wherein N—N═N is formed from an azido group of the conjugate moiety; X represents the remainder of the conjugate moiety; and Y represents the remainder of the oligonucleotide. In certain embodiments, the conjugate moiety comprises a bicycle ligand. In certain embodiments, the conjugate moiety comprises a polypeptide. In certain embodiments, the azido group is attached to an amino-acid side chain of the polypeptide. In certain embodiments, the azido group is attached to the N-terminus of the polypeptide. In certain embodiments, the azido group replaces the amino group of a lysine of the polypeptide.

[0308] In certain embodiments, an oligomeric compound comprises an oligonucleotide linked to a conjugate moiety by a conjugate linker, wherein the oligomeric compound comprises:

[chemical structure]

wherein N—N═N is formed from an azido group of the conjugate moiety; X represents the remainder of the conjugate moiety; and Y represents the remainder of the oligonucleotide. In certain embodiments, the conjugate moiety comprises a bicycle ligand. In certain embodiments, the conjugate moiety comprises a polypeptide. In certain embodiments, the azido group is attached to an amino-acid side chain of the polypeptide. In certain embodiments, the azido group is attached to the N-terminus of the polypeptide. In certain embodiments, the azido group replaces the amino group of a lysine of the polypeptide.

[0309] In certain embodiments, an oligomeric compound comprises an oligonucleotide linked to a conjugate moiety by a conjugate linker, wherein the oligomeric compound comprises:

[chemical structure]

wherein X comprises the conjugate moiety; and Y comprises the oligonucleotide.

[0310] In certain embodiments, an oligomeric compound comprises an oligonucleotide linked to a conjugate moiety by a conjugate linker, wherein the oligomeric compound comprises:

[chemical structure]

wherein X comprises the oligonucleotide; and Y comprises the conjugate moiety.

[0311] In certain embodiments, an oligomeric compound comprises an oligonucleotide linked to a conjugate moiety by a conjugate linker, wherein the conjugate linker comprises:

[chemical structure]

[0312] In certain embodiments, an oligomeric compound comprises an oligonucleotide linked to a conjugate moiety by a conjugate linker, wherein the conjugate linker comprises:

[chemical structure]

[0313] In certain embodiments, an oligomeric compound comprises an oligonucleotide linked to a conjugate moiety by a conjugate linker, wherein the conjugate linker comprises:

[chemical structure]

[0314] In certain embodiments, an oligomeric compound comprises an oligonucleotide linked to a conjugate moiety by a conjugate linker, wherein the conjugate linker comprises:

[chemical structure]

[0315] In certain embodiments, an oligomeric compound comprises an oligonucleotide linked to a conjugate moiety by a conjugate linker, wherein the conjugate linker comprises:

[chemical structure]

[0316] Synthetic methods describing preparation of the above starting materials and intermediates can be found in one or more of the following: Agard, et al., “A Strain-Promoted [3+2] Azide-Alkyne Cycloaddition for Covalent Modification of Biomolecules in Living Systems.” J. Am. Chem. Soc. 2004, 126:15046-15047; Lang, et al, “Biorthogonal Reactions for Labeling Proteins”, J. Am. Chem. Soc, 2014, 9(1):16-20; Nair, et al., “The Thiol-Michael Addition Click Reaction: A Powerful and Widely Used Tool in Materials Chemistry”, Chem. Mater. 2013 26(1):724-744; WO2011/136645; Komel and Kool, “Oximes and Hydrazones in Bioconjugation: Mechanism and Catalysis, Chem. Rev., 2017, 117:10358-10376; Wang, et al., “Polyfluorophenyl Ester-Terminated Homobifunctional CrossLinkers for Protein Conjugation”, Synlett, 2017, 28: 1934-1938; Kishimoto, et al, “Site-Specific Chemical Conjugation of Antibodies by Using Affinity Peptide for the Development of Therapeutic Antibody Format”, Bioconj. Chem., 2019, 30:698-702.

### Certain Oligonucleotides

[0317] In certain embodiments, provided herein are oligomeric compounds comprising oligonucleotides, which consist of linked nucleosides. Oligonucleotides may be unmodified oligonucleotides (RNA or DNA) or may be modified oligonucleotides. Modified oligonucleotides comprise at least one modification relative to unmodified RNA or DNA. That is, modified oligonucleotides comprise at least one modified nucleoside (comprising a modified sugar moiety and/or a modified nucleobase) and/or at least one modified internucleoside linkage.

### Certain Modified Nucleosides

[0318] Modified nucleosides comprise a modified sugar moiety or a modified nucleobase or both a modified sugar moiety and a modified nucleobase.

### Certain Sugar Moieties

[0319] In certain embodiments, modified sugar moieties are non-bicyclic modified sugar moieties. In certain embodiments, modified sugar moieties are bicyclic or tricyclic sugar moieties. In certain embodiments, modified sugar moieties are sugar surrogates. Such sugar surrogates may comprise one or more substitutions corresponding to those of other types of modified sugar moieties.

[0320] In certain embodiments, modified sugar moieties are non-bicyclic modified sugar moieties comprising a furanosyl ring with one or more substituent groups none of which bridges two atoms of the furanosyl ring to form a bicyclic structure. Such non bridging substituents may be at any position of the furanosyl, including but not limited to substituents at the 2′, 4′, and/or 5′ positions. In certain embodiments one or more non-bridging substituent of non-bicyclic modified sugar moieties is branched. Examples of 2′-substituent groups suitable for non-bicyclic modified sugar moieties include but are not limited to: 2′-F, 2′-OCH₃ (“OMe” or “O-methyl”), and 2′-O(CH₂)₂OCH₃ (“MOE”). In certain embodiments, 2′-substituent groups are selected from among: halo, allyl, amino, azido, SH, CN, OCN, CF₃, OCF₃, O—C₁-C₁₀ alkoxy, O—C₁-C₁₀ substituted alkoxy, O—C₁-C₁₀ alkyl, O—C₁-C₁₀ substituted alkyl, S-alkyl, N(Rₘ)-alkyl, O-alkenyl, S-alkenyl, N(Rₘ)-alkenyl, O-alkynyl, S-alkynyl, N(Rₘ)-alkynyl, O-alkylenyl-O-alkyl, alkynyl, alkaryl, aralkyl, O-alkaryl, O-aralkyl, O(CH₂)₂SCH₃, O(CH₂)₂ON(Rₘ)(Rₙ) or OCH₂C(═O)—N(Rₘ)(Rₙ), where each Rₘ and Rₙ is, independently, H, an amino protecting group, or substituted or unsubstituted C₁-C₁₀ alkyl, and the 2′-substituent groups described in Cook et al., U.S. Pat. No. 6,531,584; Cook et al., U.S. Pat. No. 5,859,221; and Cook et al., U.S. Pat. No. 6,005,087. Certain embodiments of these 2′-substituent groups can be further substituted with one or more substituent groups independently selected from among: hydroxyl, amino, alkoxy, carboxy, benzyl, phenyl, nitro (NO₂), thiol, thioalkoxy, thioalkyl, halogen, alkyl, aryl, alkenyl and alkynyl. Examples of 4′-substituent groups suitable for non-bicyclic modified sugar moieties include but are not limited to alkoxy (e.g., methoxy), alkyl, and those described in Manoharan et al., WO 2015/106128. Examples of 5′-substituent groups suitable for non-bicyclic modified sugar moieties include but are not limited to: 5′-methyl (R or S), 5′-vinyl, and 5′-methoxy. In certain embodiments, non-bicyclic modified sugar moieties comprise more than one non-bridging sugar substituent, for example, 2′-F-5′-methyl sugar moieties and the modified sugar moieties and modified nucleosides described in Migawa et al., WO 2008/101157 and Rajeev et al., US2013/0203836.).

[0321] In certain embodiments, a 2′-substituted non-bicyclic modified nucleoside comprises a sugar moiety comprising a non-bridging 2′-substituent group selected from: F, NH₂, N₃, OCF₃, OCH₃, O(CH₂)₃NH₂, CH₂CH═CH₂, OCH₂CH═CH₂, OCH₂CH₂OCH₃, O(CH₂)₂SCH₃, O(CH₂)₂ON(Rₘ)(Rₙ), O(CH₂)₂O(CH₂)₂N(CH₃)₂, and N-substituted acetamide (OCH₂C(═O)—N(Rₘ)(Rₙ)), where each Rₘ and Rₙ is, independently, H, an amino protecting group, or substituted or unsubstituted C₁-C₁₀ alkyl.

[0322] In certain embodiments, a 2′-substituted non-bicyclic nucleoside modified nucleoside comprises a sugar moiety comprising a non-bridging 2′-substituent group selected from: F, OCF₃, OCH₃, OCH₂CH₂OCH₃, O(CH₂)₂SCH₃, O(CH₂)₂ON(CH₃)₂, O(CH₂)₂O(CH₂)₂N(CH₃)₂, and OCH₂C(═O)—N(H)CH₃ (“NMA”).

[0323] In certain embodiments, a 2′-substituted non-bicyclic modified nucleoside comprises a sugar moiety comprising a non-bridging 2′-substituent group selected from: F, OCH₃, and OCH₂CH₂OCH₃.

[0324] Certain modified sugar moieties comprise a substituent that bridges two atoms of the furanosyl ring to form a second ring, resulting in a bicyclic sugar moiety. In certain such embodiments, the bicyclic sugar moiety comprises a bridge between the 4′ and the 2′ furanose ring atoms. Examples of such 4′ to 2′ bridging sugar substituents include but are not limited to: 4′-CH₂-2′, 4′—(CH₂)₂-2′, 4′—(CH₂)₃-2′, 4′—CH₂—O-2′ (“LNA”), 4′-CH₂—S-2′, 4′—(CH₂)₂—O-2′ (“ENA”), 4′-CH(CH₃)—O-2′ (referred to as “constrained ethyl” or “cEt”), 4′-CH₂—O—CH₂-2′, 4′—CH₂—N(R)-2′, 4′—CH(CH₂OCH₃)—O-2′ (“constrained MOE” or “cMOE”) and analogs thereof (see, e.g., Seth et al., U.S. Pat. No. 7,399,845, Bhat et al., U.S. Pat. No. 7,569,686, Swayze et al., U.S. Pat. No. 7,741,457, and Swayze et al., U.S. Pat. No. 8,022,193), 4′-C(CH₃)(CH₃)—O-2′ and analogs thereof (see, e.g., Seth et al., U.S. Pat. No. 8,278,283), 4′-CH₂—N(OCH₃)-2′ and analogs thereof (see, e.g., Prakash et al., U.S. Pat. No. 8,278,425), 4′-CH₂—O—N(CH₃)-2′ (see, e.g., Allerson et al., U.S. Pat. No. 7,696,345 and Allerson et al., U.S. Pat. No. 8,124,745), 4′-CH₂—C(H)(CH₃)-2′ (see, e.g., Zhou, et al., J. Org. Chem., 2009, 74, 118-134), 4′-CH₂—C(═CH₂)-2′ and analogs thereof (see e.g., Seth et al., U.S. Pat. No. 8,278,426), 4′C(—RₐR_{b})—N(R)—O-2′, 4′—C(RₐR_{b})—O—N(R)-2′, 4′—CH₂—O—N(R)-2′, and 4′-CH₂—N(R)—O-2′, wherein each R, Rₐ, and R_{b} is, independently, H, a protecting group, or C₁-C₁₂ alkyl (see, e.g. Imanishi et al., U.S. Pat. No. 7,427,672).

[0325] In certain embodiments, such 4′ to 2′ bridges independently comprise from 1 to 4 linked groups independently selected from: —[C(Rₐ)(R_{b})]ₙ—, —[C(Rₐ)(R_{b})]ₙ—O—, —C(Rₐ)═C(R_{b})—, —C(Rₐ)═N—, C(═NRₐ)—, —C(═O)—, —C(═S)—, —O—, —Si(Rₐ)₂—, —S(═O)ₓ—, and —N(Rₐ)—;
[0326] wherein: x is 0, 1, or 2; n is 1, 2, 3, or 4; each Rₐ and R_{b} is, independently, H, a protecting group, hydroxyl, C₁-C₁₂ alkyl, substituted C₁-C₁₂ alkyl, C₂-C₁₂ alkenyl, substituted C₂-C₁₂ alkenyl, C₂-C₁₂ alkynyl, substituted C₂-C₁₂ alkynyl, C₅-C₂₀ aryl, substituted C₅-C₂₀ aryl, heterocycle radical, substituted heterocycle radical, heteroaryl, substituted heteroaryl, C₅-C₇ alicyclic radical, substituted C₅-C₇ alicyclic radical, halogen, OJ₁, NJ₁J₂, SJ₁, N₃, COOJ₁, acyl (C(═O)—H), substituted acyl, CN, sulfonyl (S(═O)₂-J₁), or sulfoxyl (S(═O)-J₁); and
[0327] each J₁ and J₂ is, independently, H, C₁-C₁₂ alkyl, substituted C₁-C₁₂ alkyl, C₂-C₁₂ alkenyl, substituted C₂-C₁₂ alkenyl, C₂-C₁₂ alkynyl, substituted C₂-C₁₂ alkynyl, C₅-C₂₀ aryl, substituted C₅-C₂₀ aryl, acyl (C(═O)—H), substituted acyl, a heterocycle radical, a substituted heterocycle radical, C₁-C₁₂ aminoalkyl, substituted C₁-C₁₂ aminoalkyl, or a protecting group.

[0328] Additional bicyclic sugar moieties are known in the art, see, for example: Freier et al., Nucleic Acids Research, 1997, 25(22), 4429-4443, Albaek et al., J. Org. Chem., 2006, 71, 7731-7740, Singh et al., Chem. Commun., 1998, 4, 455-456; Koshkin et al., Tetrahedron, 1998, 54, 3607-3630; Kumar et al., Bioorg. Med. Chem. Lett., 1998, 8, 2219-2222; Singh et al., J. Org. Chem., 1998, 63, 10035-10039; Srivastava et al., J. Am. Chem. Soc., 20017, 129, 8362-8379; Wengel et a., U.S. Pat. No. 7,053,207; Imanishi et al., U.S. Pat. No. 6,268,490; Imanishi et al. U.S. Pat. No. 6,770,748; Imanishi et al., U.S. RE44,779; Wengel et al., U.S. Pat. No. 6,794,499; Wengel et al., U.S. Pat. No. 6,670,461; Wengel et al., U.S. Pat. No. 7,034,133; Wengel et al., U.S. Pat. No. 8,080,644; Wengel et al., U.S. Pat. No. 8,034,909; Wengel et al., U.S. Pat. No. 8,153,365; Wengel et al., U.S. Pat. No. 7,572,582; and Ramasamy et al., U.S. Pat. No. 6,525,191; Torsten et al., WO 2004/106356; Wengel et al., WO 1999/014226; Seth et al., WO 2007/134181; Seth et al., U.S. Pat. No. 7,547,684; Seth et al., U.S. Pat. No. 7,666,854; Seth et al., U.S. Pat. No. 8,088,746; Seth et al., U.S. Pat. No. 7,750,131; Seth et al., U.S. Pat. No. 8,030,467; Seth et al., U.S. Pat. No. 8,268,980; Seth et al., U.S. Pat. No. 8,546,556; Seth et al., U.S. Pat. No. 8,530,640; Migawa et al., U.S. Pat. No. 9,012,421; Seth et al., U.S. Pat. No. 8,501,805; and U.S. Patent Publication Nos. Allerson et al., US2008/0039618 and Migawa et al., US2015/0191727.

[0329] In certain embodiments, bicyclic sugar moieties and nucleosides incorporating such bicyclic sugar moieties are further defined by isomeric configuration. For example, an LNA nucleoside (described herein) may be in the α-L configuration or in the β-D configuration.

[chemical structure]

α-L-methyleneoxy (4′-CH₂—O-2′) or α-L-LNA bicyclic nucleosides have been incorporated into oligonucleotides that showed antisense activity (Frieden et al., Nucleic Acids Research, 2003, 21, 6365-6372). Herein, general descriptions of bicyclic nucleosides include both isomeric configurations. When the positions of specific bicyclic nucleosides (e.g., LNA or cEt) are identified in exemplified embodiments herein, they are in the β-D configuration, unless otherwise specified.

[0330] In certain embodiments, modified sugar moieties comprise one or more non-bridging sugar substituent and one or more bridging sugar substituent (e.g., 5′-substituted and 4′-2′ bridged sugars).

[0331] In certain embodiments, modified sugar moieties are sugar surrogates. In certain such embodiments, the oxygen atom of the sugar moiety is replaced, e.g., with a sulfur, carbon or nitrogen atom. In certain such embodiments, such modified sugar moieties also comprise bridging and/or non-bridging substituents as described herein. For example, certain sugar surrogates comprise a 4′-sulfur atom and a substitution at the 2′-position (see, e.g., Bhat et al., U.S. Pat. No. 7,875,733 and Bhat et al., U.S. Pat. No. 7,939,677) and/or the 5′ position.

[0332] In certain embodiments, sugar surrogates comprise rings having other than 5 atoms. For example, in certain embodiments, a sugar surrogate comprises a six-membered tetrahydropyran (“THP”). Such tetrahydropyrans may be further modified or substituted. Nucleosides comprising such modified tetrahydropyrans include but are not limited to hexitol nucleic acid (“HNA”), anitol nucleic acid (“ANA”), manitol nucleic acid (“MNA”) (see, e.g., Leumann, CJ. Bioorg. & Med. Chem. 2002, 10, 841-854), fluoro HNA:

[chemical structure]

(“F-HNA”, see e.g., Swayze et al., U.S. Pat. No. 8,088,904; Swayze et al., U.S. Pat. No. 8,440,803; Swayze et al., U.S. Pat. No. 8,796,437; and Swayze et al., U.S. Pat. No. 9,005,906; F-HNA can also be referred to as a F-THP or 3′-fluoro tetrahydropyran), and nucleosides comprising additional modified THP compounds having the formula:

[chemical structure]

wherein, independently, for each of said modified THP nucleoside:
[0333] Bx is a nucleobase moiety;
[0334] T₃ and T₄ are each, independently, an internucleoside linking group linking the modified THP nucleoside to the remainder of an oligonucleotide or one of T₃ and T₄ is an internucleoside linking group linking the modified THP nucleoside to the remainder of an oligonucleotide and the other of T₃ and T₄ is H, a hydroxyl protecting group, a linked conjugate moiety, or a 5′ or 3-terminal group;
   q₁, q₂, q₃, q₄, q₅, q₆ and q₇ are each, independently, H, C₁-C₆ alkyl, substituted C₁-C₆ alkyl, C₂-C₆ alkenyl, substituted C₂-C₆ alkenyl, C₂-C₆ alkynyl, or substituted C₂-C₆ alkynyl; and
[0335] each of R₁ and R₂ is independently selected from among: hydrogen, halogen, substituted or unsubstituted alkoxy, NJ₁J₂, SJ₁, N₃, OC(═X)J₁, OC(═X)NJ₁J₂, NJ₃C(═X)NJ₁J₂, and CN, wherein X is 0, S or NJ₁, and each J₁, J₂, and J₃ is, independently, H or C₁-C₆ alkyl.

[0336] In certain embodiments, modified THP nucleosides are provided wherein q₁, q₂, q₃, q₄, q₅, q₆ and q₇ are each H. In certain embodiments, at least one of q₁, q₂, q₃, q₄, q₅, q₆ and q₇ is other than H. In certain embodiments, at least one of q₁, q₂, q₃, q₄, q₅, q₆ and q₇ is methyl. In certain embodiments, modified THP nucleosides are provided wherein one of R₁ and R₂ is F. In certain embodiments, R₁ is F and R₂ is H, in certain embodiments, R₁ is methoxy and R₂ is H, and in certain embodiments, R₁ is methoxyethoxy and R₂ is H.

[0337] In certain embodiments, sugar surrogates comprise rings having more than 5 atoms and more than one heteroatom. For example, nucleosides comprising morpholino sugar moieties and their use in oligonucleotides have been reported (see, e.g., Braasch et al., Biochemistry, 2002, 41, 4503-4510 and Summerton et al., U.S. Pat. No. 5,698,685; Summerton et al., U.S. Pat. No. 5,166,315; Summerton et al., U.S. Pat. No. 5,185,444; and Summerton et al., U.S. Pat. No. 5,034,506). As used here, the term “morpholino” means a sugar surrogate having the following structure:

[chemical structure]

[0338] In certain embodiments, morpholinos may be modified, for example by adding or altering various substituent groups from the above morpholino structure. Such sugar surrogates are referred to herein as “modified morpholinos.”

[0339] In certain embodiments, sugar surrogates comprise acyclic moieties. Examples of nucleosides and oligonucleotides comprising such acyclic sugar surrogates include but are not limited to: peptide nucleic acid (“PNA”), acyclic butyl nucleic acid (see, e.g., Kumar et al., Org. Biomol. Chem., 2013, 11, 5853-5865), and nucleosides and oligonucleotides described in Manoharan et al., WO2011/133876.

[0340] Many other bicyclic and tricyclic sugar and sugar surrogate ring systems are known in the art that can be used in modified nucleosides (see for example review article: Leumann, Bioorg. Med. Chem., 2002, 10, 841-854).

### Certain Modified Nucleobases

[0341] In certain embodiments, modified oligonucleotides comprise one or more nucleosides comprising an unmodified nucleobase. In certain embodiments, modified oligonucleotides comprise one or more nucleoside comprising a modified nucleobase. In certain embodiments, modified oligonucleotides comprise one or more nucleoside that does not comprise a nucleobase, referred to as an abasic nucleoside.

[0342] In certain embodiments, modified nucleobases are selected from: 5-substituted pyrimidines, 6-azapyrimidines, alkyl or alkynyl substituted pyrimidines, alkyl substituted purines, and N-2, N-6 and 0-6 substituted purines. In certain embodiments, modified nucleobases are selected from: 2-aminopropyladenine, 5-hydroxymethyl cytosine, xanthine, hypoxanthine, 2-aminoadenine, 6-N-methylguanine, 6-N-methyladenine, 2-propyladenine, 2-thiouracil, 2-thiothymine and 2-thiocytosine, 5-propynyl (—C≡C—CH₃) uracil, 5-propynylcytosine, 6-azouracil, 6-azocytosine, 6-azothymine, 5-ribosyluracil (pseudouracil), 4-thiouracil, 8-halo, 8-amino, 8-thiol, 8-thioalkyl, 8-hydroxyl, 8-aza and other 8-substituted purines, 5-halo, particularly 5-bromo, 5-trifluoromethyl, 5-halouracil, and 5-halocytosine, 7-methylguanine, 7-methyladenine, 2-F-adenine, 2-aminoadenine, 7-deazaguanine, 7-deazaadenine, 3-deazaguanine, 3-deazaadenine, 6-N-benzoyladenine, 2-N-isobutyrylguanine, 4-N-benzoylcytosine, 4-N-benzoyluracil, 5-methyl 4-N-benzoylcytosine, 5-methyl 4-N-benzoyluracil, universal bases, hydrophobic bases, promiscuous bases, size-expanded bases, and fluorinated bases. Further modified nucleobases include tricyclic pyrimidines, such as 1,3-diazaphenoxazine-2-one, 1,3-diazaphenothiazine-2-one and 9-(2-aminoethoxy)-1,3-diazaphenoxazine-2-one (G-clamp). Modified nucleobases may also include those in which the purine or pyrimidine base is replaced with other heterocycles, for example 7-deaza-adenine, 7-deazaguanosine, 2-aminopyridine and 2-pyridone. Further nucleobases include those disclosed in Merigan et al., U.S. Pat. No. 3,687,808, those disclosed in The Concise Encyclopedia Of Polymer Science And Engineering, Kroschwitz, J. I., Ed., John Wiley & Sons, 1990, 858-859; Englisch et al., Angewandte Chemie, International Edition, 1991, 30, 613; Sanghvi, Y. S., Chapter 15, Antisense Research and Applications, Crooke, S. T. and Lebleu, B., Eds., CRC Press, 1993, 273-288; and those disclosed in Chapters 6 and 15, Antisense Drug Technology, Crooke S. T., Ed., CRC Press, 2008, 163-166 and 442-443.

[0343] Publications that teach the preparation of certain of the above noted modified nucleobases as well as other modified nucleobases include without limitation, Manoharan et al., US2003/0158403; Manoharan et al., US2003/0175906; Dinh et al., U.S. Pat. No. 4,845,205; Spielvogel et al., U.S. Pat. No. 5,130,302; Rogers et al., U.S. Pat. No. 5,134,066; Bischofberger et al., U.S. Pat. No. 5,175,273; Urdea et al., U.S. Pat. No. 5,367,066; Benner et al., U.S. Pat. No. 5,432,272; Matteucci et al., U.S. Pat. No. 5,434,257; Gmeiner et al., U.S. Pat. No. 5,457,187; Cook et al., U.S. Pat. No. 5,459,255; Froehler et al., U.S. Pat. No. 5,484,908; Matteucci et al., U.S. Pat. No. 5,502,177; Hawkins et al., U.S. Pat. No. 5,525,711; Haralambidis et al., U.S. Pat. No. 5,552,540; Cook et al., U.S. Pat. No. 5,587,469; Froehler et al., U.S. Pat. No. 5,594,121; Switzer et al., U.S. Pat. No. 5,596,091; Cook et al., U.S. Pat. No. 5,614,617; Froehler et al., U.S. Pat. No. 5,645,985; Cook et al., U.S. Pat. No. 5,681,941; Cook et al., U.S. Pat. No. 5,811,534; Cook et al., U.S. Pat. No. 5,750,692; Cook et al., U.S. Pat. No. 5,948,903; Cook et al., U.S. Pat. No. 5,587,470; Cook et al., U.S. Pat. No. 5,457,191; Matteucci et al., U.S. Pat. No. 5,763,588; Froehler et al., U.S. Pat. No. 5,830,653; Cook et al., U.S. Pat. No. 5,808,027; Cook et al., 6,166,199; and Matteucci et al., U.S. Pat. No. 6,005,096.

### Certain Modified Internucleoside Linkages

[0344] In certain embodiments, nucleosides of modified oligonucleotides may be linked together using any internucleoside linkage. The two main classes of internucleoside linking groups are defined by the presence or absence of a phosphorus atom. Representative phosphorus-containing internucleoside linkages include but are not limited to phosphodiesters (“P═O”) (also referred to as unmodified or naturally occurring linkages or phosphate linkages), phosphotriesters, methylphosphonates, phosphoramidates, and phosphorothioates (“P═S”), and phosphorodithioates (“HS—P═S”). Representative non-phosphorus containing internucleoside linking groups include but are not limited to methylenemethylimino (—CH₂—N(CH₃)—O—CH₂—), thiodiester, thionocarbamate (—O—C(═O)(NH)—S—); siloxane (—O—SiH₂—O—); and N,N′-dimethylhydrazine (—CH₂—N(CH₃)—N(CH₃)—). Modified internucleoside linkages, compared to naturally occurring phosphodiester linkages, can be used to alter, typically increase, nuclease resistance of the oligonucleotide. In certain embodiments, internucleoside linkages having a chiral atom can be prepared as a racemic mixture, or as separate enantiomers. Methods of preparation of phosphorous-containing and non-phosphorous-containing internucleoside linkages are well known to those skilled in the art.

[0345] In certain embodiments, a modified internucleoside linkage is any of those described in WO2021/030778, incorporated by reference herein. In certain embodiments, a modified internucleoside linkage comprises the formula:

[chemical structure]

wherein independently for each internucleoside linking group of the modified oligonucleotide:
[0346] X is selected from 0 or S;
[0347] R₁ is selected from H, C₁-C₆ alkyl, and substituted C₁-C₆ alkyl; and
[0348] T is selected from SO₂R₂, C(═O)R₃, and P(═O)R₄R₅, wherein:
[0349] R₂ is selected from an aryl, a substituted aryl, a heterocycle, a substituted heterocycle, an aromatic heterocycle, a substituted aromatic heterocycle, a diazole, a substituted diazole, a C₁-C₆ alkoxy, C₁-C₆ alkyl, C₁-C₆ alkenyl, C₁-C₆ alkynyl, substituted C₁-C₆ alkyl, substituted C₁-C₆ alkenyl substituted C₁-C₆ alkynyl, and a conjugate group;
[0350] R₃ is selected from an aryl, a substituted aryl, CH₃, N(CH₃)₂, OCH₃ and a conjugate group;
[0351] R₄ is selected from OCH₃, OH, C₁-C₆ alkyl, substituted C₁-C₆ alkyl and a conjugate group; and
[0352] R₅ is selected from OCH₃, OH, C₁-C₆ alkyl, and substituted C₁-C₆ alkyl.

[0353] In certain embodiments, a modified internucleoside linkage comprises a mesyl phosphoramidate linking group having a formula:

[chemical structure]

[0354] In certain embodiments, a mesyl phosphoramidate internucleoside linkage may comprise a chiral center. In certain embodiments, modified oligonucleotides comprising (Rp) and/or (Sp) mesyl phosphoramidates comprise one or more of the following formulas, respectively, wherein “B” indicates a nucleobase:

[chemical structure]

[0355] Representative internucleoside linkages having a chiral center include but are not limited to alkylphosphonates, mesyl phosphoramidates, and phosphorothioates. Modified oligonucleotides comprising internucleoside linkages having a chiral center can be prepared as populations of modified oligonucleotides comprising stereorandom internucleoside linkages, or as populations of modified oligonucleotides comprising phosphorothioate or other linkages containing chiral centers in particular stereochemical configurations. In certain embodiments, populations of modified oligonucleotides comprise phosphorothioate internucleoside linkages wherein all of the phosphorothioate internucleoside linkages are stereorandom. In certain embodiments, populations of modified oligonucleotides comprise mesyl phosphoramidate internucleoside linkages wherein all of the mesyl phosphoramidate internucleoside linkages are stereorandom. Such modified oligonucleotides can be generated using synthetic methods that result in random selection of the stereochemical configuration of each phosphorothioate or mesyl phosphoramidate linkage. Nonetheless, each individual phosphorothioate or mesyl phosphoramidate of each individual oligonucleotide molecule has a defined stereoconfiguration. In certain embodiments, populations of modified oligonucleotides are enriched for modified oligonucleotides comprising one or more particular phosphorothioate or mesyl phosphoramidate internucleoside linkages in a particular, independently selected stereochemical configuration. In certain embodiments, the particular configuration of the particular phosphorothioate or mesyl phosphoramidate linkage is present in at least 65% of the molecules in the population. In certain embodiments, the particular configuration of the particular phosphorothioate or mesyl phosphoramidate linkage is present in at least 70% of the molecules in the population. In certain embodiments, the particular configuration of the particular phosphorothioate or mesyl phosphoramidate linkage is present in at least 80% of the molecules in the population. In certain embodiments, the particular configuration of the particular phosphorothioate or mesyl phosphoramidate linkage is present in at least 90% of the molecules in the population. In certain embodiments, the particular configuration of the particular phosphorothioate or mesyl phosphoramidate linkage is present in at least 99% of the molecules in the population. Such chirally enriched populations of modified oligonucleotides can be generated using synthetic methods known in the art, e.g., methods described in Oka et al., JACS 125, 8307 (2003), Wan et al. Nuc. Acid. Res. 42, 13456 (2014), and WO 2017/015555. In certain embodiments, a population of modified oligonucleotides is enriched for modified oligonucleotides having at least one indicated phosphorothioate or mesyl phosphoramidate in the (Sp) configuration. In certain embodiments, a population of modified oligonucleotides is enriched for modified oligonucleotides having at least one phosphorothioate or mesyl phosphoramidate in the (Rp) configuration. In certain embodiments, modified oligonucleotides comprising (Rp) and/or (Sp) phosphorothioates comprise one or more of the following formulas, respectively, wherein “B” indicates a nucleobase:

[chemical structure]

[0356] Unless otherwise indicated, chiral internucleoside linkages of modified oligonucleotides described herein can be stereorandom or in a particular stereochemical configuration.

[0357] Neutral internucleoside linkages include, without limitation, phosphotriesters, methylphosphonates, MMI (3′-CH₂—N(CH₃)—O-5′), amide-3 (3′-CH₂—C(═O)—N(H)-5′), amide-4 (3′-CH₂—N(H)—C(═O)-5′), formacetal (3′-O—CH₂—O-5′), methoxypropyl (MOP), and thioformacetal (3′-S—CH₂—O-5′). Further neutral internucleoside linkages include nonionic linkages comprising siloxane (dialkylsiloxane), carboxylate ester, carboxamide, sulfide, sulfonate ester and amides (See for example: Carbohydrate Modifications in Antisense Research; Y. S. Sanghvi and P. D. Cook, Eds., ACS Symposium Series 580; Chapters 3 and 4, 40-65). Further neutral internucleoside linkages include nonionic linkages comprising mixed N, O, S and CH₂ component parts.

[0358] In certain embodiments, modified oligonucleotides comprise one or more inverted nucleoside, as shown below:

[chemical structure]

wherein each Bx independently represents any nucleobase.

[0359] In certain embodiments, an inverted nucleoside is terminal (i.e., the last nucleoside on one end of an oligonucleotide) and so only one internucleoside linkage depicted above will be present. In certain such embodiments, additional features (such as a conjugate group) may be attached to the inverted nucleoside. Such terminal inverted nucleosides can be attached to either or both ends of an oligonucleotide.

[0360] In certain embodiments, such groups lack a nucleobase and are referred to herein as inverted sugar moieties. In certain embodiments, an inverted sugar moiety is terminal (i.e., attached to the last nucleoside on one end of an oligonucleotide) and so only one internucleoside linkage above will be present. In certain such embodiments, additional features (such as a conjugate group) may be attached to the inverted sugar moiety. Such terminal inverted sugar moieties can be attached to either or both ends of an oligonucleotide.

[0361] In certain embodiments, nucleic acids can be linked 2′ to 5′ rather than the standard 3′ to 5′ linkage. Such a linkage is illustrated below.

[chemical structure]

wherein each Bx represents any nucleobase.

### Certain Motifs

[0362] In certain embodiments, modified oligonucleotides comprise one or more modified nucleosides comprising a modified sugar moiety. In certain embodiments, modified oligonucleotides comprise one or more modified nucleosides comprising a modified nucleobase. In certain embodiments, modified oligonucleotides comprise one or more modified internucleoside linkage. In such embodiments, the modified, unmodified, and differently modified sugar moieties, nucleobases, and/or internucleoside linkages of a modified oligonucleotide define a pattern or motif. In certain embodiments, the patterns of sugar moieties, nucleobases, and internucleoside linkages are each independent of one another. Thus, a modified oligonucleotide may be described by its sugar motif, nucleobase motif and/or internucleoside linkage motif (as used herein, nucleobase motif describes the modifications to the nucleobases independent of the sequence of nucleobases).

### Certain Sugar Motifs

[0363] In certain embodiments, oligonucleotides comprise one or more type of modified sugar and/or unmodified sugar moiety arranged along the oligonucleotide or region thereof in a defined pattern or sugar motif. In certain instances, such sugar motifs include but are not limited to any of the sugar modifications discussed herein.

### Gapmers

[0364] In certain embodiments, modified oligonucleotides comprise or consist of a region having a gapmer motif, which is defined by two external regions or “wings” and a central or internal region or “gap.” The three regions of a gapmer motif (the 5′-wing, the gap, and the 3′-wing) form a contiguous sequence of nucleosides wherein at least some of the sugar moieties of the nucleosides of each of the wings differ from at least some of the sugar moieties of the nucleosides of the gap. Specifically, at least the sugar moieties of the nucleosides of each wing that are closest to the gap (the 3′-most nucleoside of the 5′-wing and the 5′-most nucleoside of the 3′-wing) differ from the sugar moiety of the neighboring gap nucleosides, thus defining the boundary between the wings and the gap (i.e., the wing/gap junction). In certain embodiments, the sugar moieties within the gap are the same as one another. In certain embodiments, the gap includes one or more nucleoside having a sugar moiety that differs from the sugar moiety of one or more other nucleosides of the gap. In certain embodiments, the sugar motifs of the two wings are the same as one another (symmetric 20 gapmer). In certain embodiments, the sugar motif of the 5′-wing differs from the sugar motif of the 3′-wing (asymmetric gapmer).

[0365] In certain embodiments, the wings of a gapmer comprise 1-5 nucleosides. In certain embodiments, each nucleoside of each wing of a gapmer is a modified nucleoside. In certain embodiments, at least one nucleoside of each wing of a gapmer is a modified nucleoside. In certain embodiments, at least two nucleosides of each wing of a gapmer are modified nucleosides. In certain embodiments, at least three nucleosides of each wing of a gapmer are modified nucleosides. In certain embodiments, at least four nucleosides of each wing of a gapmer are modified nucleosides.

[0366] In certain embodiments, the gap of a gapmer comprises 7-12 nucleosides. In certain embodiments, each nucleoside of the gap of a gapmer is an unmodified 2′-deoxy nucleoside.

[0367] In certain embodiments, the gapmer is a deoxy gapmer. In embodiments, the nucleosides on the gap side of each wing/gap junction are unmodified 2′-deoxy nucleosides and the nucleosides on the wing sides of each wing/gap junction are modified nucleosides. In certain embodiments, each nucleoside of the gap is an unmodified 2′-deoxy nucleoside. In certain embodiments, each nucleoside of each wing of a gapmer is a modified nucleoside.

[0368] In certain embodiments, modified oligonucleotides comprise or consist of a region having a fully modified sugar motif. In such embodiments, each nucleoside of the fully modified region of the modified oligonucleotide comprises a modified sugar moiety. In certain embodiments, each nucleoside of the entire modified oligonucleotide comprises a modified sugar moiety. In certain embodiments, modified oligonucleotides comprise or consist of a region having a fully modified sugar motif, wherein each nucleoside within the fully modified region comprises the same modified sugar moiety, referred to herein as a uniformly modified sugar motif. In certain embodiments, a fully modified oligonucleotide is a uniformly modified oligonucleotide. In certain embodiments, each nucleoside of a uniformly modified comprises the same 2′-modification.

[0369] Herein, the lengths (number of nucleosides) of the three regions of a gapmer may be provided using the notation [# of nucleosides in the 5′-wing]-[# of nucleosides in the gap]-[# of nucleosides in the 3′-wing]. Thus, a 5-10-5 gapmer consists of 5 linked nucleosides in each wing and 10 linked nucleosides in the gap. Where such nomenclature is followed by a specific modification, that modification is the modification in each sugar moiety of each wing and the gap nucleosides comprise unmodified deoxynucleoside sugars. Thus, a 5-10-5 MOE gapmer consists of 5 linked MOE modified nucleosides in the 5′-wing, 10 linked deoxynucleosides in the gap, and 5 linked MOE nucleosides in the 3′-wing.

[0370] In certain embodiments, modified oligonucleotides are 5-10-5 MOE gapmers. In certain embodiments, modified oligonucleotides are 3-10-3 BNA gapmers. In certain embodiments, modified oligonucleotides are 3-10-3 cEt gapmers. In certain embodiments, modified oligonucleotides are 3-10-3 LNA gapmers.

### Certain Nucleobase Motifs

[0371] In certain embodiments, oligonucleotides comprise modified and/or unmodified nucleobases arranged along the oligonucleotide or region thereof in a defined pattern or motif. In certain embodiments, each nucleobase is modified. In certain embodiments, none of the nucleobases are modified. In certain embodiments, each purine or each pyrimidine is modified. In certain embodiments, each adenine is modified. In certain embodiments, each guanine is modified. In certain embodiments, each thymine is modified. In certain embodiments, each uracil is modified. In certain embodiments, each cytosine is modified. In certain embodiments, some or all of the cytosine nucleobases in a modified oligonucleotide are 5-methyl cytosines. In certain embodiments, all of the cytosine nucleobases are 5-methyl cytosines and all of the other nucleobases of the modified oligonucleotide are unmodified nucleobases.

[0372] In certain embodiments, modified oligonucleotides comprise a block of modified nucleobases. In certain such embodiments, the block is at the 3′-end of the oligonucleotide. In certain embodiments the block is within 3 nucleosides of the 3′-end of the oligonucleotide. In certain embodiments, the block is at the 5′-end of the oligonucleotide. In certain embodiments the block is within 3 nucleosides of the 5′-end of the oligonucleotide.

[0373] In certain embodiments, oligonucleotides having a gapmer motif comprise a nucleoside comprising a modified nucleobase. In certain such embodiments, one nucleoside comprising a modified nucleobase is in the central gap of an oligonucleotide having a gapmer motif. In certain such embodiments, the sugar moiety of said nucleoside is a 2′-deoxyribosyl moiety. In certain embodiments, the modified nucleobase is selected from: a 2-thiopyrimidine and a 5-propynepyrimidine.

### Certain Internucleoside Linkage Motifs

[0374] In certain embodiments, oligonucleotides comprise modified and/or unmodified internucleoside linkages arranged along the oligonucleotide or region thereof in a defined pattern or motif. In certain embodiments, each internucleoside linking group is a phosphodiester internucleoside linkage (P═O). In certain embodiments, each internucleoside linking group of a modified oligonucleotide is a phosphorothioate internucleoside linkage (P═S). In certain embodiments, each internucleoside linkage of a modified oligonucleotide is independently selected from a phosphorothioate internucleoside linkage and phosphodiester internucleoside linkage. In certain embodiments, each phosphorothioate internucleoside linkage is independently selected from a stereorandom phosphorothioate, a (Sp) phosphorothioate, and a (Rp) phosphorothioate. In certain embodiments, the sugar motif of a modified oligonucleotide is a gapmer and the internucleoside linkages within the gap are all modified. In certain such embodiments, some or all of the internucleoside linkages in the wings are unmodified phosphodiester internucleoside linkages. In certain embodiments, the terminal internucleoside linkages are modified. In certain embodiments, the sugar motif of a modified oligonucleotide is a gapmer, and the internucleoside linkage motif comprises at least one phosphodiester internucleoside linkage in at least one wing, wherein the at least one phosphodiester linkage is not a terminal internucleoside linkage, and the remaining internucleoside linkages are phosphorothioate internucleoside linkages. In certain such embodiments, all of the phosphorothioate linkages are stereorandom. In certain embodiments, all of the phosphorothioate linkages in the wings are (Sp) phosphorothioates, and the gap comprises at least one Sp, Sp, Rp motif. In certain embodiments, populations of modified oligonucleotides are enriched for modified oligonucleotides comprising such internucleoside linkage motifs.

### Certain Lengths

[0375] It is possible to increase or decrease the length of an oligonucleotide without eliminating activity. For example, in Woolf et al. (Proc. Natl. Acad. Sci. USA 89:7305-7309, 1992), a series of oligonucleotides 13-25 nucleobases in length were tested for their ability to induce cleavage of a target RNA in an oocyte injection model. Oligonucleotides 25 nucleobases in length with 8 or 11 mismatch bases near the ends of the oligonucleotides were able to direct specific cleavage of the target RNA, albeit to a lesser extent than the oligonucleotides that contained no mismatches. Similarly, target specific cleavage was achieved using 13 nucleobase oligonucleotides, including those with 1 or 3 mismatches.

[0376] In certain embodiments, oligonucleotides (including modified oligonucleotides) can have any of a variety of ranges of lengths. In certain embodiments, oligonucleotides consist of X to Y linked nucleosides, where X represents the fewest number of nucleosides in the range and Y represents the largest number nucleosides in the range. In certain such embodiments, X and Y are each independently selected from 8, 9, 10, 11, 12, 13, 14, 15, 16, 17, 18, 19, 20, 21, 22, 23, 24, 25, 26, 27, 28, 29, 30, 31, 32, 33, 34, 35, 36, 37, 38, 39, 40, 41, 42, 43, 44, 45, 46, 47, 48, 49, and 50; provided that X≤Y. For example, in certain embodiments, oligonucleotides consist of 12 to 13, 12 to 14, 12 to 15, 12 to 16, 12 to 17, 12 to 18, 12 to 19, 12 to 20, 12 to 21, 12 to 22, 12 to 23, 12 to 24, 12 to 25, 12 to 26, 12 to 27, 12 to 28, 12 to 29, 12 to 30, 13 to 14, 13 to 15, 13 to 16, 13 to 17, 13 to 18, 13 to 19, 13 to 20, 13 to 21, 13 to 22, 13 to 23, 13 to 24, 13 to 25, 13 to 26, 13 to 27, 13 to 28, 13 to 29, 13 to 30, 14 to 15, 14 to 16, 14 to 17, 14 to 18, 14 to 19, 14 to 20, 14 to 21, 14 to 22, 14 to 23, 14 to 24, 14 to 25, 14 to 26, 14 to 27, 14 to 28, 14 to 29, 14 to 30, 15 to 16, 15 to 17, 15 to 18, 15 to 19, 15 to 20, 15 to 21, 15 to 22, 15 to 23, 15 to 24, 15 to 25, 15 to 26, 15 to 27, 15 to 28, 15 to 29, 15 to 30, 16 to 17, 16 to 18, 16 to 19, 16 to 20, 16 to 21, 16 to 22, 16 to 23, 16 to 24, 16 to 25, 16 to 26, 16 to 27, 16 to 28, 16 to 29, 16 to 30, 17 to 18, 17 to 19, 17 to 20, 17 to 21, 17 to 22, 17 to 23, 17 to 24, 17 to 25, 17 to 26, 17 to 27, 17 to 28, 17 to 29, 17 to 30, 18 to 19, 18 to 20, 18 to 21, 18 to 22, 18 to 23, 18 to 24, 18 to 25, 18 to 26, 18 to 27, 18 to 28, 18 to 29, 18 to 30, 19 to 20, 19 to 21, 19 to 22, 19 to 23, 19 to 24, 19 to 25, 19 to 26, 19 to 27, 19 to 28, 19 to 29, 19 to 30, 20 to 21, 20 to 22, 20 to 23, 20 to 24, 20 to 25, 20 to 26, 20 to 27, 20 to 28, 20 to 29, 20 to 30, 21 to 22, 21 to 23, 21 to 24, 21 to 25, 21 to 26, 21 to 27, 21 to 28, 21 to 29, 21 to 30, 22 to 23, 22 to 24, 22 to 25, 22 to 26, 22 to 27, 22 to 28, 22 to 29, 22 to 30, 23 to 24, 23 to 25, 23 to 26, 23 to 27, 23 to 28, 23 to 29, 23 to 30, 24 to 25, 24 to 26, 24 to 27, 24 to 28, 24 to 29, 24 to 30, 25 to 26, 25 to 27, 25 to 28, 25 to 29, 25 to 30, 26 to 27, 26 to 28, 26 to 29, 26 to 30, 27 to 28, 27 to 29, 27 to 30, 28 to 29, 28 to 30, or 29 to 30 linked nucleosides

### Certain Modified Oligonucleotides

[0377] In certain embodiments, the above modifications (sugar, nucleobase, internucleoside linkage) are incorporated into a modified oligonucleotide. In certain embodiments, modified oligonucleotides are characterized by their modification motifs and overall lengths. In certain embodiments, such parameters are each independent of one another. Thus, unless otherwise indicated, each internucleoside linkage of an oligonucleotide having a gapmer sugar motif may be modified or unmodified and may or may not follow the gapmer modification pattern of the sugar modifications. For example, the internucleoside linkages within the wing regions of a sugar gapmer may be the same or different from one another and may be the same or different from the internucleoside linkages of the gap region of the sugar motif. Likewise, such sugar gapmer oligonucleotides may comprise one or more modified nucleobase independent of the gapmer pattern of the sugar modifications. Unless otherwise indicated, all modifications are independent of nucleobase sequence.

### Certain Populations of Modified Oligonucleotides

[0378] Populations of modified oligonucleotides in which all of the modified oligonucleotides of the population have the same molecular formula can be stereorandom populations or chirally enriched populations. All of the chiral centers of all of the modified oligonucleotides are stereorandom in a stereorandom population. In a chirally enriched population, at least one particular chiral center is not stereorandom in the modified oligonucleotides of the population. In certain embodiments, the modified oligonucleotides of a chirally enriched population are enriched for f-D ribosyl sugar moieties, and all of the phosphorothioate internucleoside linkages are stereorandom. In certain embodiments, the modified oligonucleotides of a chirally enriched population are enriched for both β-D ribosyl sugar moieties and at least one, particular phosphorothioate internucleoside linkage in a particular stereochemical configuration.

### Nucleobase Sequence

[0379] In certain embodiments, oligonucleotides (unmodified or modified oligonucleotides) are further described by their nucleobase sequence. In certain embodiments oligonucleotides have a nucleobase sequence that is complementary to a second oligonucleotide or an identified reference nucleic acid, such as a target nucleic acid. In certain such embodiments, a region of an oligonucleotide has a nucleobase sequence that is complementary to a second oligonucleotide or an identified reference nucleic acid, such as a target nucleic acid. In certain embodiments, the nucleobase sequence of a region or entire length of an oligonucleotide is at least 50%, at least 60%, at least 70%, at least 80%, at least 85%, at least 90%, at least 95%, or 100% complementary to the second oligonucleotide or nucleic acid, such as a target nucleic acid.

### Oligomeric Duplexes

[0380] In certain embodiments, oligomeric compounds described herein comprise an oligonucleotide, having a nucleobase sequence complementary to that of a target nucleic acid. In certain embodiments, an oligomeric compound is paired with a second oligomeric compound to form an oligomeric duplex. Such oligomeric duplexes comprise a first oligomeric compound having a region complementary to a target nucleic acid and a second oligomeric compound having a region complementary to the first oligomeric compound. In certain embodiments, the first oligomeric compound of an oligomeric duplex comprises or consists essentially of a modified or unmodified oligonucleotide, a conjugate linker, and a conjugate moiety. In certain embodiments, the first oligomeric compound of an oligomeric duplex comprises or consists essentially of a modified or unmodified oligonucleotide. In certain embodiments, the second oligomeric compound of an oligomeric duplex comprises or consists essentially of a modified or unmodified oligonucleotide, a conjugate linker and a conjugate moiety. Either or both oligomeric compounds of an oligomeric duplex may comprise a conjugate linker, and a conjugate moiety. In certain embodiments, the oligomeric compound is directly connected to the conjugate linker, the conjugate linker is directly connected to the conjugate moiety. The oligonucleotides of each oligomeric compound of an oligomeric duplex may include non-complementary overhanging nucleosides. In certain embodiments, an overhanging nucleoside may be complementary to the target nucleic acid. In certain embodiments, an overhanging nucleoside is not to a target nucleic acid. In certain embodiments, the two oligonucleotides have at least one mismatch relative to one another. In certain embodiments, the oligomeric duplex is an antisense agent.

[0381] In certain embodiments, the first oligomeric compound is an antisense compound. In certain embodiments, the first modified oligonucleotide is an antisense oligonucleotide. In certain embodiments, the second oligomeric compound is a sense compound. In certain embodiments, the second modified oligonucleotide is a sense oligonucleotide. In certain embodiments, the first modified oligonucleotide is an antisense RNAi oligonucleotide. In certain embodiments, the second modified oligonucleotide is a sense RNAi oligonucleotide. In certain embodiments, the nucleobase sequence of the second modified oligonucleotide comprises a complementary region of at least 9, at least 10, at least 11, at least 12, at least 13, at least 14, at least 15, at least 16, at least 17, at least 18, at least 19, at least 20, or 21 nucleobases that is at least 90% complementary to the nucleobase sequence of an equal portion of the first modified oligonucleotide. In certain embodiments, the nucleobase sequence of the second modified oligonucleotide comprises a complementary region of at least 8, at least 9, at least 10, at least 11, at least 12, at least 13, at least 14, at least 15, at least 16, at least 17, at least 18, at least 19, at least 20, or 21 nucleobases that is at least 95% complementary to the nucleobase sequence of an equal portion of the first modified oligonucleotide. In certain embodiments, the nucleobase sequence of the second modified oligonucleotide comprises a complementary region of at least 8, at least 9, at least 10, at least 11, at least 12, at least 13, at least 14, at least 15, at least 16, at least 17, at least 18, at least 19, at least 20, or 21 nucleobases that is 100% complementary to the nucleobase sequence of an equal portion of the first modified oligonucleotide. In certain embodiments, the oligomeric duplex is an antisense agent. In certain embodiments, the first modified oligonucleotide is an antisense RNAi oligonucleotide having a length of 21-23 oligonucleotides. In certain embodiments, the second modified oligonucleotide is a sense RNAi oligonucleotide having a length of 19-21 oligonucleotides.

[0382] In any of the oligomeric duplexes described herein, at least one nucleoside of the first modified oligonucleotide and/or the second modified oligonucleotide can comprise a modified sugar moiety. Examples of suitable modified sugar moieties include, but are not limited to, a bicyclic sugar moiety, such as a 2′-4′ bridge selected from —O—CH₂—; and —O—CH(CH₃)—, and a non-bicyclic sugar moiety, such as a 2′-MOE sugar moiety, a 2′-F sugar moiety, a 2′-OMe sugar moiety, or a 2′-NMA sugar moiety. In certain embodiments, at least one nucleoside of the first modified oligonucleotide and/or the second modified oligonucleotide can comprise an unmodified 2′-deoxyribosyl sugar moiety. In certain embodiments, at least 80%, at least 90%, or 100% of the nucleosides of the first modified oligonucleotide and/or the second modified oligonucleotide comprises a modified sugar moiety selected from 2′-F and 2′-OMe. In certain embodiments, one or more 2′-F sugar moieties have a conformation other than 2′-β-D-ribosyl. In certain embodiments, one or more 2′-F sugar moieties is in the 2′-β-D-xylosyl conformation.

[0383] In any of the oligomeric duplexes described herein, at least one nucleoside of the first modified oligonucleotide and/or the second modified oligonucleotide can comprise a sugar surrogate. Examples of suitable sugar surrogates include, but are not limited to, morpholino, hexitol nucleic acid (HNA), fluoro-hexitol nucleic acid (F-HNA), the sugar surrogates of glycol nucleic acid (GNA) and unlocked nucleic acid (UNA). In certain embodiments, at least one nucleoside of the first modified oligonucleotide comprises a sugar surrogate, which can be a GNA.

[0384] In any of the oligomeric duplexes described herein, at least one internucleoside linkage of the first modified oligonucleotide and/or the second modified oligonucleotide can comprise a modified internucleoside linkage. In certain embodiments, the modified internucleoside linkage is a phosphorothioate internucleoside linkage. In certain embodiments, at least one of the first, second, or third internucleoside linkages from the 5′ end and/or the 3′ end of the first modified oligonucleotide comprises a phosphorothioate linkage. In certain embodiments, at least one of the first, second, or third internucleoside linkages from the 5′ end and/or the 3′ end of the second modified oligonucleotide comprises a phosphorothioate linkage. In certain embodiments, the modified internucleoside linkage is a mesyl phosphoramidate internucleoside linkage. In certain embodiments, at least one of the first or second internucleoside linkages from the 5′ end and/or the 3′ end of the first modified oligonucleotide comprises a mesyl phosphoramidate internucleoside linkage. In certain embodiments, at least one of the first or second internucleoside linkages from the 5′ end and/or the 3′ end of the second modified oligonucleotide comprises a mesyl phosphoramidate internucleoside linkage.

[0385] In any of the oligomeric duplexes described herein, at least one internucleoside linkage of the first modified oligonucleotide and/or the second modified oligonucleotide can comprise a phosphodiester internucleoside linkage.

[0386] In any of the oligomeric duplexes described herein, each internucleoside linkage of the first modified oligonucleotide and/or the second modified oligonucleotide can be independently selected from a phosphodiester, a phosphorothioate, or a mesyl phosphoramidate internucleoside linkage.

[0387] In any of the oligomeric duplexes described herein, each internucleoside linkage of the first modified oligonucleotide and/or the second modified oligonucleotide can be independently selected from a phosphodiester or a phosphorothioate internucleoside linkage.

[0388] In any of the oligomeric duplexes described herein, each internucleoside linkage of the first modified oligonucleotide and/or the second modified oligonucleotide can be independently selected from a phosphodiester or a mesyl phosphoramidate internucleoside linkage.

[0389] In any of the oligomeric duplexes described herein, the internucleoside linkage motif of the first modified oligonucleotide can be ssooooooooooooooooooss, wherein each “s” is a phosphorothioate internucleoside linkage and each “o” is a phosphodiester internucleoside linkage. In any of the oligomeric duplexes described herein, the internucleoside linkage motif of the second modified oligonucleotide can be ssooooooooooooooooss, wherein each “s” is a phosphorothioate internucleoside linkage and each “o” is a phosphodiester internucleoside linkage.

[0390] In any of the oligomeric duplexes described herein, at least one nucleobase of the first modified oligonucleotide and/or the second modified oligonucleotide can be modified nucleobase. In certain embodiments, the modified nucleobase is 5-methylcytosine.

[0391] In any of the oligomeric duplexes described herein, the first modified oligonucleotide can comprise a stabilized phosphate group attached to the 5′ position of the 5′-most nucleoside. In certain embodiments, the stabilized phosphate group comprises a cyclopropyl phosphonate or an (E)-vinyl phosphonate.

[0392] In some embodiments, the oligomeric duplex has a motif as described in International Publication No. WO 2022/174053.

[0393] In any of the oligomeric duplexes described herein, the first modified oligonucleotide and/orthe second modified oligonucleotide can comprise a conjugate group. Preferably, the second modified oligonucleotide comprises a conjugate group. In certain embodiments, the conjugate group comprises a conjugate linker and a conjugate moiety. In certain embodiments, the conjugate group is attached to the first modified oligonucleotide at the 5′-end of the first modified oligonucleotide. In certain embodiments, the conjugate group is attached to the first modified oligonucleotide at the 3′-end of the modified oligonucleotide. In certain embodiments, the conjugate group is attached to the first modified oligonucleotide at an internal position. In certain embodiments, the conjugate group is attached to the first modified oligonucleotide through a 2′-modification of a furanosyl sugar moiety. In certain embodiments, the conjugate group is attached to the first modified oligonucleotide through a modified internucleoside linkage. In certain embodiments, the conjugate group is attached to the second modified oligonucleotide at the 5′-end of the modified oligonucleotide. In certain embodiments, the conjugate group is attached to the second modified oligonucleotide at the 3′-end of the modified oligonucleotide. In certain embodiments, the conjugate group is attached to the second modified oligonucleotide at an internal position. In certain embodiments, the conjugate group is attached to the second modified oligonucleotide through a 2′-modification of a furanosyl sugar moiety. In certain embodiments, the conjugate group is attached to the second modified oligonucleotide through a modified internucleoside linkage. In certain embodiments, the conjugate group comprises a cell-targeting moiety having an affinity for transferrin receptor (TfR), also known as TfR1 and CD71. In certain embodiments, the conjugate group comprises an anti-TfR1 antibody or fragment thereof. In certain embodiments, the conjugate group comprises a protein or peptide capable of binding TfR1. In certain embodiments, the conjugate group is a bicyclic peptide capable of binding TfR1.

### Antisense Activity

[0394] In certain embodiments, oligomeric compounds and oligomeric duplexes are capable of hybridizing to a target nucleic acid, resulting in at least one antisense activity; such oligomeric compounds and oligomeric duplexes are antisense compounds. In certain embodiments, antisense compounds have antisense activity when they reduce or inhibit the amount or activity of a target nucleic acid by 25% or more in the standard cell assay. In certain embodiments, antisense compounds selectively affect one or more target nucleic acid. Such antisense compounds comprise a nucleobase sequence that hybridizes to one or more target nucleic acid, resulting in one or more desired antisense activity and does not hybridize to one or more non-target nucleic acid or does not hybridize to one or more non-target nucleic acid in such a way that results in significant undesired antisense activity.

[0395] In certain antisense activities, hybridization of an antisense compound to a target nucleic acid results in recruitment of a protein that cleaves the target nucleic acid. For example, certain antisense compounds result in RNase H mediated cleavage of the target nucleic acid. RNase H is a cellular endonuclease that cleaves the RNA strand of an RNA:DNA duplex. The DNA in such an RNA:DNA duplex need not be unmodified DNA. In certain embodiments, antisense compounds described herein are sufficiently “DNA-like” to elicit RNase H activity. In certain embodiments, one or more non-DNA-like nucleoside in the gap of a gapmer is tolerated.

[0396] In certain antisense activities, an antisense compound or a portion of an antisense compound is loaded into an RNA-induced silencing complex (RISC), ultimately resulting in cleavage of the target nucleic acid. For example, certain antisense compounds result in cleavage of the target nucleic acid by Argonaute. Antisense compounds that are loaded into RISC are RNAi compounds. RNAi compounds may be double-stranded (siRNA) or single-stranded (ssRNA).

[0397] In certain embodiments, hybridization of an antisense compound to a target nucleic acid does not result in recruitment of a protein that cleaves that target nucleic acid. In certain embodiments, hybridization of the antisense compound to the target nucleic acid results in alteration of splicing of the target nucleic acid.

[0398] In certain embodiments, hybridization of an antisense compound to a target nucleic acid results in inhibition of a binding interaction between the target nucleic acid and a protein or other nucleic acid. In certain embodiments, hybridization of an antisense compound to a target nucleic acid results in alteration of translation of the target nucleic acid.

[0399] Antisense activities may be observed directly or indirectly. In certain embodiments, observation or detection of an antisense activity involves observation or detection of a change in an amount of a target nucleic acid or protein encoded by such target nucleic acid, a change in the ratio of splice variants of a nucleic acid or protein and/or a phenotypic change in a cell or subject.

### Certain Target Nucleic Acids

[0400] In certain embodiments, oligomeric compounds comprise or consist of an oligonucleotide comprising a region that is complementary to a target nucleic acid. In certain embodiments, the target nucleic acid is an endogenous RNA molecule. In certain embodiments, the target nucleic acid encodes a protein. In certain such embodiments, the target nucleic acid is selected from: a mature mRNA and a pre-mRNA, including intronic, exonic and untranslated regions. In certain embodiments, the target RNA is a mature mRNA. In certain embodiments, the target nucleic acid is a pre-mRNA. In certain such embodiments, the target region is entirely within an intron. In certain embodiments, the target region spans an intron/exon junction. In certain embodiments, the target region is at least 50% within an intron. In certain embodiments, the target nucleic acid is the RNA transcriptional product of a retrogene. In certain embodiments, the target nucleic acid is a non-coding RNA. In certain such embodiments, the target non-coding RNA is selected from: a long non-coding RNA, a short non-coding RNA, an intronic RNA molecule.

### Complementarity/Mismatches to the Target Nucleic Acid

[0401] It is possible to introduce mismatch bases without eliminating activity. For example, Gautschi et al (J. Natl. Cancer Inst. 93:463-471, March 2001) demonstrated the ability of an oligonucleotide having 100% complementarity to the bcl-2 mRNA and having 3 mismatches to the bcl-xL mRNA to reduce the expression of both bcl-2 and bcl-xL in vitro and in vivo. Furthermore, this oligonucleotide demonstrated potent anti-tumor activity in vivo. Maher and Dolnick (Nuc. Acid. Res. 16:3341-3358, 1988) tested a series of tandem 14 nucleobase oligonucleotides, and a 28 and 42 nucleobase oligonucleotides comprised of the sequence of two or three of the tandem oligonucleotides, respectively, for their ability to arrest translation of human DHFR in a rabbit reticulocyte assay. Each of the three 14 nucleobase oligonucleotides alone was able to inhibit translation, albeit at a more modest level than the 28 or 42 nucleobase oligonucleotides.

[0402] In certain embodiments, oligonucleotides are complementary to the target nucleic acid over the entire length of the oligonucleotide. In certain embodiments, oligonucleotides are 99%, 95%, 90%, 85%, or 80% complementary to the target nucleic acid. In certain embodiments, oligonucleotides are at least 80% complementary to the target nucleic acid over the entire length of the oligonucleotide and comprise a region that is 100% or fully complementary to a target nucleic acid. In certain embodiments, the region of full complementarity is from 6 to 20, 10 to 18, or 18 to 20 nucleobases in length.

[0403] In certain embodiments, oligonucleotides comprise one or more mismatched nucleobases relative to the target nucleic acid. In certain embodiments, antisense activity against the target is reduced by such mismatch, but activity against a non-target is reduced by a greater amount. Thus, in certain embodiments selectivity of the oligonucleotide is improved. In certain embodiments, the mismatch is specifically positioned within an oligonucleotide having a gapmer motif. In certain embodiments, the mismatch is at position 1, 2, 3, 4, 5, 6, 7, or 8 from the 5′-end of the gap region. In certain embodiments, the mismatch is at position 9, 8, 7, 6, 5, 4, 3, 2, 1 from the 3′-end of the gap region. In certain embodiments, the mismatch is at position 1, 2, 3, or 4 from the 5′-end of the wing region. In certain embodiments, the mismatch is at position 4, 3, 2, or 1 from the 3′-end of the wing region.

### Certain Target Nucleic Acids

[0404] Modified oligonucleotides targeting muscle nucleic acids have been described previously that may be useful in conjunction with the provided invention, and in particular modified oligonucleotides may be comprised in compositions of the invention. In certain embodiments, a target nucleic acid is a muscle target nucleic acid. In certain embodiments, the target nucleic acid is selected from ACTC1, ACTN2, ACVR1, ACVR1B, C90RF72, CALR3, CaMK2d, CSRP3, DMD, DMPK, DNM2, DUX4, FBX032, FLNC, FXN, GYS1, HPRT, INHBA, JPH2, KLF15, LDB3, MEDL MEDI3, MEF2D. MSTN, MYBPC3, MYH6, MYH7, MYL2, MYL3, MLCK1, MYOZ2, MYPN, NEXN, NLRP3, PLN, PPPIR3A. PRKAG2, RYR, SOD1, TCAP, TNN, TNNC1, TNNI3, TNNT2, TPM1, TRIM64, or VCL. In certain embodiments, a modified oligonucleotide targeting one or more such target nucleic acids comprises one or more modified oligonucleotides described and set forth in International Patent Publication Nos WO2019/090160, WO2020/028842, WO2020/028841, WO2020/028831, WO2021/142260, WO2021/142227, WO2020/028840, WO2021/142217, WO2021/142331, or WO2021/142269.

[0405] In certain embodiments, the muscle target nucleic acid is selected from CaMK2d, NLRP3, PLN, DMD, DMPK, DNM2, DUX4, or HPRT. In certain embodiments, CaMK2d nucleic acid has the sequence set forth SEQ ID NO: 1 (the complement of GENBANK Accession No. NC_000004.12, truncated from nucleosides 113448001 to 113765000) or SEQ ID NO: 2 (GENBANK Accession No. NM_001321571.2). In certain embodiments, NLRP3 nucleic acid has the sequence set forth SEQ ID NO: 3 (GENBANK Accession No. NC_000001.11, truncated from nucleosides 247413001 to 247454000) or SEQ ID NO: 4 (GENBANK Accession No. NM_004895.4). In certain embodiments, PLN nucleic acid has the sequence set forth SEQ ID NO: 5 (GENBANK Accession No. NC_000006.12, truncated from nucleosides 118545001 to 118565000) or SEQ ID NO: 6 (GENBANK Accession No. NM_002667.4). In certain embodiments, DMD nucleic acid has the sequence set forth SEQ ID NO: 7 (The complement of GENBANK NT_011757.15 truncated from nucleotides 28916001 to 31142000). In certain embodiments, DMPK nucleic acid has the sequence set forth SEQ ID NO: 8 (GenBank Accession No. NT_011109.15 truncated from nucleotides 18540696 to 18555106) or SEQ ID NO: 9 (GENBANK Accession No. NM_001081560.1). In certain embodiments, DNM2 nucleic acid has the sequence set forth SEQ ID NO: 10 (GenBank Accession No. NC_000019.10 truncated from nucleosides 10715001 to 10835000) or SEQ ID NO: 11 (GENBANK Accession No. NM_004945.3). In certain embodiments, DUX4 nucleic acid has the sequence set forth SEQ ID NO: 12 (GENBANK Accession No. NC_000004.12, truncated from nucleotides 190171001 to 190187000) or SEQ ID NO: 13 (GENBANK Accession No. NM_001306068.2). In certain embodiments, HPRT1 nucleic acid has the sequence set forth SEQ ID NO: 253 (ENSEMBL ID ENSG00000165704.15, Release 107 (July 2022)).

[0406] In certain embodiments, a modified oligonucleotide targeting CaMK2d comprises one or more modified oligonucleotides described and set forth in International Patent Publication Nos. WO2019/165067, WO2021/158810, or WO2022/058386. In certain embodiments, a modified oligonucleotide targeting NLRP3 comprises one or more modified oligonucleotides described and set forth in International Patent Publication No. WO2022178146A1, which is incorporated herein by reference. In certain embodiments, a modified oligonucleotide targeting PLN comprises one or more modified oligonucleotides described and set forth in International Patent Publication No. WO2022/173976, which is incorporated herein by reference, or International Patent Publication No. WO2001/16312. In certain embodiments, a modified oligonucleotide targeting DMD comprises one or more oligonucleotides described and set forth in WO2018/014042, which is incorporated herein by reference, or International Patent Publication Nos. WO2022/020107, WO2021/025899, WO2021/003573, WO2021/142307, WO2020/257489, WO2020/219820, WO2020/214763, WO2020/198268, WO2020/089325, WO2020/028832, WO2019/200185, WO2019/090160, WO2019/060775, WO2019/014772, WO2018/129384, WO2018/067973, WO2018/055577, WO2018/014043, WO2018/014042, WO2018/007475, WO2018/005805, WO2017/210647, WO2017/192679, WO2017/047707, WO2015/137409, WO2014/153220, WO2013/112053, WO2013/100190, WO2012/029986, WO2011/057350, WO2010/123369, WO2010/048586, WO2009/054725, WO2007/135105, WO2006/000057, WO2004/083446, WO2004/048570, or WO2002/024906. In certain embodiments, a modified oligonucleotide targeting DMPK comprises one or more oligonucleotides described and set forth in International Patent Publication Nos. WO 2012/012443, WO2012/012467, WO2015/021457, which are incorporated herein by reference, or International Patent Publication Nos. WO2022/147209, WO2022/026152, WO2021142234, WO2021/076856, WO2020/028861, WO2019/113393, WO2006/006948, WO 2005/116204, WO2018/002812, WO2018/078131, or WO2018/078134. In certain embodiments, a modified oligonucleotide targeting DNM2 comprises one or more oligonucleotides described and set forth in International Patent Publication No. WO2019/140452, which is incorporated herein by reference, or International Patent Publication Nos. WO2020/028844, WO2015/055859, or WO2016/170162. In certain embodiments, a modified oligonucleotide targeting DUX4 comprises one or more oligonucleotides described and set forth in International Patent Publication Nos. WO2016/115490, WO2022/159712, which are incorporated herein by reference, or US Patent Publication No. US2021220479, or International Patent Publication Nos. WO2022/147207, WO2022/020106, WO2021/142275, WO2020/028840, WO2020/203880, WO2020/028864, WO2019/060432, WO 2017/050836, WO2016/115490, or WO2012/024535.

### Certain Pharmaceutical Compositions

[0407] In certain embodiments, pharmaceutical compositions described herein comprise one or more oligomeric compounds. In certain embodiments, the one or more oligomeric compounds each comprise a modified oligonucleotide. In certain embodiments, the pharmaceutical composition comprises a pharmaceutically acceptable diluent or carrier. In certain embodiments, a pharmaceutical composition comprises a sterile saline solution and one or more oligomeric compounds. In certain embodiments, a pharmaceutical composition consists or consists essentially of a sterile saline solution and one or more oligomeric compounds. In certain embodiments, the sterile saline is pharmaceutical grade saline. In certain embodiments, a pharmaceutical composition comprises one or more oligomeric compounds and sterile water. In certain embodiments, a pharmaceutical composition consists or consists essentially of one or more oligomeric compounds and sterile water. In certain embodiments, the sterile water is pharmaceutical grade water. In certain embodiments, the pharmaceutically acceptable diluent or carrier is distilled water for injection. In certain embodiments, a pharmaceutical composition comprises one or more oligomeric compound and phosphate-buffered saline (PBS). In certain embodiments, a pharmaceutical composition consists or consists essentially of one or more oligomeric compounds and PBS. In certain embodiments, the sterile PBS is pharmaceutical grade PBS. In certain embodiments, a pharmaceutical composition comprises one or more oligomeric compound and artificial cerebrospinal fluid. In certain embodiments, the sterile PBS is pharmaceutical grade PBS. In certain embodiments, a pharmaceutical composition consists or consists essentially of artificial cerebrospinal fluid. In certain embodiments, the artificial cerebrospinal fluid is pharmaceutical grade.

[0408] In certain embodiments, pharmaceutical compositions comprise one or more oligomeric compounds disclosed herein and one or more excipients. In certain embodiments, excipients are selected from water, salt solutions, alcohol, polyethylene glycols, gelatin, lactose, amylase, magnesium stearate, talc, silicic acid, viscous paraffin, hydroxymethylcellulose and polyvinylpyrrolidone.

[0409] In certain embodiments, oligomeric compounds may be admixed with pharmaceutically acceptable active and/or inert substances for the preparation of pharmaceutical compositions or formulations. Compositions and methods for the formulation of pharmaceutical compositions depend on a number of criteria, including, but not limited to, route of administration, extent of disease, or dose to be administered.

[0410] In certain embodiments, pharmaceutical compositions comprising an oligomeric compound disclosed herein encompass any pharmaceutically acceptable salts of the oligomeric compound, esters of the oligomeric compound, or salts of such esters. In certain embodiments, pharmaceutical compositions comprising oligomeric compounds comprising one or more oligonucleotide, upon administration to a subject, including a human, are capable of providing (directly or indirectly) the biologically active metabolite or residue thereof. Accordingly, for example, the disclosure is also drawn to pharmaceutically acceptable salts of oligomeric compounds, prodrugs, pharmaceutically acceptable salts of such prodrugs, and other bioequivalents. Suitable pharmaceutically acceptable salts include, but are not limited to, sodium and potassium salts. In certain embodiments, prodrugs comprise a conjugate moiety attached to an oligonucleotide, wherein the conjugate moiety is cleaved by endogenous nucleases within the body.

[0411] Lipid moieties have been used in nucleic acid therapies in a variety of methods. In certain such methods, the nucleic acid, such as an oligomeric compound, is introduced into preformed liposomes or lipoplexes made of mixtures of cationic lipids and neutral lipids. In certain methods, DNA complexes with mono- or poly-cationic lipids are formed without the presence of a neutral lipid. In certain embodiments, a lipid moiety is selected to increase distribution of an oligomeric agent to a particular cell or tissue. In certain embodiments, a lipid moiety is selected to increase distribution of an oligomeric agent to fat tissue. In certain embodiments, a lipid moiety is selected to increase distribution of an oligomeric agent to muscle tissue.

[0412] In certain embodiments, pharmaceutical compositions disclosed herein comprise a delivery system. Examples of delivery systems include, but are not limited to, liposomes and emulsions. Certain delivery systems are useful for preparing certain pharmaceutical compositions including those comprising hydrophobic compounds. In certain embodiments, certain organic solvents such as dimethylsulfoxide are used.

[0413] In certain embodiments, pharmaceutical compositions comprise one or more tissue-specific delivery molecules designed to deliver oligomeric compounds described herein to specific tissues or cell types. For example, in certain embodiments, pharmaceutical compositions include liposomes coated with a tissue-specific antibody.

[0414] In certain embodiments, pharmaceutical compositions comprise a co-solvent system. Certain of such co-solvent systems comprise, for example, benzyl alcohol, a nonpolar surfactant, a water-miscible organic polymer, and an aqueous phase. In certain embodiments, such co-solvent systems are used for hydrophobic compounds. A non-limiting example of such a co-solvent system is the VPD co-solvent system, which is a solution of absolute ethanol comprising 3% w/v benzyl alcohol, 8% w/v of the nonpolar surfactant Polysorbate 80™ and 65% w/v polyethylene glycol 300. The proportions of such co-solvent systems may be varied considerably without significantly altering their solubility and toxicity characteristics. Furthermore, the identity of co-solvent components may be varied: for example, other surfactants may be used instead of Polysorbate 80™; the fraction size of polyethylene glycol may be varied; other biocompatible polymers may replace polyethylene glycol, e.g., polyvinyl pyrrolidone; and other sugars or polysaccharides may substitute for dextrose.

[0415] In certain embodiments, pharmaceutical compositions disclosed herein are prepared for oral administration. In certain embodiments, pharmaceutical compositions are prepared for buccal administration. In certain embodiments, a pharmaceutical composition is prepared for administration by injection (e.g., intravenous, subcutaneous, intramuscular, intrathecal (IT), intracerebroventricular (ICV), etc.). In certain of such embodiments, a pharmaceutical composition comprises a carrier and is formulated in aqueous solution, such as water or physiologically compatible buffers such as Hanks's solution, Ringer's solution, or physiological saline buffer. In certain embodiments, other ingredients are included (e.g., ingredients that aid in solubility or serve as preservatives). In certain embodiments, injectable suspensions are prepared using appropriate liquid carriers, suspending agents and the like. Certain pharmaceutical compositions for injection are presented in unit dosage form, e.g., in ampoules or in multi-dose containers. Certain pharmaceutical compositions for injection are suspensions, solutions or emulsions in oily or aqueous vehicles, and may contain formulatory agents such as suspending, stabilizing and/or dispersing agents. Certain solvents suitable for use in pharmaceutical compositions for injection include, but are not limited to, lipophilic solvents and fatty oils, such as sesame oil, synthetic fatty acid esters, such as ethyl oleate or triglycerides, and liposomes. Aqueous injection suspensions may contain.

[0416] Under certain conditions, certain compounds disclosed herein act as acids. Although such compounds may be drawn or described in protonated (free acid) form, in ionized (anion) form, or ionized and in association with a cation (salt) form, aqueous solutions of such compounds exist in equilibrium among such forms. For example, a phosphate linkage of an oligonucleotide in aqueous solution exists in equilibrium among free acid, anion, and salt forms. Unless otherwise indicated, compounds described herein are intended to include all such forms. Moreover, certain oligonucleotides have several such linkages, each of which is in equilibrium. Thus, oligonucleotides in solution exist in an ensemble of forms at multiple positions all at equilibrium. The term “oligonucleotide” is intended to include all such forms. Drawn structures necessarily depict a single form. Nevertheless, unless otherwise indicated, such drawings are likewise intended to include corresponding forms. Herein, a structure depicting the free acid of a compound followed by the term “or salts thereof” expressly includes all such forms that may be fully or partially protonated/de-protonated/in association with a cation. In certain instances, one or more specific cation is identified.

[0417] In certain embodiments, oligomeric compounds disclosed herein are in aqueous solution with sodium. In certain embodiments, oligomeric compounds are in aqueous solution with potassium. In certain embodiments, oligomeric compounds are in PBS. In certain embodiments, oligomeric compounds are in water. In certain such embodiments, the pH of the solution is adjusted with NaOH and/or HCl to achieve a desired pH.

[0418] Herein, certain specific doses are described. A dose may be in the form of a dosage unit. For clarity, a dose (or dosage unit) of a modified oligonucleotide or an oligomeric compound in milligrams indicates the mass of the free acid form of the modified oligonucleotide, excluding the mass of any conjugate group. As described above, in aqueous solution, the free acid is in equilibrium with anionic and salt forms. However, for the purpose of calculating dose, it is assumed that the modified oligonucleotide or oligomeric compound exists as a solvent-free, sodium-acetate free, anhydrous, free acid. For example, where a modified oligonucleotide or an oligomeric compound is in solution comprising sodium (e.g., saline), the modified oligonucleotide or oligomeric compound may be partially or fully de-protonated and in association with Na+ ions. However, the mass of the protons is nevertheless counted toward the weight of the dose, and the mass of the Na+ ions is not counted toward the weight of the dose. Furthermore, the mass of a conjugate group or bicycle ligand is not included when calculating the weight of a dose as described herein; that is, the dose relates only to the oligonucleotide or oligomeric duplex. Thus, for example, a dose, or dosage unit, of 3.5 mg of Compound No. 486178 or Compound No. 1590463-BCY17868, equals the number of molecules of the fully protonated oligonucleotide portion of the molecule that weighs 3.5 mg. This is equivalent to 3.7 mg of solvent-free, sodium acetate-free, anhydrous sodiated Compound No. 486178; and it is equivalent to 4.7 mg of the conjugated compound 1590463-BCY17868.

### EXAMPLES

[0419] The following examples illustrate certain embodiments of the present disclosure and are not limiting. Moreover, where specific embodiments are provided, the inventors have contemplated generic application of those specific embodiments. For example, disclosure of an oligonucleotide having a particular motif provides reasonable support for additional oligonucleotides having the same or similar motif And, for example, where a particular high-affinity modification appears at a particular position, other high-affinity modifications at the same position are considered suitable, unless otherwise indicated.

### Example 1: Design and Synthesis of Bicycle Ligands

[0420] Polypeptides were synthesized on Rink amide resin using standard Fmoc (9-fluorenylmethyloxycarbonyl) solid-phase peptide synthesis, either by manual coupling (for large scale) or using a Biotage SyroII automated peptide synthesizer (for small scale). Following TFA-based cleavage from the resin, peptides were precipitated with diethyl ether and dissolved in 50:50 acetonitrile/water. The crude peptides (at −1 mM concentration) were then cyclized with 1.3 equiv. of the molecular scaffold, 1,1′,1″-(1,3,5-triazinane-1,3,5-triyl)tris(2-bromoethanone) (TATB), using ammonium bicarbonate (100 mM) as abase. Completion of cyclization was determined by matrix-assisted laser desorption ionization time-of-flight (MALDI-TOF) or LC-MS. Once complete, the cyclization reaction was quenched using N-acetyl cysteine (10 equiv. with respect to the peptide), and the solutions were lyophilized. The residue was dissolved in an appropriate solvent and purified by RP-HPLC. Peptide fractions of sufficient purity and the correct molecular weight (verified by either MALDI-TOF and HPLC or LC-MS) were pooled and lyophilized. Concentrations were determined by UV absorption using the extinction coefficient at 280 nm, which was based on Trp/Tyr content. All amino acids, unless noted otherwise, are in the L-configurations. Each C-terminus is amidated.

TABLE 2
Bicycle ligands

| Bicycle Ligand | | N-terminal | SEQ ID |
|---|---|---|---|
| ID | Sequence (N to C) | modification | NO: |
| BCY17868 | CSPDAHLGCISYC[K(N₃)] | acetyl | 71 |
| BCY17869 | CSPDAHLGCISYC | azidopropyl | 26 |
| BCY17870 | NWNCSPDAHLGCISYC[K(N₃)] | none | 69 |
| BCY17871 | NWNCSPDAHLGCISYC[K(N₃)] | acetyl | 69 |
| BCY17872 | NWNCSPDAHLGCISYC | azidopropyl | 53 |
| BCY17873 | CSPDAHLGCISYCEPW[K(N₃)] | acetyl | 70 |
| BCY17874 | CSPDAHLGCISYCEPW | azidopropyl | 52 |
| BCY17875 | CP[HyP]DAYLGCISYC[K(N₃)] | acetyl | 94 |
| BCY17876 | CP[HyP]DAYLGCISYC | azidopropyl | 93 |
| BCY17877 | CS[HyP]DAHLGCISYC[K(N₃)] | acetyl | 97 |
| BCY17878 | CS[HyP]DAHLGCISYC | azidopropyl | 95 |
| BCY17879 | CS[Aze]DAHLGCISYC[K(N₃)] | acetyl | 129 |
| BCY17880 | CS[Aze]DAHLGCISYC | azidopropyl | 128 |
| BCY17882 | N[dY]NCSPDAHLGCISYC[K(N₃)] | acetyl | 72 |
| BCY17890 | CSPDAHLGCISYCE[dP]W[K(N₃)] | acetyl | 73 |
| BCY17892 | CSPDAHLGCISYCE[Aze]W[K(N₃)] | acetyl | 74 |
| BCY17894 | CSPDAHLGCISYCE[Pip]W[K(N₃)] | acetyl | 75 |
| BCY17896 | CP[HyP]DAYLGC[tBuGly]SYC[K(N₃)] | acetyl | 90 |
| BCY17899 | NWNCP[HyP]DAYLGC[tBuGly]SYC[K(N₃)] | acetyl | 91 |
| BCY17901 | CP[HyP]DAYLGC[tBuGly]SYCEPW[K(N₃)] | acetyl | 92 |
| BCY17903 | C[K(N₃)]PDAHLGCISYC | acetyl | 150 |
| BCY17904 | CS[K(N₃)]DAHLGCISYC | acetyl | 151 |
| BCY17905 | CSPD[K(N₃)]HLGCISYC | acetyl | 152 |
| BCY17906 | CSPDAHLGCISYC[K(N₃)(PYA-Maleimide)] | acetyl | 76 |

dY represents _{D}-tyrosine; [HyP] represents 4-trans-hydroxy-L-proline; [Aze] represents azetidine; [tBuGly] represents t-butyl glycine; [K(N₃)] represents 6-azido lysine; [Pip] represents pipecolic acid; and [K(N₃)(PYA-Maleimide)] represents a modified lysine having the following structure:

[chemical structure]

### Example 2: Design of Modified Oligonucleotides Complementary to Mouse DMPK

[0421] Modified oligonucleotides complementary to mouse DMPK were designed (as indicated in the table below) and synthesized. Selected compounds in the table below have modifications on the 5′ end to allow conjugation to a bicycle ligand. Compound No. 486178 was previously disclosed in WO 2014/120861.

TABLE 3
Design of modified oligonucleotides complementary to mouse DMPK

| | | SEQ |
|---|---|---|
| Compound | | ID |
| No. | Chemistry Notation (5′ to 3′) | NO. |
| 486178 | Aₖₛ^{m}CₖₛAₖₛA_{ds}T_{ds}A_{ds}A_{ds}A_{ds}T_{ds}A_{ds}^{m}C_{ds}^{m}C_{ds}G_{ds}AₖₛGₖₛGₖ | 167 |
| 1590463 | [BCN][nC6o]ₒAₖₛ^{m}CₖₛAₖₛA_{ds}T_{ds}A_{ds}A_{ds}A_{ds}T_{ds}A_{ds}^{m}C_{ds}^{m}C_{ds}G_{ds}AₖₛGₖₛGₖ | 176 |
| 1614439 | [sC6o]ₒAₖₛ^{m}CₖₛAₖₛA_{ds}T_{ds}A_{ds}A_{ds}A_{ds}T_{ds}A_{ds}^{m}C_{ds}^{m}C_{ds}G_{ds}AₖₛGₖₛGₖ | 179 |
| 1602000 | [PEG1alkyne][nC6o]ₒAₖₛ^{m}CₖₛAₖₛA_{ds}T_{ds}A_{ds}A_{ds}A_{ds}T_{ds}A_{ds}^{m}C_{ds}^{m}C_{ds}G_{ds}AₖₛGₖₛGₖ | 178 |
| 1609732 | [BCN][nC6o]ₒ[T_{do}^{m}C_{do}A_{d}]ₒAₖₛ^{m}CₖₛAₖₛA_{ds}T_{ds}A_{ds}A_{ds}A_{ds}T_{ds}A_{ds}^{m}C_{ds}^{m}C_{ds}G_{ds}AₖₛGₖₛGₖ | 168 |
| 1468770 | [maleimidC3oyl][nC6o]ₒAₖₛ^{m}CₖₛAₖₛA_{ds}T_{ds}A_{ds}A_{ds}A_{ds}T_{ds}A_{ds}^{m}C_{ds}^{m}C_{ds}G_{ds}AₖₛGₖₛGₖ | 175 |

A subscript “k” represents a cEt nucleoside, a subscript “d” represents a stereo-standard DNA nucleoside, a subscript “s” indicates a phosphorothioate internucleoside linkage, a subscript “o” indicates a phosphodiester internucleoside linkage, a superscript “m” before a C represents a 5-methylcytosine, a “[nC6o]” indicates a 6-aminohexanol linker, a “[BCN]” indicates a (bicyclo[6.1.0]nonyne)-formyl linker, a “[sC6o]” indicates a 6-mercaptohexanol liner, a
“[PEG1alkyne]” indicates a propargyl-PEG1-acid, a “[T_{do}^{m}C_{do}A_{d}]” indicates a TCA trinucleotide linker, and a “[maleimidC3oyl]” indicates a maleimido propionyl linker having structure:

[chemical structure]

[0422] A modified oligonucleotide complementary to 486178 (described herein above) was designed (as described in the table below) and synthesized. The compound in the table below has a modification on the 5′ end to allow conjugation to a bicycle ligand.

TABLE 4
Design of a modified oligonucleotide with linkers for conjugation to CD71
bicycle ligands, complementary to 486178.

| Compound | | SEQ ID |
|---|---|---|
| No. | Chemistry Notation (5′ to 3′) | NO. |
| 1614438 | [BCN][nC6o]ₒ^{m}Cₖₒ^{m}CₖₒTₖₒ^{m}C_{do}G_{do}G_{do}T_{do}A_{do}T_{do}T_{do}T_{do}A_{do}T_{do}TₖₒGₖₒTₖ | 169 |

A subscript “k” represents a cEt nucleoside, a subscript “d” represents a stereo-standard DNA nucleoside, a subscript “o” indicates a phosphodiester internucleoside linkage, a superscript “m” before a C represents a 5-methylcytosine, a “[nC60]” indicates a 6-aminohexanol linker, and a “[BCN]” indicates a (bicyclo[6.1.0]nonyne)-formyl linker.

[0423] Modified oligonucleotides complementary to mouse MALAT were designed (as indicated in the table below) and synthesized. The compound in the table below has a modification on the 3′ end to allow conjugation to a bicycle ligand.

TABLE 5
Design of modified oligonucleotides complementary to mouse MALAT

| Compound | | SEQ |
|---|---|---|
| No. | Chemistry Notation (5′ to 3′) | ID NO. |
| 1598988 | [5Cy3cHex]ₛGₑₒ^{m}CₑₒAₑₒTₑₒTₑₒ^{m}CₑₒTₑₒAₑₒAₑₒTₑₒAₑₒGₑₒ^{m}CₑₒAₑₒGₑₒ^{m}Cₑₒ[3nC7][BCN] | 177 |
| 1591118 | [5Cy3cHex]ₛGₖₛ^{m}CₖₛAₖₛT_{ds}T_{ds}^{m}C_{ds}T_{ds}A_{ds}A_{ds}T_{ds}A_{ds}G_{ds}^{m}C_{ds}AₖₛGₖₛ^{m}Cₖₒ[3nC7][BCN] | 170 |

A subscript “e” represents a 2′-MOE modified nucleoside, a subscript “s” indicates a phosphorothioate internucleoside linkage, a subscript “o” indicates a phosphodiester internucleoside linkage, a superscript “m” before a C represents a 5-methylcytosine, a “[BCN]” indicates a (bicyclo[6.1.0]nonyne)-formyl linker, a “[5Cy3cHex]” indicates a 5′-Cy3-cyclohexane moiety (GenePharma 11-4100), and a “[3nC7]” represents a 3′-C7 amino modifier having the following structure:

[chemical structure]

### Example 3: Design of RNAi Compounds Targeted to HPRT1

[0424] Antisense strand modified oligonucleotides complementary to mouse HPRT were designed and synthesized as indicated in the table below.

TABLE 6
Design of antisense strand modified oligonucleotides targeted to human/mouse HPRT1

| | | | SEQ |
|---|---|---|---|
| Compound | | | ID |
| No. | Chemistry Notation (5′ to 3′) | Target | NO. |
| 1453015 | A_{ys}U_{fs}A_{yo}A_{yo}A_{yo}A_{fo}U_{yo}C_{yo}U_{yo}A_{yo}C_{yo}A_{yo}G_{yo}U_{fo}C_{yo}A_{fo}U_{yo}A_{yo}G_{yo}G_{yo}A_{ys}A_{ys}U_{y} | mouse | 171 |
| | | HPRT | |

[0425] In the table above, a subscript “f” represents a 2′-F modified nucleoside, a subscript “y” represents a 2′-OMe modified nucleoside, a subscript “s” represents a phosphorothioate internucleoside linkage, and a subscript “o” represents a phosphodiester internucleoside linkage.

[0426] The sense oligonucleotide is complementary to the first of the 21 nucleosides of the antisense oligonucleotide (from 5′ to 3′) wherein the last two 3′-nucleosides of the antisense oligonucleotides are not paired with the sense oligonucleotide (are overhanging nucleosides).

TABLE 7
Design of sense strand modified oligonucleotides targeted to human/mouse HPRT1
containing C16-modified nucleosides

| | | SEQ |
|---|---|---|
| Compound | | ID |
| No. | Chemistry Notation (5′ to 3′) | NO. |
| 1550983 | U_{ys}C_{ys}C_{yo}U_{yo}A_{yo}U_{yo}G_{fo}A_{yo}C_{fo}U_{fo}G_{fo}U_{yo}A_{yo}G_{yo}A_{yo}U_{yo}U_{yo}U_{yo}U_{yo}A_{yo}U_{yo}[3nC7] | 181 |
| | [BCN] | |
| 1547771 | U_{ys}C_{ys}C_{yo}U_{yo}A_{yo}U_{yo}G_{fo}A_{yo}C_{fo}U_{fo}G_{fo}U_{yo}A_{yo}G_{yo}A_{yo}U_{yo}U_{yo}U_{yo}U_{yo}A_{yo}U_{yo}[3nC7] | 172 |
| | [maleimidC3oyl] | |

[0427] In the table above, a subscript “f” represents a 2′-F modified nucleoside, a subscript “y” represents a 2′-OMe modified nucleoside, a subscript “s” represents a phosphorothioate internucleoside linkage, a subscript “o” represents a phosphodiester internucleoside linkage, a “[BCN]” indicates a (bicyclo[6.1.0]nonyne)-formyl linker, a “[3nC7]” represents a 3′-C7 amino modifier, and a “[maleimidC3oyl]” indicates a maleimido propionyl linker.

TABLE 8
Design of RNAi compounds targeted to human/mouse HPRT1

| Duplex | Antisense Strand | Sense Strand |
|---|---|---|
| Compound No. | Compound No. | Compound No. |
| 1453015:1550983 | 1453015 | 1550983 |
| 1453015:1547771 | 1453015 | 1547771 |

### Example 4: In Vitro Binding Assay for Binding of Oligomeric Compounds Comprising CD71 Bicycle Ligands to Human Transferrin Receptor, CD71

[0428] A nanoBRET assay was developed to obtain inhibition constant Kᵢ of modified oligonucleotides conjugated to CD71 bicycle ligands and RNAi compounds conjugated to CD71 bicycle ligands. The use of the nanoBRET assay for the binding of oligonucleotides to proteins has been previously described (see, e.g., Vickers and Crooke, PloS One, 2016, 11(8):e061930).

[0429] An hCD71-Nluc fusion protein was constructed by linking NanoLuc (ProMega) through its N-terminal Val to the C-terminal F760 residue of h-CD71, using a GGGSGGSSG flexible linker. The fluorescently-labeled (Cy3) modified oligonucleotide 1598988 was conjugated to the bicycle ligand BCY17871 through a strain-promoted azide-alkyne cycloaddition (SPAAC) reaction.

[0430] Crude membrane fractions from HEK293 cells stably expressing hCD71-Nluc were resuspended in PBS and 100 μL were dispensed into white 96-well assay plates (ThermoFisher Scientific, Cat #136101), an amount corresponding to 10,000 cells per well. Membranes were treated with 11.1 μL of BCY17871-1598988 at serially diluted final concentrations of 1000-0.006 nM. The mixtures were incubated for 3 hours at room temperature to reach equilibrium. To initiate BRET, 12.4 μL of 100 μM of the Nluc substrate furimazine was added to each well, and the mixtures were incubated for 5-30 minutes. The assay plate was read on a Promega GlowMax Discover plate reader at wavelengths of 450 nm and 600 nm, and the ratio of emissions at wavelengths 450/600 were used to yield % BRET efficiency. Data was subjected to non-linear regression, then fitted to a single site binding hyperbolic function. The dissociation constant K_{D} of BC17871-1598988 was determined to be 57-58 nM.

[0431] In order to evaluate modified oligonucleotides conjugated to CD71 bicycle ligands and RNAi compounds conjugated to CD71 bicycle ligands, the assay was modified as follows. 100 μL of crude membrane fractions from stably transfected hCD71-Nluc HEK293 cells were dispensed into white 96-well assay plates (ThermoFisher Scientific, Cat #136101). BCY17871-1598988 was used as a tracer compound and added to each well at a final concentration of 60 nM. Modified oligonucleotides were conjugated to the bicycle ligands through a SPAAC reaction These were then added at a range of concentrations in triplicate assays points, and the mixtures were incubated for 3 hours at room temperature. BRET was initiated with the addition of furimazine and the assay was completed as described above. Inhibition constants (Kᵢ) were obtained by fitting % BRET efficiency values to a competitive inhibition model, using the K_{D} value estimated for BCY17871-1598988 obtained in the same run. Values are presented as the average of triplicate data in the tables below. Each experiment is presented in a separate table.

[0432] The bicycle ligands were attached to the modified oligonucleotides through a BCN linker. Compound 1590463-BCY17901 is shown below as an example:

[chemical structure]

TABLE 9
Inhibition constants for modified oligonucleotides
conjugated to CD71 bicycle ligands, by nanoBRET

| Compound Number | Bicycle Ligand | Kᵢ (nM) |
|---|---|---|
| 1590463 | BCY17868 | 20 |
| 1590463 | BCY17869 | 55 |
| 1590463 | BCY17870 | 7 |
| 1590463 | BCY17871 | 6 |
| 1590463 | BCY17872 | 21 |
| 1590463 | BCY17873 | 6 |
| 1590463 | BCY17874 | 10 |
| 1590463 | BCY17875 | 4 |
| 1590463 | BCY17876 | 29 |
| 1590463 | BCY17877 | 18 |
| 1590463 | BCY17878 | 74 |
| 1590463 | BCY17879 | 25 |
| 1590463 | BCY17880 | 102 |

TABLE 10
Inhibition constants for modified oligonucleotides
conjugated to CD71 bicycle ligands, by nanoBRET

| | Bicycle | |
|---|---|---|
| Compound Number | Ligand | Kᵢ (nM) |
| 1590463 | BCY17882 | 23 |
| 1590463 | BCY17890 | 17 |
| 1590463 | BCY17892 | 11 |
| 1590463 | BCY17894 | 8 |
| 1590463 | BCY17896 | 2 |
| 1590463 | BCY17899 | 4 |
| 1590463 | BCY17901 | 1 |
| 1590463 | BCY17903 | 125 |
| 1590463 | BCY17904 | 31 |
| 1590463 | BCY17905 | 148 |
| 1590463 | BCY17873 | 7 |

TABLE 11
Inhibition constants for modified oligonucleotides
conjugated to CD71 bicycle ligands, by nanoBRET

| | Bicycle | |
|---|---|---|
| Compound Number | Ligand | Kᵢ (nM) |
| 1590463 | BCY17882 | 3 |
| 1590463 | BCY17890 | 2 |
| 1590463 | BCY17892 | 1 |
| 1590463 | BCY17894 | 1 |
| 1590463 | BCY17896 | 1 |
| 1590463 | BCY17899 | 1 |
| 1590463 | BCY17901 | 0.3 |
| 1590463 | BCY17903 | 24 |
| 1590463 | BCY17904 | 5 |
| 1590463 | BCY17905 | 16 |
| 1614439 | BCY17906 | 2 |
| 1590463 | BCY17873 | 1 |
| 1602000 | BCY17873 | 1 |
| 1609732 | BCY17873 | 1 |

TABLE 12
Inhibition constants for modified oligonucleotides
conjugated to CD71 bicycle ligands, by nanoBRET

| | Bicycle | |
|---|---|---|
| Compound Number | Ligand | Kᵢ (nM) |
| 1590463 | BCY17882 | 55 |
| 1590463 | BCY17890 | 20 |
| 1590463 | BCY17892 | 11 |
| 1590463 | BCY17894 | 10 |
| 1590463 | BCY17896 | 2 |
| 1590463 | BCY17899 | 4 |
| 1590463 | BCY17901 | 1 |
| 1590463 | BCY17904 | 60 |
| 1614439 | BCY17906 | 23 |
| 1590463 | BCY17873 | 10 |
| 1602000 | BCY17873 | 36 |
| 1609732 | BCY17873 | 10 |

TABLE 13
Inhibition constants for modified oligonucleotides
conjugated to CD71 bicycle ligands, by nanoBRET

| | Bicycle | |
|---|---|---|
| Compound Number | Ligand | Kᵢ (nM) |
| 1590463 | BCY17873 | 4 |
| 1590463 | BCY19405 | 3 |
| 1590463 | BCY19406 | 2 |
| 1590463 | BCY19407 | 2 |
| 1590463 | BCY19409 | 1 |

TABLE 14
Inhibition constants for modified oligonucleotides
conjugated to CD71 bicycle ligands, by nanoBRET

| | Bicycle | |
|---|---|---|
| Compound Number | Ligand | Kᵢ (nM) |
| 1598988 | BCY17896 | 9.9 |
| 1591118 | BCY17896 | 3.1 |
| 1598988 | BCY17901 | 4.4 |
| 1591118 | BCY17901 | 1.4 |

[0433] A duplex of modified oligonucleotides was generated by mixing Compound Nos. 486178 and 1614438 to generate Compound No. 486178:1614438.

TABLE 15
Inhibition constants for modified oligonucleotide duplexes
conjugated to CD71 bicycle ligands, by nanoBRET

| | Bicycle | |
|---|---|---|
| Compound Number | Ligand | Kᵢ (nM) |
| 486178:1614438 | BCY17873 | 95 |

TABLE 16
Inhibition constants for RNAi compounds conjugated
to CD71 bicycle ligands, by nanoBRET

| | Bicycle | |
|---|---|---|
| Compound Number | Ligand | Kᵢ (nM) |
| 1453015:1550983 | BCY17873 | 9 |

TABLE 17
Inhibition constants for RNAi compounds conjugated
to CD71 bicycle ligands, by nanoBRET

| | Bicycle | |
|---|---|---|
| Compound Number | Ligand | Kᵢ (nM) |
| 1453015:1550983 | BCY17873 | 38 |

### Example 5: Binding Affinity of Modified Oligonucleotides Conjugated to CD71 Bicycle Ligands

[0434] The binding affinity for each of the following modified oligonucleotides conjugated to CD71 bicycle ligands was tested on a Biacore X100 surface plasmon resonance (SPR) instrument. 200 units of modified oligonucleotides conjugated to CD71 bicycle ligand were immobilized on a streptavidin chip by injecting a 20 nM solution of 5′-Biotin-labeled DNA (5′-Biotin-TEG-DNA complement to modified oligonucleotide) duplexed with modified oligonucleotides conjugated to CD71 bicycle ligand in HBS—P (10 mM HEPES, pH 7.4, 150 mM NaCl, 0.0005% Surfactant P20) running buffer. CD71 in running buffer was then injected onto the modified oligonucleotides conjugated to CD71 bicycle ligand duplex-immobilized streptavidin chip at 25° C., at increasing concentrations of 6.25 nM, 12.5 nM, 25 nM, 50 nM, and 100 nM. Kinetic and equilibrium binding analysis was performed using Biacore X100 Evaluation Software, applying 1:1 binding fit. Binding affinity is expressed as equilibrium dissociation constant (K_{D}) in the table below.

TABLE 18
Binding affinity of modified oligonucleotides
conjugated to CD71 bicycle ligands, SPR

| Compound Number | Bicycle Ligand | K_{D} (nM) |
|---|---|---|
| 1590463 | BCY17868 | 0.9 |
| 1590463 | BCY17869 | 14.5 |
| 1590463 | BCY17870 | 0.1 |
| 1590463 | BCY17871 | 2.4 |
| 1590463 | BCY17872 | 77.1 |
| 1590463 | BCY17873 | 12 |
| 1590463 | BCY17874 | 32 |
| 1590463 | BCY17875 | 4.5 |
| 1590463 | BCY17876 | 95.4 |
| 1590463 | BCY17877 | 12.5 |
| 1590463 | BCY17878 | 126 |
| 1590463 | BCY17879 | 31.2 |
| 1590463 | BCY17880 | 8.2 |

### Example 6: Activity and Tolerability of Modified Oligonucleotides Conjugated to CD71 Bicycle Ligands in hTFR^{KI/+} Knock in Mice

[0435] Human transferrin receptor (hTFR)/CD71 knock-in mice used in these studies have the coding region of mouse exon 2 as well as the splice donor-site of mouse intron 2 replaced with the human TFR open reading frame according to NCBI transcript NM_001128148.2. Humanization of the transferrin receptor gene was done via CRISPR/Cas-9-mediated gene editing, allowing for generation of a model with constitutive expression of humanized transferrin receptor gene. Targeting strategy was based on NCBI transcripts NM_011638.4 (mouse) and NM_001128148.2 (human). A plasmid allowing expression of Cas9 mRNA, specific gRNA, and the puromycin resistance cassette; and a plasmid containing the homology regions of the mouse transferrin receptor gene, an FRT site, and the replaced human region were co-transfected into the Taconic Biosciences C57BL/6N Tac ES cell line. The humanized mice are called hTFR^{KI/+} knock-in mice herein. They express one copy of the mouse TFR gene and one copy of the humanized TFR gene under the control of the endogenous mouse promoter.

[0436] Activity and tolerability of modified oligonucleotides conjugated to CD71 bicycle ligands was tested in in hTFR^{KI/+} knock in mice. In addition, activity of Compound No. 1468770 (described herein above) conjugated to the Fab′ fragments of OKT9 antibody (BioXCell, catalog number: BE0023) that targets human CD71 was tested.

### Treatment

[0437] hTFR^{KI/+} mice were divided into groups of 3 mice each. Each mouse received an intravenous administration of conjugated modified oligonucleotide for a total of 3 doses (on Days 1, 8, and 15) at doses indicated in the table below. A group of 3 mice received an intravenous administration of unconjugated modified oligonucleotide, Compound No. 486178, for a total of 3 doses (on Days 1, 8, and 15) at doses indicated in the table below. A group of 4 mice received PBS as a negative control.

### RNA Analysis

[0438] The mice were sacrificed one week post final administration (on day 22), and RNA was extracted from various muscle tissues (including quadriceps (Quad), tibialis anterior (TA), diaphragm, triceps, heart, gastrocnemius (gastroc)), aorta, sciatic nerve, and liver tissue for quantitative real time RTPCR analysis to measure amount of mouse DMPK RNA using mouse primer probe set RTS3181 (forward sequence GACATATGCCAAGATTGTGCACTAC, designated herein as SEQ ID NO: 16; reverse sequence CACGAATGAGGTCCTGAGCTT, designated herein as SEQ ID NO: 17; probe sequence AACACTTGTCGCTGCCGCTGGC, designated herein as SEQ ID NO: 18). Results are presented as percent mouse DMPK RNA relative to PBS control, normalized to mouse GAPDH (% ocontrol).

TABLE 19
Reduction of mouse DMPK RNA in hTFR^{KI/+} knock in mice
with modified oligonucleotides conjugated to CD71 bicycle ligands

| | | | mouse DMPK RNA (% control) | | | | | | | | |
|---|---|---|---|---|---|---|---|---|---|---|---|
| Compound | | Dose | | | | | | | | | Sciatic |
| No. | Conjugate | (mg/kg) | Quad | TA | Diaphragm | Heart | Gastroc | Triceps | Aorta | Liver | Nerve |
| 486178 | None | 35 | 25 | 36 | 30 | 53 | 24 | 31 | 44 | 10 | 50 |
| 1468770 | OKT9 | 3.5 | 19 | 23 | 24 | 39 | 16 | 28 | 61 | 11 | 72 |
| 1590463 | BCY17868 | 3.5 | 47 | 58 | 46 | 76 | 44 | 56 | 60 | 28 | 71 |
| 1590463 | BCY17869 | 3.5 | 48 | 64 | 51 | 74 | 46 | 58 | 69 | 25 | 65 |
| 1590463 | BCY17877 | 3.5 | 45 | 54 | 54 | 78 | 42 | 54 | 103 | 34 | 72 |
| 1590463 | BCY17878 | 3.5 | 52 | 57 | 55 | 81 | 46 | 56 | 93 | 31 | 87 |
| 1590463 | BCY17879 | 3.5 | 46 | 55 | 50 | 79 | 43 | 55 | 78 | 29 | 76 |
| 1590463 | BCY17880 | 3.5 | 49 | 58 | 60 | 82 | 46 | 53 | 80 | 30 | 71 |
| 1590463 | BCY17875 | 3.5 | 34 | 39 | 44 | 72 | 30 | 40 | 61 | 30 | 71 |
| 1590463 | BCY17876 | 3.5 | 54 | 61 | 59 | 84 | 48 | 57 | 59 | 27 | 81 |
| 1590463 | BCY17870 | 3.5 | 35 | 43 | 44 | 70 | 32 | 40 | 67 | 29 | 72 |
| 1590463 | BCY17872 | 3.5 | 36 | 44 | 43 | 73 | 35 | 44 | 64 | 26 | 70 |
| 1590463 | BCY17871 | 3.5 | 40 | 51 | 44 | 71 | 37 | 49 | 61 | 27 | 79 |
| 1590463 | BCY17873 | 3.5 | 32 | 40 | 39 | 70 | 31 | 38 | 62 | 27 | 73 |
| 1590463 | BCY17874 | 3.5 | 36 | 48 | 45 | 72 | 36 | 43 | 69 | 29 | 72 |

### Plasma Chemistry Markers

[0439] To evaluate the effect of modified oligonucleotides on liver and kidney function, plasma levels of albumin (ALB), alanine aminotransferase (ALT), aspartate aminotransferase (AST), blood urea nitrogen (BUN), total bilirubin (TBIL), total Protein (PROT), Creatine (CREAT), and Creatine Kinase (CK) were measured on the day the mice were sacrificed (day 22) using an automated clinical chemistry analyzer (Hitachi Olympus AU400c, Melville, NY). The results were averaged for each group of mice and are presented in the tables below. Oligomeric compounds that caused changes in the levels of any of the liver or kidney function markers outside the expected range for modified oligonucleotides were excluded from further studies.

TABLE 20
Plasma chemistry markers in hTFR^{KI/+} knock in mice

| | | | Plasma clinical chemistry | | | | | | | |
|---|---|---|---|---|---|---|---|---|---|---|
| Com- | | Dose | | | | TBIL | BUN | | | |
| pound | | (mg/ | ALB | ALT | AST | (mg/ | (mg/ | PROT | CREAT | CK |
| No. | Conjugate | kg) | (g/dL) | (U/L) | (U/L) | dL) | dL) | (g/dL) | (mg/dL) | (U/L) |
| PBS | None | 0 | 2.95‡ | 30‡ | 124‡ | 0.19‡ | 23‡ | 5.03‡ | 0.13‡ | 409‡ |
| 486178 | None | 35 | 2.95 | 44 | 199 | 0.29 | 20 | 5.03 | 0.15 | 671 |
| 1468770 | OKT9 | 3.5 | 3.18 | 28 | 113 | 0.19 | 21 | 5.00 | 0.11 | 372 |
| 1590463 | BCY17868 | 3.5 | 3.04 | 51 | 172 | 0.16 | 19 | 4.97 | 0.14 | 571 |
| 1590463 | BCY17869 | 3.5 | 3.01 | 56 | 143 | 0.21 | 17 | 4.90 | 0.11 | 350 |
| 1590463 | BCY17870 | 3.5 | 3.18 | 40 | 132 | 0.20 | 20 | 5.20 | 0.17 | 374 |
| 1590463 | BCY17871 | 3.5 | 3.20 | 45 | 167 | 0.24 | 17 | 5.33 | 0.16 | 505 |
| 1590463 | BCY17872 | 3.5 | 3.21 | 42 | 116 | 0.17 | 18 | 5.23 | 0.15 | 297 |
| 1590463 | BCY17873 | 3.5 | 3.11 | 68 | 231 | 0.20 | 19 | 5.13 | 0.12 | 723 |
| 1590463 | BCY17874 | 3.5 | 3.31 | 28 | 107 | 0.13 | 17 | 5.33 | 0.15 | 395 |
| 1590463 | BCY17875 | 3.5 | 2.91 | 50 | 147 | 0.13 | 18 | 4.60 | 0.11 | 486 |
| 1590463 | BCY17876 | 3.5 | 2.86 | 25 | 133 | 0.13 | 15 | 4.57 | 0.13 | 463 |
| 1590463 | BCY17877 | 3.5 | 3.19 | 22 | 85 | 0.18 | 19 | 5.27 | 0.12 | 163 |
| 1590463 | BCY17878 | 3.5 | 3.20 | 31 | 160 | 0.14 | 19 | 5.23 | 0.14 | 531 |
| 1590463 | BCY17879 | 3.5 | 2.94 | 44 | 176 | 0.12 | 16 | 4.83 | 0.12 | 554 |
| 1590463 | BCY17880 | 3.5 | 3.15 | 34 | 268 | 0.20 | 17 | 4.97 | 0.13 | 1080 |

‡indicates that there were fewer than 4 samples available

### Hematology Assays

[0440] Blood obtained from mice on the day the mice were sacrificed (day 22) were sent to IDEXX BioResearch for measurement of blood cell counts. Counts taken include red blood cell (RBC) count, white blood cell (WBC) count, hemoglobin (HGB), hematocrit (HCT), Mean corpuscular volume (MCV), mean corpuscular hemoglobin (MCH), and mean corpuscular hemoglobin concentration (MCHC). Individual white blood cell counts, such as that ofmonocytes (MON), neutrophils (NEU), lymphocytes (LYM), eosinophils (EOS), basophils (BAS), reticulocytes, and platelets were evaluated. The results are presented in the tables below. Oligomeric compounds that caused changes in the blood cell count outside the expected range were excluded in further studies.

TABLE 21
Hematology Parameters in hTFR^{KI/+} knock in mice

| Com- | | Dose | WBC | RBC | HGB | | | | |
|---|---|---|---|---|---|---|---|---|---|
| pound | | (mg/ | (10\hat{ }3/ | (10\hat{ }12/ | (g/ | HCT | MCV | MCH | MCHC |
| No. | Conjugate | kg) | μL) | L) | dL) | (%) | (fL) | (pg) | (g/dL) |
| PBS | None | 0 | 4‡ | 10‡ | 13‡ | 43‡ | 45‡ | 14‡ | 31‡ |
| 486178 | None | 35 | 4 | 10 | 14 | 45 | 44 | 13 | 30 |
| 1468770 | OKT9 | 3.5 | 5 | 10 | 14 | 46 | 44 | 13 | 31 |
| 1590463 | BCY17868 | 3.5 | 4 | 10 | 14 | 46 | 46 | 14 | 30 |
| 1590463 | BCY17869 | 3.5 | 6 | 10 | 14 | 47 | 45 | 14 | 31 |
| 1590463 | BCY17870 | 3.5 | 5 | 10 | 14 | 46 | 45 | 14 | 30 |
| 1590463 | BCY17871 | 3.5 | 5 | 10 | 14 | 46 | 44 | 13 | 30 |
| 1590463 | BCY17872 | 3.5 | 6 | 10 | 14 | 46 | 44 | 14 | 31 |
| 1590463 | BCY17873 | 3.5 | 6 | 11 | 14 | 47 | 44 | 13 | 30 |
| 1590463 | BCY17874 | 3.5 | 7 | 11 | 14 | 47 | 44 | 13 | 31 |
| 1590463 | BCY17875 | 3.5 | 7 | 11 | 15 | 48 | 45 | 13 | 30 |
| 1590463 | BCY17876 | 3.5 | 6 | 10 | 14 | 47 | 45 | 14 | 30 |
| 1590463 | BCY17877 | 3.5 | 8 | 11 | 14 | 47 | 44 | 13 | 30 |
| 1590463 | BCY17878 | 3.5 | 6 | 11 | 14 | 47 | 44 | 13 | 31 |
| 1590463 | BCY17879 | 3.5 | 5 | 11 | 14 | 48 | 44 | 13 | 30 |
| 1590463 | BCY17880 | 3.5 | 7 | 11 | 15 | 48 | 44 | 13 | 30 |

‡indicates that there were fewer than 4 samples available

TABLE 22
Blood Cell Counts in hTFR^{KI/+} knock in mice

| Com- | | Dose | | | | | | PLT | RETI |
|---|---|---|---|---|---|---|---|---|---|
| pound | | (mg/ | NEU | LYM | MON | EOS | BAS | (10\hat{ }9/ | (10\hat{ }3/ |
| No. | Conjugate | kg) | (%) | (%) | (%) | (%) | (%) | L) | μL) |
| PBS | None | 0 | 11‡ | 82‡ | 6‡ | 0.87‡ | 0.00‡ | 1083‡ | 784‡ |
| 486178 | None | 35 | 9 | 83 | 6 | 1.87 | 0.13 | 1010 | 619 |
| 1468770 | OKT9 | 3.5 | 10 | 85 | 4 | 1.00 | 0.10 | 948 | 620 |
| 1590463 | BCY17868 | 3.5 | 12 | 80 | 6 | 2.33 | 0.00 | 912 | 755 |
| 1590463 | BCY17869 | 3.5 | 7 | 86 | 4 | 2.00 | 0.17 | 1019 | 842 |
| 1590463 | BCY17870 | 3.5 | 8 | 84 | 6 | 2.13 | 0.03 | 1113 | 779 |
| 1590463 | BCY17871 | 3.5 | 14 | 80 | 5 | 1.23 | 0.20 | 1087 | 730 |
| 1590463 | BCY17872 | 3.5 | 10 | 86 | 4 | 0.30 | 0.07 | 991 | 683 |
| 1590463 | BCY17873 | 3.5 | 10 | 81 | 5 | 3.20 | 0.30 | 958 | 727 |
| 1590463 | BCY17874 | 3.5 | 8 | 86 | 4 | 2.07 | 0.13 | 1054 | 715 |
| 1590463 | BCY17875 | 3.5 | 8 | 85 | 4 | 2.53 | 0.20 | 964 | 826 |
| 1590463 | BCY17876 | 3.5 | 9 | 85 | 4 | 2.07 | 0.27 | 974 | 775 |
| 1590463 | BCY17877 | 3.5 | 10 | 82 | 5 | 2.67 | 0.13 | 1018 | 703 |
| 1590463 | BCY17878 | 3.5 | 8 | 84 | 4 | 3.77 | 0.27 | 896 | 826 |
| 1590463 | BCY17879 | 3.5 | 13 | 82 | 4 | 1.33 | 0.07 | 861 | 749 |
| 1590463 | BCY17880 | 3.5 | 10 | 83 | 4 | 3.40 | 0.33 | 966 | 838 |

‡indicates that there were fewer than 4 samples available

### Body and Organ Weights

[0441] Body weights of hTFR^{KI/+} mice were measured on days 1 and 22, and the average body weight for each group is presented in the table below. Liver, kidney, and spleen weights were measured on the day the mice were sacrificed (day 22), and the average organ weights for each group are presented in the tables below. Oligomeric compounds that caused any changes in organ weights outside the expected range for modified oligonucleotides were excluded from further studies.

TABLE 23
Body and organ weights (in grams)

| | | | Body | | | | |
|---|---|---|---|---|---|---|---|
| Com- | | Dose | weight (g) | | | | |
| pound | | (mg/ | Day | Day | Organ weight (g) | | |
| No. | Conjugate | kg) | 1 | 22 | Liver | Kidney | Spleen |
| PBS | None | 0 | 23 | 24 | 1.15‡ | 0.28 | 0.09 |
| 486178 | None | 35 | 22 | 24 | 1.23 | 0.28 | 0.09 |
| 1468770 | OKT9 | 3.5 | 27 | 28 | 1.37 | 0.32 | 0.09 |
| 1590463 | BCY17868 | 3.5 | 22 | 22 | 1.14 | 0.28 | 0.09 |
| 1590463 | BCY17869 | 3.5 | 24 | 24 | 1.14 | 0.28 | 0.09 |
| 1590463 | BCY17870 | 3.5 | 22 | 23 | 1.18 | 0.28 | 0.09 |
| 1590463 | BCY17871 | 3.5 | 24 | 24 | 1.17 | 0.30 | 0.08 |
| 1590463 | BCY17872 | 3.5 | 23 | 24 | 1.19 | 0.30 | 0.08 |
| 1590463 | BCY17873 | 3.5 | 23 | 23 | 1.10 | 0.28 | 0.08 |
| 1590463 | BCY17874 | 3.5 | 22 | 22 | 1.03 | 0.27 | 0.09 |
| 1590463 | BCY17875 | 3.5 | 22 | 23 | 1.03 | 0.28 | 0.08 |
| 1590463 | BCY17876 | 3.5 | 22 | 23 | 1.04 | 0.27 | 0.09 |
| 1590463 | BCY17877 | 3.5 | 23 | 23 | 1.04 | 0.29 | 0.16 |
| 1590463 | BCY17878 | 3.5 | 24 | 25 | 1.13 | 0.28 | 0.09 |
| 1590463 | BCY17879 | 3.5 | 23 | 25 | 1.12 | 0.29 | 0.09 |
| 1590463 | BCY17880 | 3.5 | 23 | 24 | 1.09 | 0.29 | 0.08 |

‡indicates that there were fewer than 4 samples available

### Example 7: Activity and Tolerability of Modified Oligonucleotides Conjugated to CD71 Bicycle Ligands, and a Duplexed Modified Oligonucleotide Conjugated to a CD71 Bicycle Ligand in hTFR^{KI/+} Knock in Mice

[0442] Activity and tolerability of modified oligonucleotides conjugated to CD71 bicycle ligands was tested in in hTFR^{KI/+} knock in mice (described herein above). In addition, activity of Compound No. 1468770 (described herein above) conjugated to the Fab′ fragments of OKT9 antibody (BioXCell, catalog number: BE0023) that targets human CD71 was tested.

### Treatment

[0443] hTFR^{KI/+} mice were divided into groups of 3 mice each. Each mouse received an intravenous administration of conjugated modified oligonucleotide for a total of 3 doses (on Days 1, 8, and 15) at doses indicated in the table below. A group of 3 mice received an intravenous administration of unconjugated modified oligonucleotide, Compound No. 486178, for a total of 3 doses (on Days 1, 8, and 15) at doses indicated in the table below. A group of 4 mice received PBS as a negative control.

### RNA Analysis

[0444] The mice were sacrificed four days post final administration (on day 19), and RNA was extracted from various muscle tissues (including quadriceps (Quad), tibialis anterior (TA), diaphragm (Diaphr), triceps, heart, gastrocnemius (gastroc)), aorta, sciatic nerve, and liver tissue for quantitative real time RTPCR analysis to measure amount of mouse DMPK RNA using mouse primer probe set RTS3181 (described herein above). Results are presented as percent mouse DMPK RNA relative to PBS control, normalized to mouse GAPDH (% control).

TABLE 24
Reduction of mouse DMPK RNA in hTFR^{KI/+} knock in mice with modified
oligonucleotides conjugated to CD71 bicycle ligands

| Com- | | Dose | | | | | | | |
|---|---|---|---|---|---|---|---|---|---|
| pound | Con- | (mg/ | mouse DMPK RNA (% control) | | | | | | |
| No. | jugate | kg) | Quad | Gastroc | TA | Triceps | Diaphr | Heart | Liver |
| 486178 | None | 35 | 23 | 29 | 29 | 28 | 20 | 54 | 12 |
| 1468770 | OKT9 | 3.5 | 34 | 35 | 32 | 44 | 21 | 39 | 15 |
| 1590463 | BCY17882 | 3.5 | 49 | 49 | 61 | 56 | 49 | 75 | 43 |
| 1590463 | BCY17890 | 3.5 | 47 | 47 | 67 | 49 | 49 | 81 | 61 |
| 1590463 | BCY17892 | 3.5 | 45 | 46 | 49 | 46 | 33 | 61 | 30 |
| 1590463 | BCY17894 | 3.5 | 44 | 48 | 46 | 48 | 28 | 59 | 25 |
| 1590463 | BCY17896 | 3.5 | 36 | 43 | 37 | 41 | 26 | 62 | 24 |
| 1590463 | BCY17899 | 3.5 | 53 | 59 | 58 | 61 | 40 | 70 | 24 |
| 1590463 | BCY17901 | 3.5 | 26‡ | 32‡ | 24‡ | 27‡ | 19‡ | 43‡ | 28‡ |
| 1614439 | BCY17906 | 3.5 | 50 | 57 | 57 | 55 | 37 | 60 | 30 |
| 1590463 | BCY17904 | 3.5 | 58 | 64 | 61 | 58 | 44 | 75 | 27 |
| 1590463 | BCY17873 | 3.5 | 46 | 53 | 48 | 48 | 32 | 59 | 31 |
| 1602000 | BCY17873 | 3.5 | 50 | 54 | 58 | 52 | 33 | 69 | 28 |
| 486178: | BCY17873 | 3.5 | 60 | 61 | 66 | 56 | 48 | 69 | 40 |
| 1614438 | | | | | | | | | |
| 1609732 | BCY17873 | 3.5 | 45 | 49 | 51 | 46 | 34 | 59 | 25 |

‡indicates fewer than 3 samples available

### Plasma Chemistry Markers

[0445] To evaluate the effect of modified oligonucleotides on liver and kidney function, plasma levels of albumin (ALB), alanine aminotransferase (ALT), aspartate aminotransferase (AST), blood urea nitrogen (BUN), total bilirubin (TBIL), total Protein (PROT), Creatine (CREAT), and Creatine Kinase (CK) were measured on the day the mice were sacrificed (day 19) using an automated clinical chemistry analyzer (Hitachi Olympus AU400c, Melville, NY). The results were averaged for each group of mice and are presented in the tables below. Oligomeric compounds that caused changes in the levels of any of the liver or kidney function markers outside the expected range for modified oligonucleotides were excluded from further studies.

TABLE 25
Plasma chemistry markers in hTFR^{KI/+} knock in mice

| | | | Plasma clinical chemistry | | | | | | |
|---|---|---|---|---|---|---|---|---|---|
| Com- | | Dose | | | | TBIL | BUN | PROT | CREAT |
| pound | | (mg/ | ALB | ALT | AST | (mg/ | (mg/ | (g/ | (mg/ |
| No. | Conjugate | kg) | (g/dL) | (U/L) | (U/L) | dL) | dL) | dL) | dL) |
| PBS | None | 0 | 3.32 | 93 | 220 | 0.20 | 24 | 5.25 | 0.12 |
| 486178 | None | 35 | 3.53 | 40 | 106 | 0.16 | 25 | 5.67 | 0.15 |
| 1468770 | OKT9 | 3.5 | 3.56 | 34 | 74 | 0.15 | 26 | 5.63 | 0.15 |
| 1590463 | BCY17882 | 3.5 | 3.67 | 76 | 149 | 0.15 | 20 | 5.53 | 0.15 |
| 1590463 | BCY17890 | 3.5 | 3.76 | 36 | 127 | 0.15 | 24 | 5.73 | 0.16 |
| 1590463 | BCY17892 | 3.5 | 3.10 | 35 | 103 | 0.13 | 21 | 4.80 | 0.11 |
| 1590463 | BCY17894 | 3.5 | 3.13 | 102 | 257 | 0.19 | 22 | 5.00 | 0.14 |
| 1590463 | BCY17896 | 3.5 | 3.91 | 72 | 133 | 0.16 | 27 | 6.40 | 0.23 |
| 1590463 | BCY17899 | 3.5 | 3.61 | 54 | 134 | 0.15 | 24 | 5.83 | 0.17 |
| 1590463 | BCY17901 | 3.5 | 2.85‡ | 56‡ | 180‡ | 0.11‡ | 19‡ | 4.70‡ | 0.12‡ |
| 1614439 | BCY17906 | 3.5 | 3.13 | 53 | 153 | 0.14 | 21 | 4.93 | 0.12 |
| 1590463 | BCY17904 | 3.5 | 3.65 | 52 | 103 | 0.12 | 23 | 6.03 | 0.18 |
| 1590463 | BCY17873 | 3.5 | 3.17 | 40 | 134 | 0.16 | 22 | 5.17 | 0.13 |
| 1602000 | BCY17873 | 3.5 | 3.54 | 33 | 78 | 0.13 | 23 | 5.87 | 0.18 |
| 486178: | BCY17873 | 3.5 | 3.25 | 32 | 119 | 0.14 | 20 | 5.17 | 0.13 |
| 1614438 | | | | | | | | | |
| 1609732 | BCY17873 | 3.5 | 3.42 | 58 | 150 | 0.14 | 22 | 5.50 | 0.17 |

‡indicates fewer than 3 samples available

### Hematology Assays

[0446] Blood obtained from mice on the day the mice were sacrificed (day 19) were sent to IDEXX BioResearch for measurement of blood cell counts. Counts taken include red blood cell (RBC) count, white blood cell (WBC) count, hemoglobin (HGB), hematocrit (HCT), Mean corpuscular volume (MCV), mean corpuscular hemoglobin (MCH), and mean corpuscular hemoglobin concentration (MCHC). Individual white blood cell counts, such as that of monocytes (MON), neutrophils (NEU), lymphocytes (LYM), eosinophils (EOS), basophils (BAS), reticulocytes, and platelets were evaluated. The results are presented in the tables below. Oligomeric compounds that caused changes in the blood cell count outside the expected range were excluded in further studies.

TABLE 26
Hematology Parameters in hTFR^{KI/+} knock in mice

| Com- | | Dose | WBC | RBC | HGB | | | | |
|---|---|---|---|---|---|---|---|---|---|
| pound | | (mg/ | (10\hat{ }3/ | (10\hat{ }12/ | (g/ | HCT | MCV | MCH | MCHC |
| No. | Conjugate | kg) | μL) | L) | dL) | (%) | (fL) | (pg) | (g/dL) |
| PBS | None | 0 | 7 | 12 | 15 | 46 | 39 | 12 | 32 |
| 486178 | None | 35 | 7 | 12 | 14 | 45 | 40 | 13 | 32 |
| 1468770 | OKT9 | 3.5 | 9 | 12 | 15 | 47 | 40 | 12 | 31 |
| 1590463 | BCY17882 | 3.5 | 5 | 11 | 14 | 45 | 41 | 13 | 31 |
| 1590463 | BCY17890 | 3.5 | 4 | 11 | 14 | 44 | 40 | 13 | 32 |
| 1590463 | BCY17892 | 3.5 | 8 | 12 | 15 | 46 | 40 | 13 | 32 |
| 1590463 | BCY17894 | 3.5 | 12 | 12 | 14 | 46 | 40 | 13 | 32 |
| 1590463 | BCY17896 | 3.5 | 8 | 12 | 15 | 46 | 39 | 12 | 32 |
| 1590463 | BCY17899 | 3.5 | 7 | 12 | 15 | 46 | 39 | 12 | 32 |
| 1590463 | BCY17901 | 3.5 | 12‡ | 11‡ | 14‡ | 47‡ | 42‡ | 13‡ | 30‡ |
| 1614439 | BCY17906 | 3.5 | 8 | 12 | 15 | 47 | 40 | 13 | 32 |
| 1590463 | BCY17904 | 3.5 | 9 | 11 | 14 | 46 | 40 | 13 | 31 |
| 1590463 | BCY17873 | 3.5 | 9 | 12 | 15 | 47 | 40 | 12 | 31 |
| 1602000 | BCY17873 | 3.5 | 10 | 12 | 14 | 47 | 41 | 13 | 31 |
| 486178: | BCY17873 | 3.5 | 10 | 12 | 15 | 48 | 40 | 12 | 31 |
| 1614438 | | | | | | | | | |
| 1609732 | BCY17873 | 3.5 | 11‡ | 12‡ | 15‡ | 47‡ | 40‡ | 12‡ | 31‡ |

‡indicates that there are fewer than 3 samples available

TABLE 27
Blood Cell Counts in hTFR^{KI/+} knock in mice

| Com- | | Dose | | | | | | PLT | RETI |
|---|---|---|---|---|---|---|---|---|---|
| pound | Con- | (mg/ | NEU | LYM | MON | EOS | BAS | (10\hat{ }9/ | (10\hat{ }3/ |
| No. | jugate | kg) | (%) | (%) | (%) | (%) | (%) | L) | μL) |
| PBS | None | 0 | 11 | 83 | 5 | 1.28 | 0.15 | 1095 | 437 |
| 486178 | None | 35 | 12 | 82 | 4 | 1.37 | 0.40 | 1335 | 462 |
| 1468770 | OKT9 | 3.5 | 10 | 85 | 4 | 0.87 | 0.30 | 1169 | 430 |
| 1590463 | BCY17882 | 3.5 | 10 | 85 | 3 | 1.03 | 0.23 | 930 | 382 |
| 1590463 | BCY17890 | 3.5 | 13 | 82 | 4 | 1.40 | 0.33 | 942 | 354 |
| 1590463 | BCY17892 | 3.5 | 10 | 85 | 3 | 1.50 | 0.20 | 1119 | 401 |
| 1590463 | BCY17894 | 3.5 | 30 | 61 | 9 | 0.33 | 0.03 | 1081 | 416 |
| 1590463 | BCY17896 | 3.5 | 15 | 79 | 6 | 0.33 | 0.00 | 1246 | 441 |
| 1590463 | BCY17899 | 3.5 | 9 | 88 | 2 | 1.20 | 0.10 | 1185 | 428 |
| 1590463 | BCY17901 | 3.5 | 24‡ | 64‡ | 10‡ | 1.40‡ | 0.10‡ | 1122‡ | 411‡ |
| 1614439 | BCY17906 | 3.5 | 11 | 84 | 3 | 1.87 | 0.23 | 1127 | 458 |
| 1590463 | BCY17904 | 3.5 | 16 | 75 | 7 | 1.20 | 0.13 | 1238 | 417 |
| 1590463 | BCY17873 | 3.5 | 9 | 86 | 4 | 1.30 | 0.13 | 1444 | 501 |
| 1602000 | BCY17873 | 3.5 | 10 | 84 | 4 | 2.30 | 0.13 | 1165 | 414 |
| 486178: | BCY17873 | 3.5 | 10 | 85 | 3 | 1.57 | 0.13 | 1174 | 450 |
| 1614438 | | | | | | | | | |
| 1609732 | BCY17873 | 3.5 | 10‡ | 85‡ | 3‡ | 1.90‡ | 0.20‡ | 1203‡ | 442‡ |

‡indicates that there are fewer than 3 samples available

### Body and Organ Weights

[0447] Body weights of hTFR^{KI/+} mice were measured on days 1 and 19, and the average body weight for each group is presented in the table below. Liver, kidney, and spleen weights were measured on the day the mice were sacrificed (day 19), and the average organ weights for each group are presented in the tables below. Oligomeric compounds that caused any changes in organ weights outside the expected range for modified oligonucleotides were excluded from further studies.

TABLE 28
Body and organ weights (in grams)

| | | | Body | | | | |
|---|---|---|---|---|---|---|---|
| Com- | | Dose | weight (g) | | | | |
| pound | Con- | (mg/ | Day | Day | Organ weight (g) | | |
| No. | jugate | kg) | 1 | 19 | Liver | Kidney | Spleen |
| PBS | None | 0 | 29 | 30 | 1.40 | 0.40 | 0.07 |
| 486178 | None | 35 | 28 | 29 | 1.45 | 0.37 | 0.08 |
| 1468770 | OKT9 | 3.5 | 31 | 33 | 1.59 | 0.43 | 0.08 |
| 1590463 | BCY17882 | 3.5 | 22 | 23 | 1.11 | 0.31 | 0.09 |
| 1590463 | BCY17890 | 3.5 | 22 | 24 | 1.16 | 0.30 | 0.08 |
| 1590463 | BCY17892 | 3.5 | 27 | 29 | 1.48 | 0.37 | 0.08 |
| 1590463 | BCY17894 | 3.5 | 29 | 30 | 1.49 | 0.40 | 0.08 |
| 1590463 | BCY17896 | 3.5 | 29 | 30 | 1.53 | 0.43 | 0.08 |
| 1590463 | BCY17899 | 3.5 | 29 | 30 | 1.51 | 0.43 | 0.08 |
| 1590463 | BCY17901 | 3.5 | 30‡ | 32‡ | 1.69‡ | 0.44‡ | 0.08‡ |
| 1614439 | BCY17906 | 3.5 | 26 | 27 | 1.36 | 0.40 | 0.07 |
| 1590463 | BCY17904 | 3.5 | 28 | 29 | 1.52 | 0.41 | 0.08 |
| 1590463 | BCY17873 | 3.5 | 29 | 30 | 1.47 | 0.42 | 0.07 |
| 1602000 | BCY17873 | 3.5 | 33 | 35 | 1.80 | 0.44 | 0.09 |
| 486178: | BCY17873 | 3.5 | 29 | 31 | 1.43 | 0.41 | 0.08 |
| 1614438 | | | | | | | |
| 1609732 | BCY17873 | 3.5 | 30 | 32 | 1.52 | 0.42 | 0.08 |

‡indicates that there are fewer than 3 samples available

### Example 8: Activity and Tolerability of Modified Oligonucleotides Conjugated to CD71 Bicycle Ligands in hTFR^{KI/+} Knock in Mice, Multiple Dose

[0448] The activity and tolerability of modified oligonucleotides conjugated to CD71 bicycle ligands were tested in in hTFR^{KI/+} knock in mice (described herein above). In addition, activity and tolerability of Compound No. 1468770 (described herein above) conjugated to the Fab′ fragments of OKT9 antibody (BioXCell, catalog number: BE0023) that targets human CD71 were tested.

### Treatment

[0449] hTFR^{KI/+} mice were divided into groups of 3-4 mice each. Each mouse received an intravenous (i.v.) administration or subcutaneous (s.c.) administration of conjugated modified oligonucleotide for a total of 3 doses (on Days 1, 5, and 9) at doses indicated in the table below. A group of 3 mice received an intravenous administration of unconjugated modified oligonucleotide, Compound No. 486178, for a total of 3 doses (on Days 1, 5, and 9) at doses indicated in the table below. A group of 4 mice received PBS as a negative control.

### RNA Analysis

[0450] The mice were sacrificed six days post final administration (on day 15), and RNA was extracted from various muscle tissues (including quadriceps (Quad), tibialis anterior (TA), diaphragm, triceps, heart, gastrocnemius (gastroc)), aorta, sciatic nerve, and liver tissue for quantitative real time RTPCR analysis to measure amount of mouse DMPK RNA using mouse primer probe set RTS3181 (described herein above). Results are presented as percent mouse DMPK RNA relative to PBS control, normalized to mouse GAPDH (% control).

TABLE 29
Reduction of mouse DMPK RNA in hTFR^{KI/+} knock in mice with
modified oligonucleotides conjugated to CD71 bicycle ligands

| | | | | Quad- | Gastroc- | Tibialis | Dia- | |
|---|---|---|---|---|---|---|---|---|
| | | | | riceps | nemius | Anterior | phragm | Heart |
| | | | | mouse | mouse | mouse | mouse | mouse |
| | | Mode | | DMPK | DMPK | DMPK | DMPK | DMPK |
| Com- | | of | | RNA | RNA | RNA | RNA | RNA |
| pound | | Admin- | Dose | (% | (% | (% | (% | (% |
| No. | Conjugate | istration | (mg/kg) | control) | control) | control) | control) | control) |
| 486178 | None | i.v. | 5 | 79 | 82 | 77 | 61 | 88 |
| | | | 20 | 35 | 40 | 42 | 28 | 63 |
| | | | 50 | 20 | 20 | 23 | 16 | 48 |
| 1468770 | OKT9 | i.v | 1 | 84 | 91 | 87 | 67 | 73 |
| | | | 3.5 | 26 | 30 | 27 | 21 | 37 |
| | | | 10 | 17 | 17 | 18 | 11 | 34 |
| 1590463 | BCY17901 | i.v. | 1 | 79 | 74 | 71 | 57 | 75 |
| | | | 3.5 | 30 | 28 | 29 | 21 | 48 |
| | | | 10 | 14 | 15 | 14 | 14 | 44 |
| 1590463 | BCY17896 | i.v. | 1 | 74 | 75 | 84 | 60 | 81 |
| | | | 3.5 | 40 | 40 | 42 | 25 | 61 |
| | | | 10 | 23 | 28 | 28 | 16 | 56 |
| 1590463 | BCY17896 | s.c. | 3.5 | 63 | 61 | 59 | 48 | 76 |

TABLE 30
Reduction of mouse DMPK RNA in hTFR^{KI/+} knock in mice with
modified oligonucleotides conjugated to CD71 bicycle ligands

| | | Mode | | Gas- | Tibialis | | |
|---|---|---|---|---|---|---|---|
| | | of | Quad- | troc- | An- | Dia- | |
| | | Ad- | riceps | nemius | terior | phragm | Heart |
| Com- | | min- | ED50 | ED50 | ED50 | ED50 | ED50 |
| pound | | istra- | (mg/ | (mg/ | (mg/ | (mg/ | (mg/ |
| No. | Conjugate | tion | kg) | kg) | kg) | kg) | kg) |
| 486178 | None | i.v. | 13.5 | 15.4 | 15.2 | 8.1 | 39.5 |
| 1468770 | OKT9 | i.v | 2.2 | 2.5 | 2.4 | 1.6 | 2.8 |
| 1590463 | BCY17901 | i.v. | 2.2 | 2 | 1.9 | 1.2 | N.C |
| 1590463 | BCY17896 | i.v. | 2.6 | 2.9 | 3.3 | 1.4 | N.C |

### Plasma Chemistry Markers

[0451] To evaluate the effect of modified oligonucleotides on liver and kidney function, plasma levels of albumin (ALB), alanine aminotransferase (ALT), aspartate aminotransferase (AST), blood urea nitrogen (BUN), total bilirubin (TBIL), total Protein (PROT), Creatine (CREAT), and Creatine Kinase (CK) were measured on the day the mice were sacrificed (day 15) using an automated clinical chemistry analyzer (Hitachi Olympus AU400c, Melville, NY). The results were averaged for each group of mice and are presented in the tables below. Oligomeric compounds that caused changes in the levels of any of the liver or kidney function markers outside the expected range for modified oligonucleotides were excluded from further studies.

TABLE 31
Plasma chemistry markers in hTFR^{KI/+} knock in mice

| | | Mode | | | | | | | | |
|---|---|---|---|---|---|---|---|---|---|---|
| Com- | | of | Dose | Plasma clinical chemistry | | | | | | |
| pound | Con- | Admin- | (mg/ | ALB | ALT | AST | TBIL | BUN | PROT | CREAT |
| No. | jugate | istration | kg) | (g/dL) | (U/L) | (U/L) | (mg/dL) | (mg/dL) | (g/dL) | (mg/dL) |
| PBS | None | i.v. | 0 | 2.86 | 49 | 121 | 0.17 | 27 | 4.90 | 0.15 |
| 486178 | None | i.v. | 5 | 2.78 | 31 | 83 | 0.12 | 27 | 4.80 | 0.15 |
| | | | 20 | 2.78 | 44 | 114 | 0.13 | 28 | 4.83 | 0.16 |
| | | | 50 | 2.78 | 46 | 115 | 0.14 | 26 | 4.83 | 0.14 |
| 1468770 | OKT9 | i.v. | 1 | 2.85 | 32 | 144 | 0.16 | 25 | 4.90 | 0.15 |
| | | | 3.5 | 2.73 | 34 | 56 | 0.15 | 24 | 4.70 | 0.15 |
| | | | 10 | 2.67 | 43 | 109 | 0.15 | 26 | 4.67 | 0.16 |
| 1590463 | BCY17901 | i.v. | 1 | 2.76 | 65 | 107 | 0.13 | 23 | 4.73 | 0.15 |
| | | | 3.5 | 2.86 | 59 | 206 | 0.13 | 23 | 4.97 | 0.18 |
| | | | 10 | 2.63 | 35 | 98 | 0.14 | 23 | 4.53 | 0.15 |
| 1590463 | BCY17896 | i.v. | 1 | 2.82 | 40 | 111 | 0.12 | 24 | 4.83 | 0.16 |
| | | | 3.5 | 2.77 | 44 | 161 | 0.10 | 22 | 4.70 | 0.16 |
| | | | 10 | 2.70 | 34 | 119 | 0.11 | 22 | 4.57 | 0.16 |
| 1590463 | BCY17896 | s.c. | 3.5 | 2.65 | 71 | 129 | 0.11 | 20 | 4.63 | 0.14 |

### Hematology Assays

[0452] Blood obtained from mice on the day the mice were sacrificed (day 15) were sent to IDEXX BioResearch for measurement of blood cell counts. Counts taken include red blood cell (RBC) count, white blood cell (WBC) count, hemoglobin (HGB), hematocrit (HCT), Mean corpuscular volume (MCV), mean corpuscular hemoglobin (MCH), and mean corpuscularhemoglobin concentration (MCHC). Individual white blood cell counts, such as that of monocytes (MON), neutrophils (NEU), lymphocytes (LYM), eosinophils (EOS), basophils (BAS), reticulocytes, and platelets were evaluated. The results are presented in the tables below. Oligomeric compounds that caused changes in the blood cell count outside the expected range were excluded in further studies.

TABLE 32
Hematology Parameters in hTFR^{KI/+} knock in mice

| Com- | | Mode of | Dose | WBC | RBC | | | | | |
|---|---|---|---|---|---|---|---|---|---|---|
| pound | | Admin- | (mg/ | (10\hat{ }3/ | (10\hat{ }12/ | HGB | HCT | MCV | MCH | MCHC |
| No. | Conjugate | istration | kg) | μL) | L) | (g/dL) | (%) | (fL) | (pg) | (g/dL) |
| PBS | None | i.v. | 0 | 6 | 11 | 14 | 45 | 40 | 13 | 32 |
| 486178 | None | i.v. | 5 | 8 | 12 | 15 | 47 | 41 | 13 | 31 |
| | | | 20 | 7 | 11 | 15 | 46 | 40 | 13 | 32 |
| | | | 50 | 7 | 11 | 15 | 47 | 41 | 13 | 32 |
| 1468770 | OKT9 | i.v. | 1 | 6 | 12 | 15 | 47 | 40 | 13 | 32 |
| | | | 3.5 | 7 | 12 | 15 | 46 | 39 | 12 | 32 |
| | | | 10 | 11 | 12 | 15 | 47 | 40 | 13 | 31 |
| 1590463 | BCY17901 | i.v. | 1 | 7 | 12 | 15 | 48 | 40 | 13 | 31 |
| | | | 3.5 | 7 | 12 | 15 | 48 | 40 | 13 | 32 |
| | | | 10 | 9 | 11 | 15 | 47 | 41 | 13 | 31 |
| 1590463 | BCY17896 | i.v. | 1 | 8 | 12 | 15 | 47 | 40 | 13 | 32 |
| | | | 3.5 | 7 | 12 | 15 | 49 | 41 | 13 | 31 |
| | | | 10 | 9 | 11 | 15 | 47 | 41 | 13 | 31 |
| 1590463 | BCY17896 | s.c. | 3.5 | 10 | 11 | 14 | 47 | 42 | 13 | 31 |

TABLE 33
Blood Cell Counts in hTFR^{KI/+} knock in mice

| Com- | | Mode of | Dose | | | | | | PLT | RETI |
|---|---|---|---|---|---|---|---|---|---|---|
| pound | | Admin- | (mg/ | NEU | LYM | MON | EOS | BAS | (10\hat{ }9/ | (10\hat{ }3/ |
| No. | Conjugate | istration | kg) | (%) | (%) | (%) | (%) | (%) | L) | μL) |
| PBS | None | i.v. | 0 | 9 | 83 | 7 | 2 | 0.03 | 1220 | 422 |
| 486178 | None | i.v. | 5 | 8 | 84 | 6 | 1 | 0.00 | 1240 | 416 |
| | | | 20 | 10 | 80 | 6 | 3 | 0.10 | 1004 | 436 |
| | | | 50 | 12 | 78 | 9 | 1 | 0.03 | 1260 | 417 |
| 1468770 | OKT9 | i.v. | 1 | 9 | 83 | 6 | 2 | 0.20 | 1150 | 440 |
| | | | 3.5 | 8 | 84 | 6 | 2 | 0.13 | 1200 | 452 |
| | | | 10 | 7 | 84 | 6 | 3 | 0.03 | 1117 | 477 |
| 1590463 | BCY17901 | i.v. | 1 | 7 | 86 | 5 | 2 | 0.10 | 1263 | 448 |
| | | | 3.5 | 7 | 86 | 6 | 2 | 0.07 | 1149 | 451 |
| | | | 10 | 10 | 82 | 6 | 2 | 0.03 | 1112 | 417 |
| 1590463 | BCY17896 | i.v. | 1 | 8 | 85 | 5 | 2 | 0.07 | 1170 | 439 |
| | | | 3.5 | 13 | 79 | 5 | 4 | 0.00 | 1073 | 452 |
| | | | 10 | 8 | 84 | 6 | 2 | 0.07 | 1087 | 389 |
| 1590463 | BCY17896 | s.c. | 3.5 | 11 | 79 | 7 | 2 | 0.13 | 1203 | 446 |

### Body and Organ Weights

[0453] Body weights of hTFR^{KI/+} mice were measured on days 1 and 15, and the average body weight for each group is presented in the table below. Liver, kidney, and spleen weights were measured on the day the mice were sacrificed (day 15), and the average organ weights for each group are presented in the tables below. Oligomeric compounds that caused any changes in organ weights outside the expected range for modified oligonucleotides were excluded from further studies.

TABLE 34
Body and organ weights (in grams)

| | | Mode | | | | | | |
|---|---|---|---|---|---|---|---|---|
| | | of | | Body | | | | |
| | | Ad- | | weight | | | | |
| Com- | | min- | Dose | (g) | | Organ weight (g) | | |
| pound | | istra- | (mg/ | Day | Day | | Kid- | |
| No. | Conjugate | tion | kg) | 1 | 15 | Liver | ney | Spleen |
| PBS | | i.v. | 0 | 29 | 30 | 1.64 | 0.38 | 0.07 |
| 486178 | None | i.v. | 5 | 27 | 28 | 1.52 | 0.37 | 0.07 |
| | | | 20 | 28 | 30 | 1.71 | 0.36 | 0.08 |
| | | | 50 | 25 | 28 | 1.53 | 0.33 | 0.07 |
| 1468770 | OKT9 | i.v. | 1 | 25 | 26 | 1.40 | 0.33 | 0.06 |
| | | | 3.5 | 28 | 29 | 1.58 | 0.38 | 0.07 |
| | | | 10 | 28 | 29 | 1.61 | 0.35 | 0.07 |
| 1590463 | BCY17901 | i.v. | 1 | 26 | 27 | 1.49 | 0.36 | 0.07 |
| | | | 3.5 | 36 | 37 | 1.89 | 0.41 | 0.08 |
| | | | 10 | 23 | 25 | 1.35 | 0.35 | 0.07 |
| 1590463 | BCY17896 | i.v. | 1 | 27 | 28 | 1.49 | 0.35 | 0.07 |
| | | | 3.5 | 28 | 29 | 1.53 | 0.37 | 0.07 |
| | | | 10 | 24 | 25 | 1.39 | 0.33 | 0.07 |
| 1590463 | BCY17896 | s.c. | 3.5 | 26 | 27 | 1.50 | 0.35 | 0.08 |

### Example 9: Activity and Tolerability of RNAi Compounds Conjugated to CD71 Bicycle Ligands in hTFR^{KI/+} Knock in Mice

[0454] The activity and tolerability of RNAi compounds conjugated to CD71 bicycle ligands were tested in in hTFR^{KI/+} knock in mice (described herein above). In addition, activity and tolerability of Compound No. 1468770 (described herein above) conjugated to the Fab′ fragments of OKT9 antibody (BioXCell, catalog number: BE0023) that targets human CD71 were tested.

### Treatment

[0455] hTFR^{KI/+} mice were divided into groups of 3 mice each. Each mouse received an intravenous administration of conjugated RNAi compound for a total of 3 doses (on Days 1, 8, and 15) at doses indicated in the table below. A group of 4 mice received PBS as a negative control.

### RNA Analysis

[0456] The mice were sacrificed four days post final administration (on day 19), and RNA was extracted from various muscle tissues (including quadriceps (Quad), tibialis anterior (TA), diaphragm (Dia.), triceps, heart, gastrocnemius (gastroc)), aorta, and liver tissue for quantitative real time RTPCR analysis to measure amount of mouse HPRT RNA using mouse primer probe set RTS43125 (forward sequence CTCCTCAGACCGCTTTTTGC, designated herein as SEQ ID NO: 19; reverse sequence TAACCTGGTTCATCATCGCTAATC, designated herein as SEQ ID NO: 20; probe sequence CCGTCATGCCGACCCGCAGT, designated herein as SEQ ID NO: 21). Results are presented as percent mouse HPRT RNA relative to PBS control, normalized to mouse GAPDH (% control).

TABLE 35
Reduction of mouse HPRT RNA in hTFR^{KI/+} knock in mice with
RNAi compound conjugated to CD71 bicycle ligands

| | | Dose | mouse HPRT RNA (% control) | | | | | | |
|---|---|---|---|---|---|---|---|---|---|
| Compound No. | Conjugate | (mg/kg) | Quad | Gastroc | TA | Triceps | Dia. | Heart | Liver |
| 1453015:1547771 | OKT9 | 3.5 | 23 | 22 | 26 | 24 | 36 | 27 | 13 |
| 1453015:1550983 | BCY17873 | 3.5 | 27 | 24 | 32 | 30 | 48 | 34 | 57 |

### Plasma Chemistry Markers

[0457] To evaluate the effect of modified oligonucleotides on liver and kidney function, plasma levels of albumin (ALB), alanine aminotransferase (ALT), aspartate aminotransferase (AST), blood urea nitrogen (BUN), total bilirubin (TBIL), total Protein (PROT), Creatine (CREAT), and Creatine Kinase (CK) were measured on the day the mice were sacrificed (day 19) using an automated clinical chemistry analyzer (Hitachi Olympus AU400c, Melville, NY). The results were averaged for each group of mice and are presented in the tables below. Oligomeric compounds that caused changes in the levels of any of the liver or kidney function markers outside the expected range for modified oligonucleotides were excluded from further studies.

TABLE 36
Plasma chemistry markers in hTFR^{KI/+} knock in mice

| | | | Plasma clinical chemistry | | | | | | |
|---|---|---|---|---|---|---|---|---|---|
| | | Dose | ALB | ALT | AST | TBIL | BUN | PROT | CREAT |
| Compound No. | Conjugate | (mg/kg) | (g/dL) | (U/L) | (U/L) | (mg/dL) | (mg/dL) | (g/dL) | (mg/dL) |
| PBS | None | 0 | 3.32 | 93 | 220 | 0.20 | 24 | 5.25 | 0.12 |
| 1453015:1547771 | OKT9 | 3.5 | 3.17 | 54 | 219 | 0.19 | 21 | 4.80 | 0.11 |
| 1453015:1550983 | BCY17873 | 3.5 | 3.31 | 39 | 143 | 0.14 | 21 | 5.13 | 0.15 |

### Hematology Assays

[0458] Blood obtained from mice on the day the mice were sacrificed (day 19) were sent to IDEXX BioResearch for measurement of blood cell counts. Counts taken include red blood cell (RBC) count, white blood cell (WBC) count, hemoglobin (HGB), hematocrit (HCT), Mean corpuscular volume (MCV), mean corpuscular hemoglobin (MCH), and mean corpuscular hemoglobin concentration (MCHC). Individual white blood cell counts, such as that of monocytes (MON), neutrophils (NEU), lymphocytes (LYM), eosinophils (EOS), basophils (BAS), reticulocytes, and platelets were evaluated. The results are presented in the tables below. Oligomeric compounds that caused changes in the blood cell count outside the expected range were excluded in further studies.

TABLE 37
Hematology Parameters in hTFR^{KI/+} knock in mice

| | | Dose | WBC | RBC | HGB | HCT | MCV | MCH | MCHC |
|---|---|---|---|---|---|---|---|---|---|
| Compound No. | Conjugate | (mg/kg) | (10\hat{ }3/μL) | (10\hat{ }12/L) | (g/dL) | (%) | (fL) | (pg) | (g/dL) |
| PBS | None | 0 | 7 | 12 | 15 | 46 | 39 | 12 | 32 |
| 1453015:1547771 | OKT9 | 3.5 | 5 | 11 | 14 | 44 | 40 | 13 | 32 |
| 1453015:1550983 | BCY17873 | 3.5 | 9 | 11 | 14 | 45 | 40 | 13 | 31 |

TABLE 38
Blood Cell Counts in hTFR^{KI/+} knock in mice

| | | Dose | NEU | LYM | MON | EOS | BAS | PLT | RETI |
|---|---|---|---|---|---|---|---|---|---|
| Compound No. | Conjugate | (mg/kg) | (%) | (%) | (%) | (%) | (%) | (10\hat{ }9/L) | (10\hat{ }3/μL) |
| PBS | None | 0 | 11 | 83 | 5 | 1.28 | 0.15 | 1095 | 437 |
| 1453015:1547771 | OKT9 | 3.5 | 12 | 82 | 3 | 1.77 | 0.27 | 1039 | 358 |
| 1453015:1550983 | BCY17873 | 3.5 | 10 | 84 | 4 | 1.67 | 0.10 | 939 | 370 |

### Body and Organ Weights

[0459] Body weights of hTFR^{KI/+} mice were measured on days 1 and 19, and the average body weight for each group is presented in the table below. Liver, kidney, and spleen weights were measured on the day the mice were sacrificed (day 19), and the average organ weights for each group are presented in the tables below. Oligomeric compounds that caused any changes in organ weights outside the expected range for modified oligonucleotides were excluded from further studies.

TABLE 39
Body and organ weights (in grams)

| | | Dose | Body weight (g) | | Organ weight (g) | | |
|---|---|---|---|---|---|---|---|
| Compound No. | Conjugate | (mg/kg) | Day 1 | Day 19 | Liver | Kidney | Spleen |
| PBS | None | 0 | 29 | 30 | 1.40 | 0.40 | 0.07 |
| 1453015:1547771 | OKT9 | 3.5 | 21 | 22 | 1.11 | 0.28 | 0.08 |
| 1453015:1550983 | BCY17873 | 3.5 | 23 | 24 | 1.19 | 0.33 | 0.09 |

### Example 10: Design, Activity and Tolerability of Modified Oligonucleotides Conjugated to CD71 Bicycle Ligands in hTFR^{KI/+} Knock in Mice with Various Linker Chemistries

[0460] The activity and tolerability of modified oligonucleotides conjugated to CD71 bicycle ligands was tested in in hTFR^{KI/+} knock in mice (described herein above). Several CD71 bicycle ligands were designed with a C-terminal extension to increase the distance between the oligonucleotide and the polypeptide loops of the bicycle ligand, as indicated in the table below.

TABLE 40
Bicycle ligands

| Bicycle | | N-terminal | C-terminal | SEQ ID |
|---|---|---|---|---|
| Ligand ID | Bicycle Notation (N to C) | modification | modification | NO: |
| BCY19405 | CSPDAHLGCISYCEPW[PEG10][K(N₃)] | acetyl | amidated | 52 |
| BCY19406 | CSPDAHLGCISYCEPW[PEG24][K(N₃)] | acetyl | amidated | 52 |
| BCY19407 | CSPDAHLGCISYCEPWGGSGGS[K(N₃)] | acetyl | amidated | 79 |
| BCY19409 | (CSPDAHLGCISYCEPW)₂-[Biv] | acetyl | amidated | 194 |

[PEG10] represents ten repeats of ethylene glycol; [PEG24] represents 24 repeats of ethylene glycol, and Biv represents the bivalent linker according to the following structure, which is attached to two polypeptides:
Bivalent linker

[chemical structure]

### Treatment

[0461] hTFR^{KI/+} mice were divided into groups of 4 mice each. Each mouse received an intravenous administration of conjugated modified oligonucleotide for a total of 3 doses (on Days 1, 8, and 15) at doses indicated in the table below. A group of 4 mice received an intravenous administration of unconjugated modified oligonucleotide, Compound No. 486178, for a total of 3 doses (on Days 1, 8, and 15) at doses indicated in the table below. A group of 4 mice received PBS as a negative control.

### RNA Analysis

[0462] The mice were sacrificed 7 days post final administration (on day 22), and RNA was extracted from various muscle tissues (including quadriceps (Quad), tibialis anterior (TA), diaphragm (Diaphr), heart, gastrocnemlus (gastroc)), aorta, sciatic nerve, and liver tissue for quantitative real time RTPCR analysis to measure amount of mouse DMPK RNA using mouse primer probe set RTS3181 (described herein above). Results are presented as percent mouse DMPK RNA relative to PBS control, normalized to mouse GAPDH (% ocontrol).

TABLE 41
Reduction of mouse DMPK RNA in hTFR^{KI/+} knock in mice with modified
oligonucleotides conjugated to CD71 bicycle ligands

| | | | | mouse DMPK RNA (% control) | | | | | | |
|---|---|---|---|---|---|---|---|---|---|---|
| Compound | Bicycle | C-terminal | Dose | | | | Sciatic | | | |
| No. | Ligand | extension | (mg/kg) | Quad | Gastroc | TA | Nerve | Diaphr | Heart | Liver |
| PBS | None | None | 0 | 100 | 100 | 100 | 100 | 100 | 100 | 100 |
| 486178 | None | None | 35 | 26 | 26 | 35 | 47 | 20 | 57 | 13 |
| 1590463 | BCY17873 | None | 3.5 | 44 | 48 | 63 | 77 | 29 | 72 | 32 |
| 1590463 | BCY19405 | PEG10 | 3.5 | 44 | 49 | 49 | 75 | 32 | 75 | 32 |
| 1590463 | BCY19406 | PEG24 | 3.5 | 49 | 48 | 61 | 67 | 32 | 72 | 37 |
| 1590463 | BCY19407 | GGSGGS | 3.5 | 37 | 41 | 50 | 78 | 26 | 69 | 35 |
| | | extension | | | | | | | | |
| 1590463 | BCY19409 | Bivalent | 3.5 | 44 | 46 | 52 | 77 | 30 | 63 | 38 |
| | | linker | | | | | | | | |

### Body Weights

[0463] Body weights of hTFR^{KI/+} mice were measured on days 1 and 22, and the average body weight for each group is presented in the table below.

TABLE 42
Body weights (in grams)

| Compound | Bicycle | Peptide | Dose | Body weight (g) | |
|---|---|---|---|---|---|
| No. | Ligand | Linker | (mg/kg) | Day 1 | Day 22 |
| PBS | None | None | 0 | 30 | 30 |
| 486178 | None | None | 35 | 33 | 35 |
| 1590463 | BCY17873 | None | 3.5 | 29 | 30 |
| 1590463 | BCY19405 | PEG10 | 3.5 | 33 | 34 |
| 1590463 | BCY19406 | PEG24 | 3.5 | 34 | 35 |
| 1590463 | BCY19407 | GGSGGS | 3.5 | 31 | 32 |
| | | extension | | | |
| 1590463 | BCY19409 | Bivalent | 3.5 | 28 | 29 |

### Example 11: Activity of Modified Oligonucleotides Conjugated to CD71 Bicycle Ligands in hTFR^{KI/+} Knock in Mice, Single Dose

[0464] The activity of modified oligonucleotides conjugated to CD71 bicycle ligands was tested in heterozygous hTFR^{KI/+} knock in mice (described herein above).

### Treatment

[0465] hTFR^{KI/+} mice were divided into groups of 4 mice each. Each mouse received an intravenous (i.v.) administration of 3.5 mg/kg of conjugated modified oligonucleotide for a total of 3 doses (on Days 1, 8, and 15). A group of 4 mice received an intravenous administration of 35 mg/kg of unconjugated modified oligonucleotide, Compound No. 486178, for a total of 3 doses (on Days 1, 8, and 15). A group of 4 mice received PBS as a negative control.

### RNA Analysis

[0466] The mice were sacrificed one week post final administration (on day 22), and RNA was extracted from various muscle tissues, including quadriceps (quad), tibialis anterior (TA), gastrocnemius (gastroc), heart, and diaphragm, liver tissue, and sciatic nerve for quantitative real time RTPCR analysis to measure amount of mouse DMPK RNA using mouse primer probe set RTS3181 (described herein above). Mouse DMPK RNA levels were normalized to mouse GAPDH. Mouse GAPDH was amplified using mouse primer probe set mGapdh_LTS00102 (described herein above). Results are presented as percent mouse DMPK RNA relative to the amount of mouse DMPK RNA in PBS treated control animals, normalized to mouse GAPDH RNA (% control).

TABLE 43
Reduction of mouse DMPK RNA in hTFR^{KI/+} knock-in mice with modified
oligonucleotides conjugated to CD71 bicycle ligands

| Com- | | | mouse DMPK RNA (% control) | | | | | | |
|---|---|---|---|---|---|---|---|---|---|
| pound | | Dose | | | | | | | Sciatic |
| Number | Ligand | (mg/kg) | Quad | TA | Gastroc | Heart | Diaphragm | Liver | Nerve |
| 486178 | None | 35 | 26 | 35 | 26 | 57 | 20 | 13 | 47 |
| 1590463 | BCY17873 | 3.5 | 44 | 63 | 48 | 72 | 29 | 32 | 77 |
| | BCY19405 | 3.5 | 44 | 49 | 49 | 75 | 32 | 32 | 75 |
| | BCY19406 | 3.5 | 49 | 61 | 48 | 72 | 32 | 37 | 67 |
| | BCY19407 | 3.5 | 37 | 50 | 41 | 69 | 26 | 35 | 78 |
| | BCY19409 | 3.5 | 44 | 52 | 46 | 63 | 30 | 38 | 77 |

### Body Weight

[0467] Body weights of hTFR^{KI/+} mice were measured on days 1 and 22, and the average body weight for each group is presented in the table below.

TABLE 44
Body weight (in grams)

| Compound | | Dose | Body weight (g) | |
|---|---|---|---|---|
| Number | Ligand | (mg/kg) | Day 1 | Day 22 |
| PBS | None | 0 | 30 | 30 |
| 486178 | None | 35 | 33 | 35 |
| 1590463 | BCY17873 | 3.5 | 29 | 30 |
| | BCY19405 | 3.5 | 33 | 34 |
| | BCY19406 | 3.5 | 34 | 35 |
| | BCY19407 | 3.5 | 31 | 32 |
| | BCY19409 | 3.5 | 28 | 29 |

### Example 12: Activity of Modified Oligonucleotides Conjugated to CD71 Bicycle Ligands in hTFR^{I}+ Knock in Mice, Multiple Dose

[0468] The activity and tolerability of modified oligonucleotides conjugated to CD71 bicycle ligands was tested in heterozygous hTFR^{KI/+} knock in mice (described herein above).

### Treatment

[0469] hTFR^{KI/+} knock-in mice were divided into groups of 3 mice each. Each mouse received an intravenous administration of Compound No. 1590463-BCY17901 for a total of 3 doses (on Days 1, 8, and 15) at doses indicated in the tables below. A group of 3 mice received an intravenous administration of unconjugated modified oligonucleotide, Compound No. 486178, for a total of 3 doses (on Days 1, 8, and 15). A group of 4 mice received PBS as a negative control.

### RNA Analysis

[0470] The mice were sacrificed one week post final administration (on day 22), and RNA was extracted from various muscle tissues, including quadriceps (quad), gastrocnemius (gastroc), and heart, for quantitative real time RTPCR analysis to measure amount of mouse DMPK RNA using mouse primer probe set RTS3181 (described herein above). Mouse DMPK RNA levels were normalized to mouse GAPDH. Mouse GAPDH was amplified using mouse primer probe set mGapdh_LTS00102 (described herein above). Results are presented as percent mouse DMPK RNA relative to the amount of mouse DMPK RNA in PBS treated control animals, normalized to mouse GAPDH RNA (% control). ED₅₀ values were calculated in GraphPad Prism using nonlinear fit with variable Hill slope (four parameter), Y=Bottom+(Top-Bottom)/(1+(10\hat{ }log EC50/X)\hat{ }HillSlope), with the following constraints: Top=100, Bottom=0, Hill Slope <−1.

TABLE 45
Reduction of mouse DMPK RNA in hTFR^{KI/+} knock-in mice with modified
oligonucleotides conjugated to CD71 bicycle ligands

| | | | Quad | | Gastroc | | Heart | |
|---|---|---|---|---|---|---|---|---|
| | | | DMPK | | DMPK | | DMPK | |
| Com- | | | RNA | | RNA | | RNA | |
| pound | | Dose | (% | ED₅₀ | (% | ED₅₀ | (% | ED₅₀ |
| No. | Ligand | (mg/kg) | control) | (mg/kg) | control) | (mg/kg) | control) | (mg/kg) |
| PBS | none | 0 | 100 | N/A | 100 | N/A | 100 | N/A |
| 486178 | None | 1 | 96 | 13.7 | 100 | 14.1 | 109‡ | >30 |
| | | 3.5 | 88 | | 89 | | 102 | |
| | | 10 | 58 | | 60 | | 90 | |
| | | 30 | 28 | | 27 | | 73 | |
| 1590463 | BCY17901 | 0.3 | 83 | 1.6 | 83 | 1.5 | 102 | 6.3 |
| | | 1 | 68 | | 66 | | 83 | |
| | | 3.5 | 26 | | 24 | | 57 | |
| | | 10 | 13 | | 13 | | 46 | |

‡indicates that there were fewer than 3 samples available

### Body Weight

[0471] Body weights of hTFR^{KI/+} mice were measured on days 1 and 22, and the average body weight for each group is presented in the table below.

TABLE 46
Body weight (in grams)

| Compound | | Dose | Body weight (g) | |
|---|---|---|---|---|
| No. | Ligand | (mg/kg) | Day 1 | Day 22 |
| PBS | None | 0 | 20 | 22 |
| 486178 | None | 1 | 18 | 20 |
| | | 3.5 | 20 | 21 |
| | | 10 | 19 | 21 |
| | | 30 | 19 | 21 |
| 1590463 | BCY17901 | 0.3 | 20 | 22 |
| | | 1 | 20 | 22 |
| | | 3.5 | 19 | 21 |
| | | 10 | 19 | 21 |

### Example 13: Activity of Modified Oligonucleotides Conjugated to CD71 Bicycle Ligands in Homozygous hTFR^{KI/KI} Knock in Mice, Multiple Dose

[0472] The activity and tolerability of modified oligonucleotides conjugated to CD71 bicycle ligands was tested in homozygous hTFR^{KI/KI} knock in mice Human transferrin receptor (hTFR)/CD71 knock-in mice used in these studies have the coding region of mouse exon 2 as well as the splice donor-site of mouse intron 2 replaced with the human TFR open reading frame according to NCBI transcript NM_001128148.2. Humanization of the transferrin receptor gene was done via CRISPR/Cas-9-mediated gene editing, allowing for generation of a model with constitutive expression of humanized transferrin receptor gene. Targeting strategy was based on NCBI transcripts NM_011638.4 (mouse) and NM_001128148.2 (human). A plasmid allowing expression of Cas9 mRNA, specific gRNA, and the puromycin resistance cassette; and a plasmid containing the homology regions of the mouse transferrin receptor gene, an FRT site, and the replaced human region were co-transfected into the Taconic Biosciences C57BL/6N Tac ES cell line. The homozygous humanized mice are called hTFR^{IK} knock-in mice herein. They express two copies of the humanized TFR gene under the control of the endogenous mouse promoter.

### Treatment

[0473] hTFR^{KI/KI} knock-in mice were divided into groups of 3 mice each. Each mouse received an intravenous administration of Compound No. 1590463-BCY17901 for a total of 3 doses (on Days 1, 8, and 15) at doses indicated in the tables below. A group of 3 mice received an intravenous administration of unconjugated modified oligonucleotide, Compound No. 486178, for a total of 3 doses (on Days 1, 8, and 15). A group of 4 mice received PBS as a negative control.

### RNA Analysis

[0474] The mice were sacrificed one week post final administration (on day 22), and RNA was extracted from various muscle tissues, including quadriceps (quad), gastrocnemius (gastroc), and heart for quantitative real time RTPCR analysis to measure amount of mouse DMPK RNA using mouse primer probe set RTS3181 (described herein above). Mouse DMPK RNA levels were normalized to mouse GAPDH. Mouse GAPDH was amplified using mouse primer probe set mGapdh_LTS00102 (described herein above). Results are presented as percent mouse DMPK RNA relative to the amount of mouse DMPK RNA in PBS treated control animals (as indicated in the tables below), normalized to mouse GAPDH RNA (% control). ED₅₀ values were calculated in GraphPad Prism using nonlinear fit with variable Hill slope (four parameter), Y=Bottom+(Top-Bottom)/(1+(10\hat{ }log EC50/X)\hat{ }HillSlope), with the following constraints: Top=100, Bottom=0, Hill Slope <−1.

TABLE 47
Reduction of mouse DMPK RNA in hTFR^{KI/KI} knock-in mice with modified
oligonucleotides conjugated to CD71 bicycle ligands, data relative to PBS group

| | | | Quad | | Gastroc | | Heart | |
|---|---|---|---|---|---|---|---|---|
| | | | DMPK | | DMPK | | DMPK | |
| Com- | | | RNA | | RNA | | RNA | |
| pound | | Dose | (% | ED₅₀ | (% | ED₅₀ | (% | ED₅₀ |
| No. | Ligand | (mg/kg) | control) | (mg/kg) | control) | (mg/kg) | control) | (mg/kg) |
| PBS | none | 0 | 100 | N/A | 100 | N/A | 100 | N/A |
| 486178 | None | 5 | 86 | 17.6 | 87 | 22.0 | 90 | 43.0 |
| | | 20 | 46 | | 56 | | 66 | |
| | | 50 | 18 | | 21 | | 48 | |
| 1590463 | BCY17901 | 1 | 57 | 1.2 | 66 | 1.5 | 80 | 3.1 |
| | | 3.5 | 16 | | 20 | | 40 | |
| | | 10 | 8 | | 9 | | 28 | |

### Plasma Chemistry Markers

[0475] To evaluate the effect of modified oligonucleotides on liver and kidney function, plasma levels of albumin (ALB), alanine aminotransferase (ALT), aspartate aminotransferase (AST), total bilirubin (TBIL), total Protein (PROT), Creatine (CREAT), and Creatine Kinase (CK) were measured on the day the mice were sacrificed (day 22) using an automated clinical chemistry analyzer (Hitachi Olympus AU400c, Melville, NY). The results were averaged for each group of mice and are presented in the table below.

TABLE 48
Plasma chemistry markers in hTFR^{KI/KI} knock-in mice

| | | | Plasma clinical chemistry | | | | | | |
|---|---|---|---|---|---|---|---|---|---|
| Compound | | Dose | ALB | ALT | AST | TBIL | PROT | CREAT | CK |
| No. | Ligand | (mg/kg) | (g/dL) | (U/L) | (U/L) | (mg/dL) | (g/dL) | (mg/dL) | (U/L) |
| PBS | None | 0 | 3.2 | 31 | 70 | 0.14 | 5.2 | 0.13 | 180 |
| 486178 | None | 5 | 3.2 | 41 | 80 | 0.19 | 5.2 | 0.14 | 197 |
| | | 20 | 2.9 | 30 | 57 | 0.12 | 4.8 | 0.11 | 93 |
| | | 50 | 3.3 | 30 | 111 | 0.12 | 5.0 | 0.13 | 380 |
| 1590463 | BCY17901 | 1 | 3.2 | 47 | 84 | 0.11 | 5.1 | 0.13 | 165 |
| | | 3.5 | 3.3 | 58 | 91 | 0.12 | 5.2 | 0.13 | 176 |
| | | 10 | 3.2 | 27 | 48 | 0.13 | 5.3 | 0.12 | 86 |

### Hematology Assays

[0476] Blood obtained from mice on the day the mice were sacrificed (day 22) were sent to IDEXX BioResearch for measurement of blood cell counts. Counts taken include red blood cell (RBC) count, white blood cell (WBC) count, hemoglobin (HGB), hematocrit (HCT), Mean corpuscular volume (MCV), mean corpuscular hemoglobin (MCH), and mean corpuscular hemoglobin concentration (MCHC). Individual white blood cell counts, such as that of monocytes (MON), neutrophils (NEU), lymphocytes (LYM), eosinophils (EOS), basophils (BAS), and platelets (PLT) were evaluated. The results are presented in the tables below. “N.D.” indicated values that were not determined.

TABLE 49
Hematology Parameters in hTFRK^{KI/KI} knock-in mice

| Com- | | | | | | | | | |
|---|---|---|---|---|---|---|---|---|---|
| pound | | Dose | WBC | RBC | HGB | HCT | MCV | MCH | MCHC |
| No. | Ligand | (mg/kg) | (10³/μL) | (10¹²/L) | (g/dL) | (%) | (fL) | (pg) | (g/dL) |
| PBS | None | 0 | 9 | 5 | 10 | 42 | 83 | 21 | 25 |
| 486178 | None | 5 | 9‡ | 5‡ | 11‡ | 45‡ | 85‡ | 21‡ | 25‡ |
| | | 20 | 8 | 5 | 10 | 42 | 79 | 19 | 25 |
| | | 50 | 7 | 5 | 10 | 40 | 78 | 20 | 26 |
| 1590463 | BCY17901 | 1 | 6 | 5 | 11 | 41 | 85 | 22 | 26 |
| | | 3.5 | 5 | 5 | 11 | 40 | 82 | 21 | 26 |
| | | 10 | 6 | 5 | 11 | 42 | 84 | 22 | 26 |

‡indicates that there were fewer than 3 samples available

TABLE 50
Blood cell counts in hTFR^{KI/KI} knock-in mice

| Com- | | Dose | | | | | | |
|---|---|---|---|---|---|---|---|---|
| pound | | (mg/ | NEU | LYM | MON | EOS | BAS | PLT |
| No. | Ligand | kg) | (%) | (%) | (%) | (%) | (%) | (10⁹/L) |
| PBS | None | 0 | 10 | 83 | 6 | 1.63 | 0.13 | 1851 |
| 486178 | None | 5 | 8‡ | 85‡ | 5‡ | 1.65‡ | 0.10‡ | 1654‡ |
| | | 20 | 9 | 84 | 6 | 1.43 | 0.03 | 1662‡ |
| | | 50 | 8 | 82 | 7 | 1.6 | 0.03 | 1601‡ |
| 1590463 | BCY17901 | 1 | 7 | 88 | 4 | 1.83 | 0.17 | N.D. |
| | | 3.5 | 9 | 84 | 4 | 2.4 | 0.13 | N.D. |
| | | 10 | 12 | 83 | 4 | 1.87 | 0.10 | N.D. |

‡indicates that there were fewer than 3 samples available

### Body and Organ Weights

[0477] Body weights of (hTFR^{KI/KI} mice were measured on days 1 and 22, and the average body weight for each group is presented in the table below. Liver, kidney, and spleen weights were measured on the day the mice were sacrificed (day 22), and the average organ weights for each group are presented in the tables below.

TABLE 51
Body and organ weights (in grams)

| Compound | | Dose | Body weight (g) | |
|---|---|---|---|---|
| No. | Ligand | (mg/kg) | Day 1 | Day 22 |
| PBS | None | 0 | 32 | 32 |
| 486178 | None | 5 | 30 | 30 |
| | | 20 | 30 | 30 |
| | | 50 | 33 | 32 |
| 1590463 | BCY17901 | 1 | 31 | 31 |
| | | 3.5 | 33 | 32 |
| | | 10 | 32 | 31 |

### Example 14: Design of RNAi Compounds Targeted to DMPK

[0478] Antisense strand modified oligonucleotides complementary to mouse DMPK were designed and synthesized as indicated in the table below.

TABLE 52
Design of antisense strand modified oligonucleotides targeted to mouse DMPK

| | | | SEQ |
|---|---|---|---|
| Compound | | | ID |
| No. | Chemistry Notation (5′ to 3′) | Target | NO. |
| 1653456 | vP0-TₑₛA_{fs}G_{yo}AyₒC_{yo}A_{fo}A_{yo}U_{yo}A_{fo}A_{yo}A_{yo}U_{yo}A_{yo}C_{fo}C_{yo}G_{fo}A_{yo}G_{yo}G_{ys}A_{ys}A_{y} | mouse | 173 |
| | | DMPK | |

[0479] In the table above, “vP” represents a 5′ vinyl phosphonate moiety, a subscript “f” represents a 2′-F modified nucleoside, a subscript “y” represents a 2′-OMe modified nucleoside, a subscript “e” represents a 2′ MOE modified nucleoside, a subscript “s” represents a phosphorothioate internucleoside linkage, and a subscript “o” represents a phosphodiester internucleoside linkage.

[0480] The sense oligonucleotide is complementary to the first of the 21 nucleosides of the antisense oligonucleotide (from 5′ to 3′) wherein the last two 3′-nucleosides of the antisense oligonucleotides are not paired with the sense oligonucleotide (are overhanging nucleosides). Modified oligonucleotide Compound No. 1652967 was conjugated to BCY17901 as described herein above.

TABLE 53
Design of sense strand modified oligonucleotides targeted to mouse DMPK

| | | SEQ |
|---|---|---|
| Compound | | ID |
| No. | Chemistry Notation (5′ to 3′) | NO. |
| 1547300 | C_{ys}C_{ys}U_{yo}C_{yo}G_{fo}G_{yo}U_{fo}A_{fo}U_{fo}U_{yo}U_{yo}A_{yo}U_{yo}U_{yo}G_{yo}U_{yo}C_{yo}U_{yo}A_{yo}[3nC7] | 180 |
| | [maleimidC3oyl] | |
| 1652967 | C_{ys}C_{ys}U_{yo}C_{yo}G_{fo}G_{yo}U_{fo}A_{fo}U_{fo}U_{yo}U_{yo}A_{yo}U_{yo}U_{yo}G_{yo}U_{yo}C_{yo}U_{yo}A_{yo}[3nC7][BCN] | 174 |

[0481] In the table above, a subscript “f” represents a 2′-F modified nucleoside, a subscript “y” represents a 2′-OMe modified nucleoside, a subscript “s” represents a phosphorothioate internucleoside linkage, a subscript “o” represents a phosphodiester internucleoside linkage, a “[3nC7]” represents a 3′-C7 amino modifier, a “[BCN]” indicates a (bicyclo[6.1.0]nonyne)-formyl linker, and a “[maleimidC3oyl]” indicates a maleimido propionyl linker.

TABLE 54
Design of sense strand modified
oligonucleotide conjugated to Bicycle ligand

| Conjugated | Unconjugated | |
|---|---|---|
| Compound No. | Compound No. | Ligand |
| 1678385 | 1652967 | BCY17901 |

TABLE 55
Design of RNAi compounds targeted to human/mouse DMPK

| Duplex | Antisense Strand | Sense Strand |
|---|---|---|
| Compound No. | Compound No. | Compound No. |
| 1653456:1547300 | 1653456 | 1547300 |
| 1653456:1678385 | 1653456 | 1678385 |

### Example 15: Activity of Modified Oligonucleotides Conjugated to CD71 Bicycle Ligands in hTFR^{KI/+} Knock in Mice, Multiple Dose

[0482] The activity and tolerability of modified oligonucleotides conjugated to CD71 bicycle ligands was tested in heterozygous hTFR^{KI/+} knock in mice (described herein above).

### Treatment

[0483] hTFR^{KI/+} knock-in mice were divided into groups of 3 mice each. Each mouse received an intravenous administration of Compound 1590463-BCY17901 for a total of 3 doses (on Days 1, 8, and 15) at doses indicated in the tables below. A group of 3 mice received an intravenous administration of unconjugated modified oligonucleotide, Compound No. 486178, for a total of 3 doses (on Days 1, 8, and 15). A group of 4 mice received PBS as a negative control.

### RNA Analysis

[0484] The mice were sacrificed one week post final administration (on day 22), and RNA was extracted from various muscle tissues, including quadriceps (quad), gastrocnemius (gastroc), heart, and diaphragm, and liver tissue for quantitative real time RTPCR analysis to measure amount of mouse DMPK RNA using mouse primer probe set RTS3181 (described herein above). Mouse DMPK RNA levels were normalized to mouse GAPDH. Mouse GAPDH was amplified using mouse primer probe set mGapdh_LTS00102 (described herein above). Results are presented as percent mouse DMPK RNA relative to the amount of mouse DMPK RNA in PBS treated control animals, normalized to mouse GAPDH RNA (% control). ED₅₀ values were calculated in GraphPad Prism using nonlinear fit with variable Hill slope (four parameter), Y=Bottom+(Top-Bottom)/(1+(10\hat{ }log EC50/X)\hat{ }HillSlope), with the following constraints: Top=100, Bottom=0, Hill Slope <−1.

TABLE 56
Reduction of mouse DMPK RNA in hTFR^{KI/+} knock-in mice with modified
oligonucleotides conjugated to CD71 bicycle ligands

| | | | Quad | | Gastroc | | Diaphragm | |
|---|---|---|---|---|---|---|---|---|
| | | | DMPK | | DMPK | | DMPK | |
| Com- | | | RNA | | RNA | | RNA | |
| pound | | Dose | (% | ED₅₀ | (% | ED₅₀ | (% | ED₅₀ |
| No. | Ligand | (mg/kg) | control) | (mg/kg) | control) | (mg/kg) | control) | (mg/kg) |
| 486178 | None | 3.5 | 78 | 10.5 | 82 | 11.22 | 70 | 8.30 |
| | | 20 | 32 | | 31 | | 29 | |
| | | 50 | 15 | | 16 | | 15 | |
| 1590463 | BCY17901 | 1 | 57 | 1.28 | 56 | 1.24 | 57 | 1.34 |
| | | 3.5 | 25 | | 25 | | 27 | |
| | | 10 | 12 | | 12 | | 14 | |

TABLE 57
Reduction of mouse DMPK RNA in hTFR^{KI/+} knock-in mice with
modified oligonucleotides conjugated to CD71 bicycle ligands

| | | | Heart | | Liver | |
|---|---|---|---|---|---|---|
| | | | DMPK | | DMPK | |
| Com- | | | RNA | | RNA | |
| pound | | Dose | (% | ED₅₀ | (% | ED₅₀ |
| No. | Ligand | (mg/kg) | control) | (mg/kg) | control) | (mg/kg) |
| 486178 | None | 3.5 | 90 | 47.75 | 39 | <3.5 |
| | | 20 | 67 | | 18 | |
| | | 50 | 53 | | 10 | |
| 1590463 | BCY17901 | 1 | 89 | 5.45 | 42 | <3.5 |
| | | 3.5 | 56 | | 26 | |
| | | 10 | 38 | | 14 | |

### Plasma Chemistry Markers

[0485] To evaluate the effect of modified oligonucleotides on liver and kidney function, plasma levels of albumin (ALB), alanine aminotransferase (ALT), aspartate aminotransferase (AST), total bilirubin (TBIL), blood urea nitrogen (BUN), total Protein (PROT), Creatine (CREAT), and Creatine Kinase (CK) were measured on the day the mice were sacrificed (day 22) using an automated clinical chemistry analyzer (Hitachi Olympus AU400c, Melville, NY). The results were averaged for each group of mice and are presented in the table below.

TABLE 58
Plasma chemistry markers in hTFR^{KI/+} knock-in mice

| Com- | | | Plasma clinical chemistry | | | | | | | |
|---|---|---|---|---|---|---|---|---|---|---|
| pound | | Dose | ALB | ALT | AST | TBIL | BUN | PROT | CREAT | CK |
| No. | Ligand | (mg/kg) | (g/dL) | (U/L) | (U/L) | (mg/dL) | (mg/dL) | (g/dL) | (mg/dL) | (U/L) |
| PBS | None | 0 | 3.2 | 34 | 70 | 0.14 | 23 | 5.2 | 0.16 | 99 |
| 486178 | None | 3.5 | 3.1 | 26 | 75 | 0.12 | 22 | 5.0 | 0.12 | 116 |
| | | 20 | 3.0 | 30 | 85 | 0.16 | 22 | 5.0 | 0.16 | 128 |
| | | 50 | 3.1 | 26 | 65 | 0.12 | 21 | 5.1 | 0.14 | 96 |
| 1590463 | BCY17901 | 1 | 3.1 | 55 | 123 | 0.12 | 24 | 5.1 | 0.13 | 193 |
| | | 3.5 | 2.9 | 38 | 93 | 0.11 | 20 | 4.8 | 0.14 | 167 |
| | | 10 | 3.0 | 42 | 80 | 0.16 | 23 | 4.9 | 0.13 | 88 |

### Hematology Assays

[0486] Blood obtained from mice on the day the mice were sacrificed (day 22) were sent to IDEXX BioResearch for measurement of blood cell counts. Counts taken include red blood cell (RBC) count, white blood cell (WBC) count, hemoglobin (HGB), hematocrit (HCT), Mean corpuscular volume (MCV), mean corpuscular hemoglobin (MCH), and mean corpuscular hemoglobin concentration (MCHC). Individual white blood cell counts, such as that of monocytes (MON), neutrophils (NEU), lymphocytes (LYM), eosinophils (EOS), basophils (BAS), and platelets (PLT) were evaluated. The results are presented in the tables below.

TABLE 59
Hematology Parameters in hTFR^{KI/+} knock-in mice

| Compound | | Dose | WBC | RBC | HGB | HCT | MCV | MCH | MCHC |
|---|---|---|---|---|---|---|---|---|---|
| No. | Ligand | (mg/kg) | (10³/μL) | (10¹²/L) | (g/dL) | (%) | (fL) | (pg) | (g/dL) |
| PBS | None | 0 | 4.5 | 10 | 13 | 40 | 39 | 13 | 33 |
| 486178 | None | 3.5 | 3.4 | 10 | 13 | 40 | 39 | 13 | 33 |
| | | 20 | 5.1 | 10 | 13 | 40 | 39 | 13 | 34 |
| | | 50 | 7.0 | 11 | 14 | 41 | 38 | 13 | 34 |
| 1590463 | BCY17901 | 1 | 5.9 | 10 | 13 | 41 | 39 | 13 | 33 |
| | | 3.5 | 6.0 | 11 | 14 | 40 | 37 | 13 | 34 |
| | | 10 | 5.3 | 11 | 14 | 41 | 38 | 13 | 33 |

TABLE 60
Blood cell counts in hTFR^{KI/+} knock-in mice

| Compound | | Dose | NEU | LYM | MON | EOS | BAS | PLT | RETI |
|---|---|---|---|---|---|---|---|---|---|
| No. | Ligand | (mg/kg) | (%) | (%) | (%) | (%) | (%) | (10⁹/L) | (10³/μL) |
| PBS | None | 0 | 12 | 82 | 5 | 1.33 | 0.13 | 1242 | 361 |
| 486178 | None | 3.5 | 10 | 80 | 7 | 1.73 | 0.10 | 1057 | 368 |
| | | 20 | 9 | 86 | 5 | 0.83 | 0.10 | 1151 | 411 |
| | | 50 | 10 | 81 | 8 | 1.40 | 0.10 | 929 | 413 |
| 1590463 | BCY17901 | 1 | 7 | 88 | 4 | 0.43 | 0.07 | 1495 | 464 |
| | | 3.5 | 7 | 87 | 4 | 1.37 | 0.30 | 1233 | 361 |
| | | 10 | 8 | 85 | 6 | 0.27 | 0.13 | 1183 | 421 |

### Body Weight

[0487] Body weights of hTFR^{KI/+} mice were measured on days 1 and 22, and the average body weight for each group is presented in the table below.

TABLE 61
Body weight (in grams)

| Compound | | Dose | Body weight (g) | |
|---|---|---|---|---|
| No. | Ligand | (mg/kg) | Day 1 | Day 22 |
| PBS | None | 0 | 30 | 29 |
| 486178 | None | 3.5 | 29 | 29 |
| | | 20 | 28 | 29 |
| | | 50 | 31 | 34 |
| 1590463 | BCY17901 | 1 | 31 | 32 |
| | | 3.5 | 27 | 26 |
| | | 10 | 25 | 26 |

### Example 16: Activity of RNAi Compounds Conjugated to CD71 Bicycle Ligands in hTFR^{KI/+} Knock in Mice, Multiple Dose

[0488] The activity of RNAi Compound No. 1653456:1547300 conjugated to CD71 a bicycle ligand was tested in in heterozygous hTFR^{KI/+} knock in mice (described herein above). In addition, activity of Compound No. 1653456:1547300 (described herein above) conjugated to the Fab′ fragments of OKT9 antibody (BioXCell, catalog number: BE0023) that targets human CD71 was tested.

### Treatment

[0489] hTFR^{KI/+} knock-in mice were divided into groups of 3-4 mice each. A group of 3 mice received an intravenous administration of conjugated RNAi Compound 1653456:1547300-OKT9 Fab, for a total of 3 doses (on Days 1, 8, and 15). A group of 3 mice received an intravenous administration of conjugated RNAi Compound 1653456:1678385 for a total of 3 doses (on Days 1, 8, and 15) at doses indicated in the tables below. A group of 4 mice received a subcutaneous administration of conjugated RNAi Compound 1653456:1678385 for a total of 3 doses (on Days 1, 8, and 15) at 10 mg/kg. A group of 4 mice received PBS as a negative control.

### RNA Analysis

[0490] The mice were sacrificed one week post final administration (on day 22), and RNA was extracted from various muscle tissues, including quadriceps (quad), gastrocnemius (gastroc), heart, and diaphragm, and liver tissue for quantitative real time RTPCR analysis to measure amount of mouse DMPK RNA using mouse primer probe set RTS3181 (described herein above). Mouse DMPK RNA levels were normalized to mouse GAPDH. Mouse GAPDH was amplified using mouse primer probe set mGapdh_LTS00102 (described herein above). Results are presented as percent mouse DMPK RNA relative to the amount of mouse DMPK RNA in PBS treated control animals, normalized to mouse GAPDH RNA (% control). ED₅₀ values were calculated in GraphPad Prism using nonlinear fit with variable Hill slope (four parameter), Y=Bottom+(Top-Bottom)/(1+(10\hat{ }log EC50/X)\hat{ }HillSlope), with the following constraints: Top=100, Bottom=0, Hill Slope <−1. “N.C.” indicates that a value was not calculated.

TABLE 62
Reduction of mouse DMPK RNA in hTFR^{KI/+} knock-in mice with modified oligonucleotides conjugated to
CD71 bicycle ligands

| | | | | Quad | | Gastroc | | | |
|---|---|---|---|---|---|---|---|---|---|
| | | | | DMPK | | DMPK | | Diaphragm | |
| | | | | RNA | | RNA | | DMPK | |
| | | Mode of | Dose | (% | ED₅₀ | (% | ED₅₀ | RNA | ED₅₀ |
| Compound No. | Ligand | Administration | (mg/kg) | control) | (mg/kg) | control) | (mg/kg) | (% control) | (mg/kg) |
| 1653456:1547300 | OKT9 | i.v. | 1 | 30 | <1 | 29 | <1 | 31 | <1 |
| | | | 3.5 | 22 | | 21 | | 25 | |
| | | | 10 | 20 | | 19 | | 22 | |
| 1653456:1678385 | BCY17901 | i.v. | 1 | 36 | <1 | 35 | <1 | 37 | <1 |
| | | | 3.5 | 23 | | 22 | | 28 | |
| | | | 10 | 25 | | 26 | | 27 | |
| 1653456:1678385 | BCY17901 | s.c. | 10 | 22 | N.C. | 21 | N.C. | 29 | N.C. |

TABLE 63
Reduction of mouse DMPK RNA in hTFR^{KI/+} knock-in mice with modified oligonucleotides conjugated to
CD71 bicycle ligands

| | | | | Heart | | Liver | |
|---|---|---|---|---|---|---|---|
| | | | | DMPK | | DMPK | |
| | | Mode of | Dose | RNA (% | ED₅₀ | RNA (% | ED₅₀ |
| Compound No. | Ligand | Administration | (mg/kg) | control) | (mg/kg) | control) | (mg/kg) |
| 1653456:1547300 | OKT9 | i.v. | 1 | 47 | 1.56 | 64 | 3.80 |
| | | | 3.5 | 35 | | 55 | |
| | | | 10 | 34 | | 37 | |
| 1653456:1678385 | BCY17901 | i.v. | 1 | 69 | 3.16 | 98 | >10 |
| | | | 3.5 | 41 | | 69 | |
| | | | 10 | 40 | | 76 | |
| 1653456:1678385 | BCY17901 | s.c. | 10 | 44 | N.C. | 78 | N.C. |

### Plasma Chemistry Markers

[0491] To evaluate the effect of modified oligonucleotides on liver and kidney function, plasma levels of albumin (ALB), alanine aminotransferase (ALT), aspartate aminotransferase (AST), total bilirubin (TBIL), blood urea nitrogen (BUN), total Protein (PROT), Creatine (CREAT), and Creatine Kinase (CK) were measured on the day the mice were sacrificed (day 22) using an automated clinical chemistry analyzer (Hitachi Olympus AU400c, Melville, NY). The results were averaged for each group of mice and are presented in the table below.

TABLE 64
Plasma chemistry markers in hTFR^{KI/+} knock-in mice

| | | | | Plasma clinical chemistry | | | | | | | |
|---|---|---|---|---|---|---|---|---|---|---|---|
| | | Mode of | Dose | ALB | ALT | AST | TBIL | BUN | PROT | CREAT | CK |
| Compound No. | Ligand | Administration | (mg/kg) | (g/dL) | (U/L) | (U/L) | (mg/dL) | (mg/dL) | (g/dL) | (mg/dL) | (U/L) |
| PBS | None | i.v. | 0 | 3.2 | 34 | 70 | 0.14 | 23 | 5.2 | 0.16 | 99 |
| 1653456:1547300 | OKT9 | i.v. | 1 | 3.0 | 25 | 79 | 0.14 | 20 | 5.0 | 0.11 | 124 |
| | | | 3.5 | 3.1 | 46 | 88 | 0.11 | 26 | 5.1 | 0.14 | 99 |
| | | | 10 | 3.1 | 34 | 97 | 0.13 | 18 | 5.1 | 0.15 | 192 |
| 1653456:1678385 | BCY17901 | i.v. | 1 | 3.3 | 25 | 115 | 0.12 | 22 | 5.3 | 0.12 | 247 |
| | | | 3.5 | 3.0 | 38 | 116 | 0.13 | 26 | 5.0 | 0.11 | 251 |
| | | | 10 | 3.2 | 27 | 76 | 0.14 | 21 | 5.2 | 0.13 | 119 |
| 1653456:1678385 | BCY17901 | s.c. | 10 | 3.1 | 24 | 78 | 0.14 | 19 | 4.9 | 0.13 | 117 |

### Hematology Assays

[0492] Blood obtained from mice on the day the mice were sacrificed (day 22) were sent to IDEXX BioResearch for measurement of blood cell counts. Counts taken include red blood cell (RBC) count, white blood cell (WBC) count, hemoglobin (HGB), hematocrit (HCT), Mean corpuscular volume (MCV), mean corpuscular hemoglobin (MCH), and mean corpuscular hemoglobin concentration (MCHC). Individual white blood cell counts, such as that of monocytes (MON), neutrophils (NEU), lymphocytes (LYM), eosinophils (EOS), basophils (BAS), and platelets (PLT) were evaluated. The results are presented in the tables below.

TABLE 65
Hematology Parameters in hTFR^{KI/+} knock-in mice

| | | Mode of | Dose | WBC | RBC | HGB | HCT | MCV | MCH | MCHC |
|---|---|---|---|---|---|---|---|---|---|---|
| Compound No. | Ligand | Administration | (mg/kg) | 10³/μL) | (10¹²/L) | (g/dL) | (%) | (fL) | (pg) | (g/dL) |
| PBS | None | i.v. | 0 | 4.5 | 10 | 13 | 40 | 39 | 13 | 33 |
| 1653456:1547300 | OKT9 | i.v. | 1 | 4.4 | 11 | 14 | 40 | 38 | 13 | 34 |
| | | | 3.5 | 6.9 | 11 | 14 | 40 | 37 | 13 | 34 |
| | | | 10 | 4.1 | 11 | 13 | 40 | 37 | 13 | 34 |
| 1653456:1678385 | BCY17901 | i.v. | 1 | 5.3 | 11 | 13 | 41 | 38 | 13 | 33 |
| | | | 3.5 | 5.4 | 10 | 13 | 40 | 38 | 13 | 33 |
| | | | 10 | 4.5 | 11 | 14 | 41 | 37 | 13 | 34 |
| 1653456:1678385 | BCY17901 | s.c. | 10 | 4.8 | 10 | 13 | 40 | 39 | 12 | 33 |

TABLE 66
Blood cell counts in hTFR^{KI/+} knock-in mice

| | | Mode | | | | | | | | |
|---|---|---|---|---|---|---|---|---|---|---|
| | | of | Dose | NEU | LYM | MON | EOS | BAS | PLT | RETI |
| Compound No. | Ligand | Admin. | (mg/kg) | (%) | (%) | (%) | (%) | (%) | (10⁹/L) | (10³/μL) |
| PBS | None | i.v. | 0 | 12.0 | 82 | 5 | 1.33 | 0.13 | 1242 | 361 |
| 1653456:1547300 | OKT9 | i.v. | 1 | 10.8 | 82 | 6 | 0.33 | 0.07 | 1065 | 430 |
| | | | 3.5 | 9.4 | 83 | 6 | 1.27 | 0.13 | 1117 | 412 |
| | | | 10 | 10.0 | 82 | 7 | 1.20 | 0.23 | 1268 | 430 |
| 1653456:1678385 | BCY17901 | i.v. | 1 | 6.8 | 87 | 5 | 1.13 | 0.10 | 1043 | 393 |
| | | | 3.5 | 9.9 | 86 | 4 | 0.43 | 0.00 | 887 | 367 |
| | | | 10 | 9.1 | 85 | 5 | 1.03 | 0.17 | 1090 | 396 |
| 1653456:1678385 | BCY17901 | s.c. | 10 | 5.8 | 88 | 5 | 0.63 | 0.15 | 1368 | 389 |

### Body Weight

[0493] Body weights of hTFR^{KI/+} mice were measured on days 1 and 22, and the average body weight for each group is presented in the table below.

TABLE 67
Body weight (in grams)

| | | | | Body weight | |
|---|---|---|---|---|---|
| | | Mode of | Dose | (g) | |
| Compound No. | Ligand | Administration | (mg/kg) | Day 1 | Day 22 |
| PBS | None | i.v. | 0 | 30 | 29 |
| 1653456:1547300 | OKT9 Fab′ | i.v. | 1 | 30 | 29 |
| | | | 3.5 | 34 | 33 |
| | | | 10 | 29 | 29 |
| 1653456:1678385 | BCY17901 | i.v. | 1 | 28 | 28 |
| | | | 3.5 | 32 | 31 |
| | | | 10 | 26 | 26 |
| 1653456:1678385 | BCY17901 | s.c. | 10 | 28 | 28 |

### Example 17: Design of RNAi Compounds Targeted to DMPK Conjugated to CD71 Bicycle Ligands

[0494] A sense modified oligonucleotide was designed and synthesized as indicated in the table below. The sense oligonucleotide is complementary to the first of the 21 nucleosides (from 5′ to 3′) of the antisense oligonucleotide Compound No. 1653456 (described herein above), wherein the last two 3′-nucleosides of the antisense oligonucleotides are not paired with the sense oligonucleotide (are overhanging nucleosides).

TABLE 68
Design of sense strand modified oligonucleotides targeted to mouse DMPK

| | | SEQ |
|---|---|---|
| Compound | | ID |
| No. | Chemistry Notation (5′ to 3′) | NO. |
| 1709195 | [BCN][nC60]ₒC_{ys}C_{ys}U_{yo}C_{yo}G_{fo}G_{yo}U_{fo}A_{fo}U_{fo}U_{yo}U_{yo}A_{yo}U_{yo}U_{yo}G_{yo}U_{yo}C_{ys}U_{ys}A_{y} | 189 |

[0495] In the table above, a subscript “f” represents a 2′-F modified nucleoside, a subscript “y” represents a 2′-OMe modified nucleoside, a subscript “s” represents a phosphorothioate internucleoside linkage, a subscript “o” represents a phosphodiester internucleoside linkage, a “[nC6o]” indicates a 6-aminohexanol linker, and a “[BCN]” indicates a (bicyclo[6.1.0]nonyne)-formyl linker.

[0496] Modified oligonucleotide Compound Nos. 1709195 and 1590463 were further conjugated to BCY17901 as described in the table below.

TABLE 69
Design of sense strand modified
oligonucleotide conjugated to Bicycle ligand

| Conjugated | Unconjugated | |
|---|---|---|
| Compound No. | Compound No. | Ligand |
| 1709196 | 1709195 | BCY17901 |

TABLE 70
Design of RNAi compounds targeted to human/mouse DMPK

| Duplex | Antisense Strand | Sense Strand |
|---|---|---|
| Compound No. | Compound No. | Compound No. |
| 1710872 | 1653456 | 1709196 |
| 1678710 | 1653456 | 1678385 |

### Example 18: Activity of Modified Oligonucleotides Conjugated to CD71 Bicycle Ligands in Heterozygous hTFR^{KI/+} Knock in Mice, Multiple Dose

[0497] The activity and tolerability of modified oligonucleotides conjugated to CD71 bicycle ligands was tested in in heterozygous hTFR^{KI/+} knock in mice (described herein above).

### Treatment

[0498] hTFR^{KI/+} knock in mice were divided into groups of 3 mice each. Each mouse received an intravenous (i.v.) administration or subcutaneous (s.c.) administration of conjugated modified oligonucleotide for a total of 3 doses (on Days 1, 8, and 15) at doses indicated in the tables below. A group of 3 mice received a subcutaneous administration of unconjugated modified oligonucleotide, Compound No. 486178, for a total of 3 doses (on Days 1, 8, and 15). A group of 4 mice received PBS as a negative control.

### RNA Analysis

[0499] The mice were sacrificed one week post final administration (on day 22), and RNA was extracted from various muscle tissues (including quadriceps (quad), gastrocnemius (gastroc), heart, liver) for quantitative real time RTPCR analysis to measure amount of mouse DMPK RNA using mouse primer probe set RTS3181 (described herein above). Mouse DMPK RNA levels were normalized to mouse GAPDH. Mouse GAPDH was amplified using mouse primer probe set mGapdh_LTS00102 (described herein above). Results are presented as percent mouse DMPK RNA relative to the amount of mouse DMPK in PBS treated control animals, normalized to mouse GAPDH RNA (% control). ED₅₀ values were calculated in GraphPad Prism using nonlinear fit with variable Hill slope (four parameter), Y=Bottom+(Top-Bottom)/(1+(10\hat{ }log EC50/X)\hat{ }HillSlope), with the following constraints: Top=100, Bottom=0, Hillslope <−1.

TABLE 71
Reduction of mouse DMPK RNA in hTFR^{KI/+} knock in mice with modified oligonucleotides conjugated to
CD71 bicycle ligands

| | | | | | Quad | | Liver | |
|---|---|---|---|---|---|---|---|---|
| | | | | | DMPK | | DMPK | |
| Conjugated | Unconjugated | | | | RNA | | RNA | |
| Compound | Compound | | Route of | Dose | (% | ED₅₀ | (% | ED₅₀ |
| No. | No. | Ligand | Administration | (mg/kg) | control) | (mg/kg) | control) | (mg/kg) |
| N/A | 486178 | None | s.c. | 3.5 | 92 | 16.2 | 34 | 2.0 |
| | | | | 20 | 40 | | 14 | |
| | | | | 50 | 19 | | 9 | |
| 1666846 | 1590463 | BCY17901 | s.c. | 1 | 76 | 3.3 | 48 | 1.3 |
| | | | | 3.5 | 53 | | 34 | |
| | | | | 10 | 18 | | 20 | |
| | | | i.v. | 1 | 62 | 1.4 | 50 | 1.1 |
| | | | | 3.5 | 22 | | 25 | |
| | | | | 10 | 13 | | 20 | |

TABLE 72
Reduction of mouse DMPK RNA in hTFR^{KI/+} knock in mice with modified oligonucleotides conjugated to
CD71 bicycle ligands

| | | | | | Gastroc | | Heart | |
|---|---|---|---|---|---|---|---|---|
| | | | | | DMPK | | DMPK | |
| Conjugated | Unconjugated | | | | RNA | | RNA | |
| Compound | Compound | | Route of | Dose | (% | ED₅₀ | (% | ED₅₀ |
| No. | No. | Ligand | Administration | (mg/kg) | control) | (mg/kg) | control) | (mg/kg) |
| N/A | 486178 | None | s.c. | 3.5 | 92 | 15.7 | 101 | >50 |
| | | | | 20 | 39 | | 75 | |
| | | | | 50 | 19 | | 55 | |
| 1666846 | 1590463 | BCY17901 | s.c. | 1 | 73 | 2.7 | 98 | 9.9 |
| | | | | 3.5 | 47 | | 84 | |
| | | | | 10 | 16 | | 50 | |
| | | | i.v. | 1 | 54 | 1.1 | 85 | 6.6 |
| | | | | 3.5 | 22 | | 53 | |
| | | | | 10 | 13 | | 52 | |

### Body Weights

[0500] Body weights of hTFR^{KI/+} mice were measured on days 1 and 22, and the average body weight for each group is presented in the table below.

TABLE 73
Body weights (in grams)

| Conjugated | Unconjugated | | | Dose | Body weight | |
|---|---|---|---|---|---|---|
| Compound | Compound | | Route of | (mg/ | (g) | |
| No. | No. | Ligand | Administration | kg) | Day 1 | Day 22 |
| N/A | PBS | None | s.c. | 0 | 24 | 24 |
| N/A | 486178 | None | s.c. | 3.5 | 28 | 28 |
| | | | | 20 | 26 | 26 |
| | | | | 50 | 26 | 27 |
| 1666846 | 1590463 | BCY17901 | s.c. | 1 | 23 | 23 |
| | | | | 3.5 | 24 | 24 |
| | | | | 10 | 26 | 26 |
| | | | i.v. | 1 | 30 | 30 |
| | | | | 3.5 | 30 | 28 |
| | | | | 10 | 27 | 27 |

### Example 19: Activity and Tolerability of RNAi Compounds Conjugated to CD71 Bicycle Ligands in Heterozygous hTFR^{KI/+} Knock in Mice, Multiple Dose

[0501] The activity and tolerability of RNAi compounds conjugated to CD71 bicycle ligands was tested in in heterozygous hTFR^{KI/+} knock in mice (described herein above).

### Treatment

[0502] hTFR^{KI/+} knock in mice were divided into groups of 3 mice each. Each mouse received an intravenous (i.v.) administration or subcutaneous (s.c.) administration of conjugated RNAi compound for a total of 3 doses (on Days 1, 8, and 15) at doses indicated in the tables below. A group of 4 mice received PBS as a negative control.

### RNA Analysis

[0503] The mice were sacrificed one week post final administration (on day 22), and RNA was extracted from various muscle tissues (including quadriceps (quad), gastrocnemius (gastroc), heart, liver) for quantitative real time RTPCR analysis to measure amount of mouse DMPK RNA using mouse primer probe set RTS3181 (described herein above). Mouse DMPK RNA levels were normalized to mouse GAPDH. Mouse GAPDH was amplified using mouse primer probe set mGapdh_LTS00102 (described herein above). Results are presented as percent mouse DMPK RNA relative to the amount of mouse DMPK in PBS treated control animals, normalized to mouse GAPDH RNA (% control). ED₅₀ values were calculated in GraphPad Prism using nonlinear fit with variable Hill slope (four parameter), Y=Bottom+(Top-Bottom)/(1+(10\hat{ }log EC50/X)\hat{ }HillSlope), with the following constraints: Top=100, Bottom=0, Hillslope <−1.

TABLE 74
Reduction of mouse DMPK RNA in hTFR^{KI/+} knock in mice with RNAi compounds conjugated to CD71
bicycle ligands

| | | | | | Quad | | Liver | |
|---|---|---|---|---|---|---|---|---|
| | | | | | DMPK | | DMPK | |
| Conjugated | | | | | RNA | | RNA | |
| Compound | Unconjugated | | Route of | Dose | (% | ED₅₀ | (% | ED₅₀ |
| No. | Compound No. | Ligand | Administration | (mg/kg) | control) | (mg/kg) | control) | (mg/kg) |
| 1678710 | 1653456: | BCY17901 | s.c. | 0.1 | 85 | 0.7 | 107 | >10 |
| | 1652967 | | | 0.3 | 65 | | 106 | |
| | | | | 1 | 41 | | 87 | |
| | | | | 3.5 | 24‡ | | 106 | |
| | | | | 10 | 22 | | 94 | |
| | | | i.v. | 0.1 | 70 | 0.5 | 96 | >10 |
| | | | | 0.3 | 55 | | 125 | |
| | | | | 1 | 36 | | 88 | |
| | | | | 3.5 | 28 | | 93 | |
| | | | | 10 | 25 | | 88 | |
| 1710872 | 1653456:1709195 | BCY17901 | i.v. | 0.1 | 81 | 0.5 | 106 | >10 |
| | | | | 0.3 | 57 | | 118 | |
| | | | | 1 | 31 | | 112 | |
| | | | | 3.5 | 27 | | 77 | |
| | | | | 10 | 21 | | 92 | |

‡indicates that there were fewer than 3 samples available

TABLE 75
Reduction of mouse DMPK RNA in hTFR^{KI/+} knock in mice with modified oligonucleotides
conjugated to CD71 bicycle ligands

| | | | | | Gastroc | | Heart | |
|---|---|---|---|---|---|---|---|---|
| | | | | | DMPK | | DMPK | |
| Conjugated | | | | | RNA | | RNA | |
| Compound | Unconjugated | | Route of | Dose | (% | ED₅₀ | (% | ED₅₀ |
| No. | Compound No. | Ligand | Administration | (mg/kg) | control) | (mg/kg) | control) | (mg/kg) |
| 1678710 | 1653456: | BCY17901 | s.c. | 0.1 | 77 | 0.6 | 98 | 5.5 |
| | 1652967 | | | 0.3 | 63 | | 85 | |
| | | | | 1 | 37 | | 76 | |
| | | | | 3.5 | 22 | | 55 | |
| | | | | 10 | 21 | | 49 | |
| | | | i.v. | 0.1 | 66 | 0.4 | 90 | 3.9 |
| | | | | 0.3 | 53 | | 91 | |
| | | | | 1 | 34 | | 66 | |
| | | | | 3.5 | 27 | | 50 | |
| | | | | 10 | 23 | | 43 | |
| 1710872 | 1653456:1709195 | BCY17901 | i.v. | 0.1 | 68 | 0.4 | 98 | 4.9 |
| | | | | 0.3 | 52 | | 89 | |
| | | | | 1 | 29 | | 78 | |
| | | | | 3.5 | 25 | | 49 | |
| | | | | 10 | 20 | | 48 | |

### Plasma Chemistry Markers

[0504] To evaluate the effect of modified oligonucleotides on liver and kidney function, plasma levels of albumin (ALB), alanine aminotransferase (ALT), aspartate aminotransferase (AST), total bilirubin (TBIL), total Protein (PROT), Creatine (CREAT), Iron, and Creatine Kinase (CK) were measured on the day the mice were sacrificed (day 18) using an automated clinical chemistry analyzer (Hitachi Olympus AU400c, Melville, NY). The results were averaged for each group of mice and are presented in the table below.

TABLE 76
Plasma chemistry markers in hTFR^{KI/+} knock in mice

| Conjugated | | | Route of | Dose | | | | | | | IRON | |
|---|---|---|---|---|---|---|---|---|---|---|---|---|
| Compound | Unconjugated | | Admin- | (mg/ | ALB | ALT | AST | TBIL | BUN | CREAT | (μg/ | CK |
| No. | Compound No. | Ligand | istration | kg) | (g/dL) | (U/L) | (U/L) | (mg/dL) | (mg/dL) | (mg/dL) | dL) | (U/L) |
| N/A | PBS | None | s.c. | 0 | 3.35 | 40 | 95 | 0.13 | 24 | 0.17 | 274 | 206 |
| 1678710 | 1653456: | BCY17901 | s.c. | 10 | 3.11 | 20 | 66 | 0.10 | 20 | 0.16 | 244 | 175 |
| | 1652967 | | i.v. | 10 | 3.09 | 47 | 119 | 0.12 | 25 | 0.17 | 253 | 332 |
| 1710872 | 1653456: | BCY17901 | i.v. | 10 | 3.13 | 91 | 115 | 0.11 | 18 | 0.18 | 259 | 125 |
| | 1709195 | | | | | | | | | | | |

### Body and Organ Weights

[0505] Body weights of hTFR^{KI/+} mice were measured on days 1 and 22, and the average body weight for each group is presented in the table below. Liver, kidney, and spleen weights were measured on the day the mice were sacrificed (day 22), and the average organ weights for each group are presented in the tables below. “N.D.” indicates the data was not determined.

TABLE 77
Body and organ weights (in grams)

| Conjugated | | | Route of | Dose | Body | | | | |
|---|---|---|---|---|---|---|---|---|---|
| Compound | Unconjugated | | Adminis- | (mg/ | weight (g) | | Organ weight (g) | | |
| No. | Compound No. | Ligand | tration | kg) | Day 1 | Day 22 | Liver | Kidney | Spleen |
| N/A | PBS | None | s.c. | 0 | 24 | 24 | 1.21 | 0.31 | 0.10 |
| 1678710 | 1653456: | BCY17901 | s.c. | 0.1 | 23 | 24 | N.D. | N.D. | N.D. |
| | 1652967 | | | 0.3 | 28 | 27 | N.D. | N.D. | N.D. |
| | | | | 1 | 24 | 24 | N.D. | N.D. | N.D. |
| | | | | 3.5 | 24 | 25 | N.D. | N.D. | N.D. |
| | | | | 10 | 23 | 22 | 0.92 | 0.27 | 0.08 |
| | | | i.v. | 0.1 | 27 | 26 | N.D. | N.D. | N.D. |
| | | | | 0.3 | 25 | 26 | N.D. | N.D. | N.D. |
| | | | | 1 | 23 | 23 | N.D. | N.D. | N.D. |
| | | | | 3.5 | 26 | 25 | N.D. | N.D. | N.D. |
| | | | | 10 | 23 | 24 | 1.14 | 0.29 | 0.09 |
| 1710872 | 1653456: | BCY17901 | i.v. | 0.1 | 26 | 26 | N.D. | N.D. | N.D. |
| | 1709195 | | | 0.3 | 25 | 26 | N.D. | N.D. | N.D. |
| | | | | 1 | 24 | 23 | N.D. | N.D. | N.D. |
| | | | | 3.5 | 25 | 25 | N.D. | N.D. | N.D. |
| | | | | 10 | 25 | 25 | 1.05 | 0.29 | 0.07 |

### Example 20: Design of Modified Oligonucleotides Targeted to MALAT Conjugated to CD71 Bicycle Ligands

[0506] Modified oligonucleotides complementary to mouse MALAT were designed (as indicated in the table below) and synthesized. The compound in the table below has a modification on the 5′ end to allow conjugation to a bicycle ligand.

TABLE 78
Design of modified oligonucleotides complementary to mouse MALAT

| | | SEQ |
|---|---|---|
| Compound | | ID |
| No. | Chemistry Notation (5′ to 3′) | NO. |
| 1694083 | [BCN][nC60]ₒAₖₛGₖₛTₖₛA_{ds}^{m}C_{ds}T_{ds}A_{ds}T_{ds}A_{ds}G_{ds}^{m}C_{ds}A_{ds}T_{ds}^{m}CₖₛTₖₛGₖ | 184 |

[0507] In the table above, a subscript “k” represents a cEt nucleoside, a subscript “d” represents a stereo-standard DNA nucleoside, a subscript “s” indicates a phosphorothioate internucleoside linkage, a subscript “o” indicates a phosphodiester internucleoside linkage, a superscript “m” before a C represents a 5-methyl cytosine, a “[nC6o]” indicates a 6-aminohexanol linker, and a “[BCN]” indicates a (bicyclo[6.1.0]nonyne)-formyl linker.

[0508] The modified oligonucleotide was further conjugated to BCY17901 as described in the table below.

TABLE 79
Design of modified oligonucleotide
conjugated to Bicycle ligand

| Conjugated | Unconjugated | |
|---|---|---|
| Compound No. | Compound No. | Ligand |
| 1694082 | 1694083 | BCY17901 |

### Example 21: Design of RNAi Compounds Targeted to HPRT Conjugated to CD71 Bicycle Ligands

[0509] Antisense strand modified oligonucleotides complementary to mouse HPRT were designed and synthesized as indicated in the table below.

TABLE 80
Design of antisense strand modified oligonucleotides targeted to human/mouse HPRT1

| Compound | | SEQ |
|---|---|---|
| No. | Chemistry Notation (5′ to 3′) | ID NO. |
| 1586322 | vP- | 191 |
| | TₑₛU_{fs}A_{yo}A_{yo}A_{yo}A_{fo}U_{yo}C_{yo}U_{yo}A_{yo}C_{yo}A_{yo}G_{yo}U_{fo}C_{yo}A_{fo}U_{yo}A_{yo}G_{yo}G_{yo}A_{ys}A_{ys}U_{y} | |

[0510] In the table above, “vP” represents a 5′ vinyl phosphonate moiety, a subscript “f” represents a 2′-F modified nucleoside, a subscript “y” represents a 2′-OMe modified nucleoside, a subscript “e” represents a 2′ MOE modified nucleoside, a subscript “s” represents a phosphorothioate internucleoside linkage, and a subscript “o” represents a phosphodiester internucleoside linkage.

[0511] A sense modified oligonucleotide was designed and synthesized as indicated in the table below. The sense oligonucleotide is complementary to the first of the 21 nucleosides (from 5′ to 3′) of the antisense oligonucleotide wherein the last two 3′-nucleosides of the antisense oligonucleotides are not paired with the sense oligonucleotide (are overhanging nucleosides). The sense modified oligonucleotide has a modification on the 3′ end to allow conjugation to a bicycle ligand.

TABLE 81
Design of sense strand modified oligonucleotides targeted to mouse HPRT

| | | SEQ |
|---|---|---|
| Compound | | ID |
| No. | Chemistry Notation (5′ to 3′) | NO. |
| 1653454 | U_{ys}C_{ys}C_{yo}U_{yo}A_{yo}U_{yo}G_{fo}A_{yo}C_{fo}U_{fo}G_{fo}U_{yo}A_{yo}G_{yo}A_{yo}U_{yo}U_{yo}U_{yo}U_{yo}A_{yo}A_{yo}[3nC7] | 190 |
| | [BCN] | |

[0512] In the table above, a subscript “f” represents a 2′-F modified nucleoside, a subscript “y” represents a 2′-OMe modified nucleoside, a subscript “s” represents a phosphorothioate internucleoside linkage, a subscript “o” represents a phosphodiester internucleoside linkage, a “[BCN]” indicates a (bicyclo[6.1.0]nonyne)-formyl linker, and a “[3nC7]” represents a 3′-C7 amino modifier having the following structure:

[chemical structure]

[0513] Sense modified oligonucleotide Compound 1653454 was further conjugated to BCY17901 as described in the table below.

TABLE 82
Design of sense strand modified
oligonucleotide conjugated to Bicycle ligand

| Conjugated | Unconjugated | |
|---|---|---|
| Compound No. | Compound No. | Ligand |
| 1694090 | 1653454 | BCY17901 |

TABLE 83
Design of RNAi compounds targeted to mouse HPRT

| Duplex | Antisense Strand | Sense Strand |
|---|---|---|
| Compound No. | Compound No. | Compound No. |
| 1694595 | 1586322 | 1694090 |

### Example 22: Effect of Oligomeric Agents Comprising CD71 Bicycle Ligands in Cynomolgus Monkeys

[0514] Cynomolgus monkeys were treated with modified oligonucleotides conjugated to CD71 bicycle ligands or RNAi compounds conjugated to CD71 bicycle ligands selected from studies described in the Examples above.

### Treatment

[0515] Prior to the study, the monkeys were kept in quarantine during which the animals were observed daily for general health. The monkeys were 2-4 years old and weighed 2-4 kg. Female cynomolgus monkeys were divided into 4 groups of 3 monkeys each. Each monkey received an intravenous (i.v.) infusion (1 hr) of conjugated modified oligonucleotide or conjugated RNAi compound via a percutaneously placed catheter. A new sterile indwelling catheter was placed before each dose. The monkeys were dosed with 10 mL/kg once per week for a total of 3 doses (on days 1, 8, 15) at 25 mg/kg.

[0516] During the study period, the monkeys were observed at least once daily for signs of illness or distress. Any animal experiencing more than momentary or slight pain or distress due to the treatment, injury or illness was treated by the veterinary staff with approved analgesics or agents to relieve the pain after consultation with the Study Director. Any animal in poor health or in a possible moribund condition was identified for further monitoring and possible euthanasia as soon as possible with attending veterinarian consultation. Scheduled euthanasia of the animals was conducted on day 28, approximately 13 days after the last dose, by exsanguination while under deep anesthesia. The protocols described in the Example were approved by the Institutional Animal Care and Use Committee (IACUC).

### RNA Analysis

[0517] To evaluate the effect of conjugated modified oligonucleotides or conjugated RNAi compounds on target RNA expression levels, cross-sectional slices of skeletal muscle tissues (quadriceps (quad), gastrocnemius (gastroc), tibialis anterior (TA), diaphragm, soleus) and heart tissue were collected from all animals. Approximately 8 mm² or 300 mg of liver tissue was be collected from all study animals and placed in 2 mL screw-cap tubes (150 mg x 2 tubes).

[0518] The monkeys were sacrificed two weeks post final administration (on day 28), and RNA was extracted from muscle tissues (including quadriceps (quad), diaphragm, soleus, tibialis anterior (TA), gastrocnemius (gastroc), heart), and liver for quantitative real time RTPCR analysis to measure amount of target RNA.

[0519] MALAT RNA levels were measured using NHP primer probe set MALATI_LTS01104 (forward sequence AAGGAGTGTACCGCTGTACTGTTG, designated herein as SEQ ID NO: 247; reverse sequence CCAAAGCTGCACTGTGCTGTA, designated herein as SEQ ID NO: 248; probe sequence ACACCTTCAGGGACTGGAGCTGCTTTTATC, designated herein as SEQ ID NO: 249). Monkey MALAT RNA levels were normalized to total RNA content, as measured by RIBOGREEN®. Results are presented as percent monkey MALAT RNA relative to the amount of monkey MALAT RNA in all groups not treated with the MALAT-targeting conjugated modified oligonucleotide. DMPK RNA levels were measured using NHP primer probe set DMPK_RTS4447 (forward sequence AGCCTGAGCCGGGAGATG, designated herein as SEQ ID NO: 250; reverse sequence GCGTAGTTGACTGGCAAAGTT, designated herein as SEQ ID NO: 251; probe sequence AGGCCATCCGCATGGCCAACC, designated herein as SEQ ID NO: 252). Monkey DMPK RNA levels were normalized to total RNA content, as measured by RIBOGREEN®. Results are presented as percent monkey DMPK RNA relative to the amount of monkey DMPK RNA in all groups not treated with the DMPK-targeting conjugated modified oligonucleotide or conjugated RNAi compound. HPRT RNA levels were measured using NHP primer probe set Rh02800695_ml (Thermofisher). Monkey HPRT RNA levels were normalized to total RNA content, as measured by RIBOGREEN®. Results are presented as percent monkey HPRT RNA relative to the amount of monkey HPRT RNA in all groups not treated with the HPRT-targeting conjugated RNAi compound.

TABLE 84
Reduction of target RNA in cynomolgus monkeys with oligomeric agents comprising CD71 bicycle ligands

| Conjugated | | | | | | | | | | |
|---|---|---|---|---|---|---|---|---|---|---|
| Compound | Unconjugated | | | Target RNA (% control) | | | | | | |
| No. | Compound No. | Ligand | Target | Quad | Heart | Diaphragm | Soleus | TA | Gastroc | Liver |
| 1694082 | 1694083 | BCY17901 | MALAT | 29 | 37 | 48 | 46 | 47 | 46 | 32 |
| 1666846 | 1590463 | BCY17901 | DMPK | 33 | 59 | 31 | 36 | 25 | 31 | 57 |
| 1678710 | 1653456:1652967 | BCY17901 | DMPK | 65 | 85 | 51 | 42 | 36 | 41 | 71 |
| 1694595 | 1586322:1653454 | BCY17901 | HPRT | 14 | 25 | 25 | 17 | 21 | 20 | 89 |

### Example 23: Design of Modified Oligonucleotides Targeted to DMPK Conjugated to CD71 Bicycle Ligands

[0520] Modified oligonucleotides complementary to mouse DMPK were designed (as indicated in the table below) and synthesized. The compound in the table below has a modification on the 5′ end to allow conjugation to a bicycle ligand.

TABLE 85
Design of modified oligonucleotides complementary to mouse DMPK

| | | SEQ |
|---|---|---|
| Compound | | ID |
| No. | Chemistry Notation (5′ to 3′) | NO. |
| 1730822 | [BCN][nC60]ₒAₖₛ^{m}CₖₒAₖₒA_{ds}T_{ds}A_{ds}A_{ds}A_{ds}T_{ds}A_{ds}^{m}C_{ds}^{m}C_{ds}G_{ds}AₖₒGₖₛGₖ | 186 |
| 1730823 | [BCN][nC60]ₒAₖₛ^{m}CₖₛAₖₛA_{dz}T_{dz}A_{dz}A_{dz}A_{ds}T_{ds}A_{ds}^{m}C_{ds}^{m}C_{ds}G_{ds}AₖₛGₖₛGₖ | 187 |
| 1730824 | [BCN][nC60]ₒAₖₛ^{m}CₖₒAₖₒA_{dz}T_{dz}A_{dz}A_{dz}A_{ds}T_{ds}A_{ds}^{m}C_{ds}^{m}C_{ds}G_{ds}AₖₒGₖₛGₖ | 188 |

[0521] In the table above, a subscript “k” represents a cEt nucleoside, a subscript “d” represents a stereo-standard DNA nucleoside, a subscript “z” represents a mesyl phosphoramidate internucleoside linkage, a subscript “s” indicates a phosphorothioate internucleoside linkage, a subscript “o” indicates a phosphodiester internucleoside linkage, a superscript “m” before a C represents a 5-methyl cytosine, a “[nC6o]” indicates a 6-aminohexanol linker, and a “[BCN]” indicates a (bicyclo[6.1.0]nonyne)-formyl linker.

[0522] The modified oligonucleotide was further conjugated to BCY17901 as described in the table below.

TABLE 86
Design of modified oligonucleotides
conjugated to Bicycle ligand

| Conjugated | Unconjugated | |
|---|---|---|
| Compound No. | Compound No. | Ligand |
| 1731582 | 1730822 | BCY17901 |
| 1731583 | 1730823 | BCY17901 |
| 1731584 | 1730824 | BCY17901 |

### Example 24: Activity of Modified Oligonucleotides Conjugated to CD71 Bicycle Ligands in Heterozygous hTFR^{KI/+} Knock in Mice

[0523] The activity and tolerability of modified oligonucleotides conjugated to CD71 bicycle ligands was tested in in heterozygous hTFR^{KI/+} knock in mice (described herein above).

### Treatment

[0524] hTFR^{KI/+} knock in mice were divided into groups of 4 mice each. Each mouse received an intravenous (i.v.) administration or subcutaneous (s.c.) administration of 3.5 mg/kg conjugated modified oligonucleotide for a total of 3 doses (on Days 1, 8, and 15), as indicated in the tables below. A group of 4 mice received PBS as a negative control.

### RNA Analysis

[0525] The mice were sacrificed one week post final administration for conjugated modified oligonucleotide groups on day 22. RNA was extracted from various muscle tissues (including quadriceps (quad) amd gastrocnemius (gastric)) for quantitative real time RTPCR analysis to measure amount of mouse DMPK RNA using mouse primer probe set RTS3181 (described herein above). Mouse DMPK RNA levels were normalized to mouse GAPDH. Mouse GAPDH was amplified using mouse primer probe set mGapdh_LTS00102 (described herein above). Results are presented as percent mouse DMPK RNA relative to the amount of mouse DMPK in s.c-PBS treated control animals, normalized to mouse GAPDH RNA (% control).

TABLE 89
Reduction of mouse DMPK RNA in hTFR^{KI/+} knock in mice
with modified oligonucleotides conjugated to CD71 bicycle ligands

| | Unconjugated | | Route of | DMPK RNA | |
|---|---|---|---|---|---|
| Conjugated | Compound | | Admini- | (% control) | |
| Compound No. | No. | Ligand | stration | Quad | Gastroc |
| 1666846 | 1590463 | BCY17901 | s.c. | 48 | 47 |
| | | | i.v. | 22 | 19 |
| 1731582 | 1730822 | BCY17901 | s.c. | 32 | 28 |
| | | | i.v. | 15 | 15 |
| 1731583 | 1730823 | BCY17901 | s.c. | 38 | 37 |
| | | | i.v. | 23 | 23 |
| 1731584 | 1730824 | BCY17901 | s.c. | 28 | 27 |
| | | | i.v. | 21 | 20 |

### Example 25: Design and Activity of RNAi Compounds Conjugated to CD71 Bicycle Ligands

TABLE 90
Bicycle ligands

| Bicycle Ligand | | N-terminal | SEQ ID |
|---|---|---|---|
| ID | Sequence (N to C) | modification | NO: |
| BCY21757 | CP[HyP]DAYLGC[tBuGly]SYCEPWK | acetyl | 245 |
| BCY21758 | CP[HyP]DAYLGC[tBuGly]SYCEPWC | acetyl | 246 |

[0527] Various sense modified oligonucleotides are designed. The sense oligonucleotides are complementary to the first of the 21 nucleosides (from 5′ to 3′) of the antisense oligonucleotides, wherein the last two 3′-nucleosides of the antisense oligonucleotides are not paired with the sense oligonucleotide (are overhanging nucleosides). The sense modified oligonucleotides are conjugated on the 5′ end to a bicycle ligand to form the following Conjugates:

TABLE 91
Conjugates with various linkers

| Bicycle Ligand | | |
|---|---|---|
| ID | Linker Name | Conjugate Structure |
| BCY21758 | Maleimide | [chemical structure] |
| BCY21757 | Bis-amide | [chemical structure] |
| BCY21757 | ketoxime | [chemical structure] |
| BCY17901 | ALO | [chemical structure] |

Y represents a bicycle ligand and X represents a modified oligonucleotide consisting of 21 linked nucleic acids conjugated at the 5′ end.

### Activity

[0528] The activity of RNAi compounds conjugated to CD71 bicycle ligands is tested in in heterozygous hTFRKI/+ knock in mice (described herein above).

### Treatment

[0529] hTFRKI/+ knock in mice are divided into groups of 2-4 mice each. Each mouse receives a single intravenous (i.v.) administration or subcutaneous (s.c.) administration of conjugated modified oligonucleotide or conjugated RNAi compound. A group of 4 mice receives PBS as a negative control.

### RNA Analysis

[0530] The mice are sacrificed one week post administration. RNA is extracted from various muscle tissues (including quadriceps (quad), gastrocnemius (gastroc), heart, liver) for quantitative real time RTPCR analysis to measure amount of mouse target RNA. Mouse target RNA levels are normalized to mouse GAPDH. Mouse GAPDH is amplified using mouse primer probe set mGapdh_LTS00102 (described herein above).

The application's sequence listing, which the Patent Office published only in electronic form, follows.

SEQUENCE LISTING (253 sequences)

SEQ ID NO: 1 - DNA, 317000 bp, Homo sapiens
  source 1..317000: mol_type = genomic DNA
tcaacacagcacctgctaaaattttcacaggaatctgctatttactgatggactctgcactttggggagctatagagataacattatctcttcgctgtttcttatcttataactttgtagcagaggaaatcaatgaatgttagtatctgttaatatctgcctttgttaatgtaagcattagaaacttgtactttctgggtgaaactactgaagtcttggatttttttaaattccaagttgccaaagaggaaagagggagaatacttagtcattttatatccacagccctctaccctgctccttgcttgtaaatccccacttggccttttaagagttgaaatagagtccaatctctctctcctcctgcaagacctggttgcagtggttctgatcaccatggacccccttgaataaagcctgccttattatcttcaacaactttaatgactaactttttattcactaactctccctcttaactttctctaccatgttcatcagacatgcagttagtaaggcatgtataatgaaatgtaaatacatttggcactaacatccagtgttattatgtttataggtctacatttctacactttttagaatttatctctattttgtagctattcctgaaatgatgttgaagtagaacaacaacaacaaagtctttgatctgactattttttttttttcagacagagttttgctcttgttgcccaggctggagtgcagtggcgcgaattcgggtcactgcaacctccctccttctcccaggttcaagcgattctcctgcctcaccctccaaagtggctgggattacaagcatatgccaccatgcccgactaatcttgtatttttattagagacggggttttgccatgttggccaggatggtttcgaacccctgacctcagatgatccacccgcctcggcctcccaaagtgctgagattacaggcgtgagccactgcgcccggctaatctgactactttttaaggaggttcaaacttcagaaataactgtaaatatttgttcaaataagagaaatatttagtctaaaatataaatcaaagaaagggtacgtacagattaagcagtgtttgctgtaaaaaatgtacacatttattgtctaataatacatcagtattaaaactcagttatgtttcctttattgtactccacaattataaccatttacaattattggtagtttaaataactgagataaatactgtaattatgtagacttcattacttgaatatttaagaaacaattttcttcccagatgtaaatttttatattacctttattgttttaattttactttttctgtttcattcttagattcagggaaaaatattaaattatttcattatcaccttggagccacattgctaaatagttcagatattacaaatctttagccaagaccaaattgtgttttttttttcaatttatagcccaattattaatatttagagaccatgtttcttttatgcagttcttggtatcatctttttctatagcactacattttacacagttatttcttgccttttacggctgggaatcaaaacacatacgaacttcaattttgttgtaataaacgttaaaatttgtgaacatttttagtacttcagtaaaaagctcactcattggcagaagcgttccccagatcaggaaaaaaggaattaggattatctatgaccacaaagtaacattaattaatagcagtctttgggagcaagcagcagcgcctttaaatcttagattctcttgtgtctgcaaattatcttttatctttcagctgtgaaattttgtctatgaagtaataccacgagcaaattagcaataggattgcaaggtttttatagtcccgtgctgtagaacaattggcagtaatttgaaaaagaccgtccataacgctgtttttggtctgcggctaaatttgcaattgcatagtttcattaaggagaactggaaagagggcccagaagttgttctagcaatcggcagcagtttatctattttaaatcgtaatgcatactttttttttcctcctactgaaaacaatggcagatatgctaaagggaaggacacattcttgaactgctaaatggtttttccagatagccatttacggagtgcactcaattgccactatctggctgaaagcaaaagcacacacgacggccccttttcttttttccctttgcaaagcgaaacagtctagacgtgttcacgtgatgtgaatgacgtcagcccccgccgggtcgcgtgaccgacacccagccttcctactacctccccctgaccgccagagtgggaaatatcgcgagaattcgccttactatcagaacttactgaggttgcaggggagttactcagaagggaagggaaggtgtggttgtgcggcggagtttttgctttcattcttttaacgttcacagccaaagcaaaggcctttggggattgccagagtctcagccaccatcctggaaaacagcgggggaggtgggcctggaggtggcaagtgtaatgtggctcaggggccgtcattgccccttgcagaaggggctgcgggggagggagaaaacctgcgcccggttctggggagctggcgacgcagtgaaccctgctgaggctgggttttgccccgacagtcgctggtggctgtgggaagggttgggacccttctctgagagcagtgaacagcccacatccggcccctgctgtgtcaactctgagcggcgtggagatgaagtggttgctctcccttgctcggcccaccgggtgtcgtggcccgggaaccggcctggagaagtccctgctgcccggcgcccaaaacaggggcgtgggcttccgcgacccagggcggctgccccgggccatcctcgagttgccctgcatcttcccgctcagtcagccccagattgaggcagccttctctgtgcgggtttaaatgggtaactgtgacttctcgcctcattcacccaaacctccagtcttctcccccgcacatcctcctccacccacctggtttctccctagactggtgtgctcgtgtgtgcaaccaaaggagggagtgcgagagatccacgaagggacaggcttggagtcgctagagggaggtgtgggaccagcgaggagggggcttcgccagggagggggtgctggcaggcggagggagcggcgggaggaggcgccggaggaggagacggaggcctggggacggcagaagaggcttcgcctgagccgagcgctctttctctcgccgcgccgtcttgaagccgcgcgggctcgtgagcagcgcgaggccgccaaggtgcctcgcttcgccggagccgctgccgcccgccggagggaagccggcctcgggcgcgcacgctcgtcggagccccggcgcgccccgcgcctgagcctgctgacagcggccgctgggctcaggctgtccgctctgggctccgcggcctcggccccgctgcactccacctccgccccctcggactccctcccctctgcttctactcctcctgctccagtgcggatcgtttcgcaactgcttgccactcgtcccgtgcctggctgtttttccatttcccggccccctcttcttgagtactttaccccctgcatttggggacagggactggaaaaggggcgggtggagcgtccagtggagaagaaggaagcgaggcccgcaggaggaggaggatcggcggactgtggggaggagaccccacgccaccctttctggtcatctcccctcccgccccgcccctgcgcacactccctcgcgggcgagctactttcggaccaggaaagtaagagcggccctgggtgacagcgccgcggggccagtcccggggttagccgcgcgtctgctcgcttctggtccgtcgcgctcccagccagggcacagcccggaccgaggatggcttcgaccacaacctgcaccaggttcacggacgagtatcagcttttcgaggagcttggaaagtaagcacctttgcccggcatccgcatatcccctttccagctgagggcgggtcgcgttgcccccgacccaccggcctccgtcttggggcgagggagtttgggagaggaatgggaggagggcccctggtttgtcagctctggggaaggtgctgtcttaataaagggagggagcacagaaggggtaggacccttactccaactgtggctcattttgatggtccctagcccaccttctcccggtcccccaccctcctgcactgagagacttagtgaatttacgatctctgcagttgtagctatcatcctgagaagtgtgcgcgcgcgcctgtgtgtaatgtgtgtttggagaggaaattagaacccatgtaaaatgcaacatagatcatgttttctgtaaatagagatgcctcctggttagccggcgtgtcggccgtatgacccaggtactgatgagaactcacagcctcagacggtgccatatttattgatgccgaaagttcaacttggcatagagtctatttcgcatccagtagttgttctgtccaggaaaagggccacccaacagaacccaaccccttgccctatatccagtgttgttctttgcaccagattaccgctcaccatcattcttcctaggatttacgtgtgcatctttgcgttctctgggaggatttatttatacaggcaacggaaaagccctctggagactgagagcgctcttaagcgtagcctagcattgtgtaaaaccacctccttcacccgactggcagaactacttggagatgttagggaaggaggcaggagacctactgaggacttatgcaaagggacctaggggccaagccgtgaatgctgatttttgtagcatggaacccaaacccaattcctctttcactagtttcgactgttacttttatgaaaggagtgcgtttatatgtatgttgttggtttatactgtaattaaaggaaaggtaaatatttttaaaagtaataaaaattacatatgtatatattgtctggtgttaaaacatggagaatatgtcggaagagcagcttaattcaaatctctcccctcccccagtccaaaacaaggcatagagaaatcaccataccaggatttgttaaaccacactaatgtgctcaagatttatattttaatgaaaataatcgtcatgtttacttacttggaaccacattaattttttgtttcctaccaaaataagtaggcagcagatttttttgctgctcctcgtctgctctgttctgtgcagggtttttctcagagcatttggtgctgtgagtgtgaactgtaaaatgttttcaaatttcttgtgcaaacaagagcggtcataattggcagttcctttcattttgttgattaataatgtgtgctcccagttaaataaaatttacttttattcttcaacattaaagaaagtctgggtttccaggaagaattgttcatttactggatattactgtacttcactggcaatccactaaaatcaataaaaatgctcagattttataaatttttaatgaaatattatatctgttatattaatgacctgctaattattggtttccaggggggcattctcagtggtgagaagatgtatgaaaattcctactggacaagaatatgctgccaaaattatcaacaccaaaaagctttctgctaggggtgggtattttcaaccacatatattggttaattttgtatttgtcatgttgattataggttctgttgtatgtaaatatatcatgtagttataactgaactttagacttaggtatcatattatatattaagattattttcttcctgaatgcttcttggtctgtacagcttaaaaatacatggaaagatataattattatttgatacattgctattaaaattctatctgtcctatgagcaatagcatgaataactatattttaaagcaaataaatgtcaggtgcattttgcttatagtttaagtataaaacaacttttagaccatggaatggaaaaatataagtctcacaactgtcataattcccttttgcttttgagagggaagtaggtcatagctcagttgaatcatacatttcaattgtagttacacttgaacttaattcatcaaggtatatttaacagtaatagctttggtaagaaaatttatgattgctatattctaggaagtttagttttattttgatgtttctgtgtgcagctcagaccttggtcttcgcattaaggcttcacacagactcatgtaatgtattttacacatgtagtttataggtacagagataattcatactcgtaaaatagctgttgacataaccaaaaaacttggagggctctcactgcattctttttatttagtagaactcatgcaaaagtacttacgctgaaatgttaggcattccaattattgtgggcacgtgtctgaggtatttccatgggaatttatggtataaaaatgaaatgaaaatgaacaaaataccatagtgtacgctcatctcagtgacctggtttattttaagtaatgagagaagaaattccattaggtttagttttcctcatttaatatgtcttttcaaaagtgcttcttaccaaaatcctggcatcattgctttcggtctctgccatgattagtttttccatatttattgcaaattctacttttaacatgcattttaggtttaggttggtattttagtttatccattcacatgggttgttgttttaatttccttcatctgattttgacatgattctgagaaagatctataaagtaaccagcaccatagaatcatggtatgaaaactaatgagaagaatattatgttaattatgttctcttagtctctactccacagaaaggttttaacaatgaaaaggaattgctaaactataagtgacattttaatttaaaaaaatgaaaatgtgtagttagaatctttcagtgcttctcttattttcttctgtgtgctagatacttttggctgtggtgggggtatcatttcttttgaaagcattacaatacctattccaagatttttggtggtgtttctttcaaaacaaatcagtgtagtgcttcacttttactaactttcttaattagagccatccctcttcactcatctgaatttgtcctccctaaatcagaataacaaatgtacttatccctggtcacatacattttactctcttttcccttcaatctgtggagaagaagccttctttggcctgatggaatcttttctccttgctactccaccagtgtttccttacttgctcatattctgcttcaaagaactacctacatgtcccaaagctttttaccgcttctggatgtaatgattttcattattctacttagaaaaaggaactagggtgaagagttaggagacattcttcttgcccgttttctgcaattttttttccttgtgactttgggcaagtttcttaacctgttgtaggttaacgtacctaagagtgagctggtggtgaagaacattattaacgctgcaaccagaagctcttgagtttaacttctgctgcccatacctactggctgtgtgatcttgagcacattaactagtttctctgagcctcagtttcttcatctgtaaaatagcagtaataacagaacccttcctcatagggttttgtgtggaatgaatgaattaacatagcatagaacagcacctgccccactatatgcagtcaatgaatattatctgctattattatctaataaaattgtcataatgatcaaattagattacttttatgaaagaacttataaatccagtggcagccttgatttagctgtgagaactacgtttgaatctttgctctactacttaggcataaatttcgtttagtctctttccttttctggatatcaggttcttcatcagtaaaatgggaaatcatactcatggagtctcatggggtgttctgaggattcagggaattcaatgagaatcatttcttaaactgcaaagtattgtgtcaattttacctcttattattgttctcctgaaaaattacagaacttttccttcaaaatggtcaacaattttattttatattgtcacactaatcagaactggttgtagaatatttgtgcctttgaatgaatacgtttgtttaacttgtactcatattgaattataaactcttgaagaagaaaataccatgctttcattttttgatacaacattccacagaattgagagcatagaaggggctcagtacagagtaacaagaatcaaatgtggttgttaaatgacttgtaagagttaagtacttaatttactcctaacaacaagcaaatactgaaaataaatccgtgaagtagtatattaagaggatatgtcttaacctatgaagtcttttaataacactcatttcagagaagatgatacaaatcatttttgcagaaaaatttttaaaataatgaatacgttcaaaggcaaatgtagaaagaattgcaaaatagtatgcttgttttttctaaggtactgatttttgagagttgcatatggaagcttttgtggagcatactttttttgtgcaaatttttgtttgtatttgaaattccatgactctgtatacccaagcctttagtctatttgttttaaagaccaggcaggtcctccaactccactaatgttctttaaatgtaacattacagctgaaaaagaaagggctattgttaataaatctaagaccatgagggaattgccaaagatttggctacattcctgcataaatttgcacatccaactatactatcaaccaggcatttttctgtgcctagattttaatggatttccagcagacagtttcagttgtatttcctctcagctgttagtcatacataccatatttggggaactctgagtcaattgaagaatttcttaccttttgtgttagcatgtgcgtgcatagaacattcattatactgagcatgtagatgggtacactcatatataatttggcttattttgaaaataagtagtatggaagcatctcaagcatcttatattttatatgtaatttctatcttctaaaaagtttttgttagatgggcattgagggcatgcttagtaaatgttgaatagtgataatagaatttttgccttatattttcatgagaattagaaattacgccattttaatcccaagcacagttagattagtacttaacaaaagccaatttttttctgctgctttgatattctgtttatttatacatgtttagaactgtacactgttgtcaaattatataaagtccaagaagagctgtgactgcagttcagaatccagtggactgatggttctgatggcagataatttagaaatagtacctgtgatttattttgcatttcaaagcctcgtggtggtaaaatattttatgtggaagtaatggcttcttgacattcatctcccagtgtatttcttgatcgttagaaaccatttgactattacatagattctgatgtgtcacagtcactgtttttgtaaaatataatacattatagtatagggttaaaaaataagttattacaactgtattttacctctactccattgctaaagttaaaagggatttcattttatatttctgtaaaacttcaggcttaatcagttaagtcattttgatattctttgattttactagttttattaattcctaaattggtgatattagtagtacatgaatcaggactttataaaactacttgaccatgtatgcaaaattaggcctcatctataaaatctaaatgttttgtgtgtgtgtgtgtgtgtgtgtgtgtgtgtgtgtatccctaagtaaccttttttgatgttgtaaaagggatgttaaaaactaattcttgctacttttcttttatttttggcttccaggcagtcaagaaagtactgtaatttctcaacttcatggttacttgtcttgaattggaagtagaactgagactatgtagatggattaagttctgattatacattattgatttggcaaattggaacaatttggacaaattaaaatttgaaggtttcttggcaagaacaacattttaagaaaaaaattagtaaatcatttttatatttgtacatagaatctccacaactcttcagttatggacccagaagtggcatgtgtcatccttattattttgtatcctttacttacgtttagttgtatttacattcttctataggtcttgatattaaacattcattttcttctttcattgaatgaaagcattactgctcttcagaactagttaggagacacaaataataaaaaaaaaaagtatatccacacttccaggaaataatagaattcttttctgtatttcattaaatgaagaaaataaagaaagtggttgtcaggtgccatactgtgatattaataactagtgtaaacctctacctgattgtgtgagaactttgtttagacaattagattaatacttctcatttccattgaaatgttgaataaactgaatataaaaattaaaatttagcaatatgtcaccttttatggatctttttaatggtaataatcacgaattactagaaatcttacatgtactgggcttttcttgggcatctaacttttttgttaactagaattttaatttatttttaaagtcttccttgggcttatactgaggttgactcatagtatttctagggctggattggtatattttttaacatcagtcttccccatttattagggtgtaatgtatgcagtgttttaataaatcattggcaattaatgattatatagaggctgtgttaaagattttaagttacaatagtatttctagtaaactacactgcaatgcattaaatggagtattagcaatattttaactgtaaaacatatctttatatttcaaatcactttatagatcattaagcatattcacatgtctttatgtgtttatttaataaatattaaatgatttcagtggacagtgttaggaaaaataaaggctatctacctaaataaacataatagaagacatgaatggcattacaattcaagcatgaataaagtactatgggctcttaaaggaggacaagattatttctgcccagggagataaagaaagcctttcatatagtattgatttaaagaaattttgaaagctataatgtagatggggcttaagtaccacccccgcccccacccaaccgaaaaaaaaagtctaaataaatgatttggggaagttgctcaaagtagtttaaatatctgattataacaaaatgttatgttattcatatggtaaatttgttgtaattatcagtatacagttatttttagaataaaattattttaaatgacgtaggctgtttcttaagtgacaaaattcctctaattccagttgagagatttagcaatacttaaggagaaatcatagaccttttatctgccataacttctcttactctagcatagggaaattggtaggtttgaagaggagagagggcagcttttttgttaagtttgtttggttttgtttttaaatctcttagctatcattgtaattacacacaatgacacaatgacatcactgatttttttagttacctgagccccttttctggtgttacagtctcattttaactccttagaactatgtttattactaccaaaatcaataatgccatcttcatcattaataataatttagaaaaatataaatattaatagccattatttgaagagccccttctatgagacaataagtatatatttacaagatactttgttttattttatttaatccacactgcagcctcctagaacaatattatgtccattttaaaaaagaatactgaggctcttgtataaggcctcaaaattagtaagtgataagagtcaggatttcaatctggttttctctgactgtaaattctgactctttccactgtcacctcctgttgattgctattagagaggacttatcttaatctgtctgtatttacctgtgtgtgcttaactgatcttacaaacttcagagtccttcatacaaagcactatgccttacattttatcttcccattgcagtgtgggggattgagtatttctttgggaaaatacatttagagttccaacctgtgagagaagatagtcttttaaatgctactataacaagatcaaagtgaagtttcagacagtccctccatgctgtcttctggaaggacaacaatatagtgaaaaatgttattataaaatggtaggaaaatggttaaagaggagttcagtattttggtaaacttaattcattaactgattaaaaatatctcactatacagtaagtttctaggattacttcttctaaatgattcagttgtcactgcaaactaaaactcagcccttaaccgaagcccagagaaacctactcagaaagctgttctactcttctggttcatcttgtttaaccagtgaacaatggaagacaaatttttgttgttttgtagtttccttttgaacaacattgttgtatgtagcaaattcttacaaaaatgtggcaatttaaagaaaaatataaaattgtcaagttctatatttgttgaaaaaataacttaggtgcagcaagtagtataaaggtacacaaagtattgtgatataatatttatatacagttaattgttttacaataggtttcctgttttccttcagttacattgattacataggaatgttaaaagttttattgcataaaatttgatatatataattatatcatatatatttaattttataacaataagcacccaataagcctccactcaataactagaacattctccctacttttgaagctacctgtgtgctttttgttgatccctatcctttgtatctccccgagagctaatcaccatccctaacttttttaggagagaaacctctttttatttcttcataccctggggttttttaattaactggctgatctcagtgggccagtcattcatggaataaatatatgtagccattttctaggtaaattgtattttattttattttgtgtggtatatgtgtaaactcatggaataaaatacattacttctcatatattagtatataattttaccctcttaaatataggcaatgcttaatttatttggaatttgtttagtaacaggaaattattttcttcctatgtctgataaaattttttttaaaattatttatttatttattttgagacagagtctcgctctgtcgcccaagctggagtgcagtggtgctatctcggctcactgcaacctcggcctcccaggttcaagtgattctcctgcctcagcctcctgagtagctgggattacaggtgcgtgccaccacgcctggctaatttttgcatttttagtagaggcaggatttcaccatgttggtcaggctggtctcgaacaccggacctcgtgatccacccacttaggccttccaaagtgctgggattacaggtgttagccgccgcacctggccaaaattttattaatgataatgtatacacattgaaataaagcatgaataacttatataaaagtaacttattaaatgtaaatatagtaagtgaaaatttatcaaaattttctgttttataaagaaattgtggatagttgatatatgccacattatgctattagtgtttaaattaaaatttgatgttttgttgaggaaataagtacttttgcatttttttgaggcaatgttctggataatttgaatttctgctgagggttatttgttagtaatacagccccaaactcagcatattcccagtagactcatcaactttccccctctgtgaatggcacaataattttcctaagctttcaagcatgcctgatttttttctttttcttatcccatctcaacacctttttcatttcttccttttcaccatcccaatttgaactctcttttctttttgcttcaactctttgttttgtgttttgagacacagtttctctgttacccaggctctagtgcatttgtgagaacctagcttactgcagcctccaatgcctgggctcaagtgatcctcctgcctcagcctcctgagtagctggaactacagtcatgtggcaccatgcccaagtagttgtttgttttattttttttaaagacagagtctctctgtgttcctcaggctggttggtcttgaacttctgggtgtaaggcaatccccctatctcaggctctgaaagtcctgggattacaggcgtgagctactcactgtgcctggctgcttcaactcttttagatagcctcctaaatgggtttggtagataatagttgcacattttttattcgtttattcagctcatcattagatcttttagcactcgctttgctgggcaacttgataagttttagagatccagaggtaaaagacagacattccttcctcaagtatttcctggcctatgagtgtggatgacagcctggcatttagtagagttagtgaaagggctgtgatagacgcgtgcacagggcttttgagagcatgcagaaacaggcttggggaggttggtctcacagatttcctgaaaagattgatgtgtgaggttgtattttgaataaattaggtgagcctgctagagaagggagtaagcaatctgttcacagggagggagaaagttcctgctccatcttcctgatggagtgagtacacctggtactgttgcagtactctctcctttaagatccagtgcaggtcctgcctcctccatggtctctaacttcttcccccacctctccttactttctctagccagagagattgttgtctccttctttgtcctttcaatagatatttcatatcttatggagcttgccagatttctccctttgtattgcagtcatacatgttgtggccttcaggcatttggtgacatttcttagtttatctttcagtctgcgcctggcacagtaattaatattgcagatacttgtaaatgtttgttggataagtggacaaataattgcatgaccaaataagattctgtatcttgaaatagacatgcttcaaagagaaacttatgactggcaaagtaaattgaaaattgactaagacttcatgtcaaatagcatacaataactctataaattaatttgtaattcacaaattatttcataagttttgtcatgacaaattctgctttattggaaagagttttgtataattcagtattttctttttgagcaactacttgcaaattcttattgctgctctttttttaaaccatgtattataaagtggctcattaatgagggctaacattttcatggtctgtgtgtccatcagcaccactttaataattccagactcatgtcatgattaaattattttaacatgtttgagtttaaaaaaattttgatccattctacagaggtatctgattactttttcatttattttttgacaaagcttatttttaagcagtatggtgacactttatagagttttagatatacatatcatggatgttattagcttagaggatatttgattttttttagtaaaggcagttagaggccagctgtttcaactgctgtgtctgtcagttgagaaatttggtgagggagagtgtacttgtttctgtattggaaggctctttaaacagaatgcatgttgaaaagcacttacttgtgttctctcctcaaggaaatttcttgtgtgatatgttgcaagacactgggtggggggggcggggttccaaattctatagctttacagtgctaatacatatactaaattagagacatatttctaatacctattctaatatatttaatattatatattacattctatttatagctattatatatgagaaaatattcttttcataaaagtattcctatcatatttttaaatgatgacttaaagcctttaatcatagtggcaatagtgatttggggagttagttcaggtgtacattttggcagttttgtagaaattgtatccatgatgaatattttattactttgataaagtgaattttatatgctttaatactaaacattaatatttgttaggtatagaattacaaacttcagacatacctctgaaataaatctttattacagttttgtataaatacattttaaaataatcatatcataaaatatatatattctaattacagaatttggggaaatatggaaaaatagaatgagggaaagacatatttgtagttcatttcccccaaacaagcactgttaacattttgtcactttctttttcttcagaatactggactaaaatattacaattttatgtcctgcttttttacttaaaattataaaacttccctatgtactgcaaatcttttgaattcttaataagtgaattatacttcactaagtgactagaaaactgattaattattttggtattcctagtattttttttaatttttgctttttgctatgatgactggcactattatagacattcttttgtataactttttttatagttctgattagtttcttaggaaatattcatagaggagaattaatgggttagaggattaaatatcatcaaaattattcttgcctaattacttcctgtaaattttgtgtgtttccaccaatgacaaagtatgcgagcgagaaattgaattttaaggagcgtgattctaaattttaacttcaatttaacaaaaaatgcttattcaccatgttctggtccttctgctaggtgctggataaatgaaggtacaaaggacaaaagtccctcctttcaaggtgaacagatgtaaagtcaagtaaaattaccattcaggttgataaatctaacaatgggagtgtttactgggttctgaggtgtaggagataactgttgggttgatgagaggtcagggaaaacttcctagaggagctgatgtttgaactggatttccaaaagaatcagtttttgaactgagagataggtaggaaaaaaaacaagttcaaagtatatgttgaaaaaatactcacgagaagccagaatattggaacgtaccaataaagactgaacttgagaaaagcactttctaactcttggtgatagacttatcaggtatagagtttcatgaaacatgcaaaaacgggtgaaaagaatgggagttttttcttccaacgaatcattaagtatggcaagagctgttggaggttcttaaataaggcagattgtagaattttacaacactgagttacttgaaatgaacaggtgataagagaggaataattaacctcttacctacctcatattttgttttagtgagccttggggcaatacaaaaaattaagagtgactaagtagaaaataaaggacgggaggataattagaatttgtttttaaaaatcggctagtactttaaaaggtagttcctatagttgcaatatggattaatgactgtttaaaaaagttcataagtttctgctcaaatccaaaactaagatatctaaaaatggtactgacattattaactgcttgaatgcctattgtcaagagtagtgtttggcacccaccacaggtatttattgaaaacataaaggaataaaatgattcccaaatgatatcatcttatgattaatgaatacacatttgaggacctagaacttttagcagtaagatttgcatacgcttttcctattgaatttaaaaaaaaaaaaaagttcaaaattctgttagattaattctgtgatatagtttataatttggcataagctggtagtagggaaatagtcacttctttatgcccatgatttatataatgaaacaatcttccattcacttagaagacaacttcgatttaaatatttagcctccctagcaaggcccagccatgcaattttttccctgttagaagaattttagcaacagtaaaaaaaattaatatgtaagattttgctatttttattagttttgaggactgcttgccttgtagtttaaagggggtaaaaaggatcattgttttactcaatgtatatatatatatatattattaatggtagattttttttttttttggttgatgtaggaactttgggagtagagcagaaagcctattgacttcaaaaatagtgactcagggttggtataatcattagtaagcaggttgggaaaaatcctaattccagacctcaagtagaattttagtatcagagtcactcctgttccttaaatgtagatctcctgatttcaggccatttttcattctaatagaattagagaagaaaaataaaacctgtcaacgaggactatttacctcctatagataggattgagacctacttttctgtaacttttgaagttatttttgggaaaaatttccttgggttgactttgcccccttcacccaatgcatctgtgtgatcaggaaaagggaaaacaagatttaattgttaacttttaaaaagtccttttgaaagaaaaaaatatatactgtcttatattgacagagaaccaattattgggttacctgcaacactgtatcctccatttagtgctgataatcataatgtccataatctcccaataagataaaataataaagaggctctgaggcatgaacaggggtggctaaaggatcattgagataacttttaaaataataatgatttatagaaattgagttaatatttgttgaccttctacaaactttaaaacagatagaaggttttaaggtatatgttttgaaataatccaaaccaaataaatctaaacttagaaataccatattagaaatatacagtgaacacacacaaggtcaattttaaaaacagcacttagctttgagcagataatttctccttcaccctgaatgcaaataatttattcagcccttctataacaagcttaggggataaaagaggcaaagggcatgagaaatgagtctttggaaaattattgtaactaacactaatgcttatttagcatctttcattcaaagaccttcagacatttcctaattgagttctgtagtacttctggagtgtgggtaaggaacatttagagactcctgtgcccagtgctgtaaggcctgccatccccgtgtggcatgttgcagctgttttgtagggtacatcatattccttcctgggccagagaatggaggagacagcgttatccagctgaaatcccagaaggattaggggaacaggagtgaattacctggattggaatttggccagctttctgggtcagaaatcctattcctataaaaatgttctatctttaaaacattttatatcctgctttatctccaagaaaataaacgctacatcacttattttctgcaaatacctttgggagcttaacattaatattgaggaatgtgacagcctatatctactattaatgaggaaagaaagcgaggttaacattttatctaaaagatattagaagagaaaaactatttgtattatgcctgtcgaaagtaagctgtgggggacatgaagataataacatatgaccagttcccacaaaaaacttacaaactggtttgatgaataggagacatacatagataattatggggaagatatatatgtatcttcagtatcagaagaaagtattatgagaattcagtgtagcctagtgatgacatttaatggcagaagcaagaaaggtaacattgaggaagcagaagtggcagtgcatagaaggaagaaagaaggacaaagacacaggaatgcaggaaagtatcaatgtttagggaagaaccaaaaatgtttatttgggcaaaggatagacaatctgggaaatcaggaaagaaaaggttaaaaacacgtaaaggtagtttaccaaattgcaaatttgctcttaagtataccagagacacattaaagagagcctctatgatgttacttggtagcagtgaatgaatacgatggattggcctggattatgagagacactgagattctgaaaccttaagataataacagatgtggcaggagggctgaagtttcaaagctgagtcatggggagaattagttttcgtgtaactagttgagaagtgagaatcaagaactgattttgatgagggaagatgattaattgatatgtatttgaggtatacacaatatattcacactgacttatcaaaaagacctttgaaaattgggtgtggtccttgaaaagtgcctctggagaacatgcaatgtactgtgtaggttaccagcattggctgtgaaatcagattgccaagattcaagaagtggctctgccacttccaagttcttgtgaccttctcaagccttggttttcttatctataaaactgtgataatcaattttgcggctatgataatcaattttgtgattcatttgcacggagaagatagtagaagctatgctagtggataagataacaatggagagtatagaaaggaaagaaaagagggcctaggatagtggtgtagggaaatactgcattttaatggatgaaaagagggctagtttaggataaatggaaggatatggcagaaaggtatgaaggaaattaggataatgcagtgatttgaattctgagggagggaatttttgcaaaggaggggtggctagtaatgttcagaattgtagagaagtagagagaaatgaagaccaagaaaaggccttgatttcccatatggcagaatttcaatagtgtttaggacaaggtcacgaggattgggtcattagactgttacttgttttcgtatgctcagaacctagcacattgcataaaataaaataggtatttaatgtttgctgaaggataaagaattaatgactttcttgggattaaggaacaaatggcgataacatgaaaaagcttgcttgtttaacaaaatagggggctgggtgtggtggctcacgcctgtaatcccagcactttgggaggcctaggtgggcggatcgcgaggtcaggagatccagaccatctggctaacactgtgaaaaccccttctctactaaaaatacaaaaatttagccgggtgtggtggcgggcccctgtagtcccagctactcaggagcctaaggcaggagaatggcatgaacctggaaggcagagcttgcagtaagccaggattgcaccactgcactccagcctgggcgacacagtgagactcttatctcaaaaaaaaaaagtagggaagataaaagagaaaaagagaattgggagtaatttcagggattcctcaggtcaagggaattaactttggggataaataaaaccaaagcttatttgaaagaagaggaaaaagactaaggaagagaaggactgataatgcaaagaaagagggtagtatttattgggcacagatgaggaggttgtgggcatgagtgagaataagagataagcttggggaaaatgaattctttttcctcagcgggcaccaagagtgagaaaacagcacataccgaaaggttttgaggtggagaagagggcagttatagttctgctgagaagaagagaaatagaagtggggttgagaagttggatggtctttggagactgtagaaaggagacaaccaaaagcattgtgcagtagtagtaacaacctgaatcattagcaggtacaggccttgaatctagcaccaaagtgtccaaaaatggctcccagaacctgtggctcagcaaagtgagactgcagagaatctggcatttttaaaagatttaaggagaagaggtatcttttgtttacattaatttttcttaattcacatggctagtaataatagagcaactagaatttaaacccaaactagctaatagcaaaatccttgatattgtcattctgttatgttccttccaagttgcatctagcagagagatgaggtgagggaggcagttagaaaacaaaaaattgaaaagaaaattttattctctaggaataacggccagaatgatgtcattttggaatgttcagtaacatatttctttttctacttgaaagtgaaacctgggaaatctgtaatttacaatctaagtttcccttattacgattcaatttcattccatttttctgcataaactaaggactctacaggcagcttttgatggctcagggttgtacatagtttttatcagtaggaaagtactatttatagataaaaattatcatagatcagaaataggtagtacatgctatgaaaacataaattggttcatcctggatgtcatattaccaaagttgaatatggctcatcatcatgaatattctatttcttgtgccttgcttacattcctatctatatgtctctggtttagtgactgtgacgattggggcttttggtttggtaagttttcccaaaagcattggtattcctaataccttttttaaaaagtctgtctctttttaaaatttgcttttctaagtttactacaaaggtttactttgctccttgaggaaaaaaaaaaaatgaactcaagaattgttattgaggtaggtgtgattagaatgtgtttgatgttgttttttctttttacataccatgttttttccactttattattcttttgcccatttcttctcccattgctattattattgatgtttaaaatctaattattcatgatttttcccttctctaccaccctatttttcacaaagaaaacagtttcttgagttcagacttcaaagttctggaagacatcttctttgtaccttccccagttattagcttttatctaataaggaaaagtttgatattttttatgctgaaacttttgtaactcttggactttgtttctctggttcccaaggtctctcatgtcttatattgccctcattatatcagtcatcattatttgttcattcatttactcatctatttaacaaatatttattgagcaactgctgtgtgtaggcacagttcttgattcagggggtaggttggtgaagagagttaagatgagagacatgggaaaaggcatttggatagataagtaccatgcagtgctatgaagaaaatatagcagggctataaattagataatgacctcattggagttactttagatagagctgaggaagaagcatttgagctgaggcattaacgatgaaaagaagcaaaccgtgagaaaatacgaagaaagaacattccaggccaaaggaccaaggtgacagtgagcttgcacaggagtagaaagaaagtcaatgtggctggagtgtaattagcaaggagagaagtacatgatgatgttgggaggtaggcaggggatggattgtgtagagtcttttagccaagttaaggaatttggatcttattttaaatgcattgataagccgtttaaggatgtgaagcagggaagtaatgtgataggattttgttttaaaaaatatctctctggctgccatgtggagaatacattgtaaggaagtgtgagtgaaagcaagactatagtagtctccccttgtctctgggggatacgttccaagacccccagttggtgtctgaaactacagattgcacaaaactatatatactgtatttttcctatacatacataaatatgataaagtttaatttataaattagtcacagtaagagatgagcaagtactaataaaatagaacaattataataatatactataataaaagttattctgtgcatgtaacttttgcagtttgaagtgcgacagcaaaactgcatgaatttctttctccttcttcacaatttcatggatagaagatttattcttaccatagatcttagcatatacattttttatttccttattaaggggagaactttcacctttgcacttaaaggaagcacagtttcctttgctgaacggcttctccttggcatattccaattgccagtatcactactcttgcactttggggccattactaagtaaaataatggttgcttgaatacagcactgtggtactgcagcagtctgtgataactaagatggctgacaggcaggtagcataaacaatgtggatccactggacaaagggatgattcacatcctgggctggacagagttaggtgttacaagattttatcatgcttctcagaatggcacccaatttaaaatttattaattgtttatttcagaatttttccacttaacagttttggatggtggttgactgcaggtagctgaaacctcagaaagcaaaactgaattaagaggagactactatagttaggagactcttgcagtctaggggagatgtgaaggtgacattagaaatagtgagaaggatggattttggaggaggaaatttaggacttgctgatggaaaggttgtgaggtgtgagggaaagtgaggaagcatgactattgatctacattagatctagtagtcatctcatagtagatgactactagtcaaaccaactatctaatggtggcactgtaactgagaaggggaaaagtagagtatactaagattggaatgggaaatcaagagtccaggtcttgacttaaatgtgagatttattacaccttacctattagcaatgattcatcattcttacctctcctcctctccctcaaacccaggcaaccactcatctattttctgtctctataggttttattctgaacatttcatgtcagtggaatcatacaatttttttttctgattggcttctttcatttagcataatactttcaaggtgcatccatagtatagcatgttttattgttaaataatatttcattatatgggtataccacattttgtttatcagttcatcagctgaaggacttttggattgtttctaccttttgtccattctgagtaatgctgctatgaacatttatatccaagttttttgtgtagacgtaagtttttatttttcttgggtatatacctaggaatggaggaaatgctgtacatacacacattcaagaaatacaaaggaaacattttatgagatagtactctatagtataggattcaattattactaaacagattaatttgcattataacacatgtgcatataattaatagccaagacacttggaatagtttagatattttgaagtgtgaaaaagaaatggagtgaagaggatggaaggggtcaagggctaaaaaactgcttattgggtactatgcttagtacctgggtgatgggttcaattataccccaaacctcagcatcacacagtatatctttgtaacaaacttgaacatgtaccccctgaatctaaaataaaagttgaaaaaaacaggacatggaagttgagtttcagaataagaaagtaaattatgaccattttcactttgtaaatgagaagtattatatcatgtaggaaagtttttatttaaccatgattttaaattagctatgcctggagttgaaagaaacatctatttcatgtcaaagaaacatcaacctattattgaatgatctctttactcatgtcaattattactagaaagaatttggcttgggagctttatttgtatcatagactttttttagactattgatgtagatggctatttttcttttaattgagtggaaagttttataagtcttatattggatccaccccttcctgttccttttttgttggcaagtgcctgtttttgcatattacttgctgggctgtggcagatacccacagcctatgacactggcataaaatttgctaggcttttgcttttggggtaggaagctgtgctggggattgatagtgggcagaggactgaggagaagtagattgaaattctctttcactaaaacctggggttagtttgatggtcagtgagaagtttccattttaatcttttaaattgaagagtacatttaggattcattgaaagcctaataatgcaacaccctgcctttctttccagtgaaattttgaatgttgaatttcagttcttttgcagcattgtattttcttgatctgcctgacaaaacaagattaacacatctatgaagtatttccatttacactgtggttctaagtgctatgaacagtaaggaatggaaaagaacaaagaaagttgcattttttgaaggaatctttgaattcacagttaatatttatttttacaaatcaaaaacccatttttgggatgtgttatttatttttgtatatatttaaaatttgatgtatatttccaagtgagttagtaaatattgttccccatattacatcattcataaaatgcttcgattaatttttaaaactaggctggattaatagccttttaaagcctttcagttgactcttcccccaaaattttcagtgacatgggaaagttcatattgggaaaatttcccttgatatttgaatggtgaatatatactaatattatttcattatatttttagtgatatatttagtatatggagatatatacatatatagacaggattcttaagaaggagatacaggaaccataaaaagttatgttttgccagaattatgttttgccagagtccactaaagaggataataacacattaaaaatatttttttgcattcactcattgtgcaatatcctattttcatttaaaaaaaatcaggttggtaagtctactggaaacatgagactgcttaactttcccacacattctttctcccttgtgggttttcatatgggtatatttaaacagctgcatgaaaccattatttgtggaggatggattggaagggaacatttacagaccatcttgtataatatttaggtcttctttaggcagaaccatcagagaactaagtatagtgattttatagataggagtttattatttcatctaacttagttttttctcacagtagtttttttttttttttcaaagaacatatttagattcttcactcattcttatggggttgtgctgtataaaagctgtgatttatcacttcttttatagagaattggaaactttgatttctaacattagcaagatgaccatacgcaatttggttaacttattgtgatttgaaaaagcctattttgaggttgtgagaaataatgagggaacctgaaaggcacattgtcttaggcgcatgtttaccatgtgactatggctttccagatggagagaacaaattaaaaattaaaaatgagtgattctagaccttgcctaaattcattgacccagatgagagctcttcactctttcccaatgcatattctcatttactagagagcttgatgttttgttttggatctagttccaattttattatgataaataaatgctatatttaaagataaagattcacaaccagatgatatgaaatgattactaaagcattataaaaatgctattatgccttaacaaaaatataaaggacagtgaaggatagatgcagttaataaagattttttatattatggaaaaatatttgtaacataaaatccaccattttaactgtttttaagtgtacaatttagtggcattaagtatattcacatcgtcgtacaactttcaccaatatctatctccagaagttttttgtcttccttcactagaactctatattcattaagtggtatctccctgttctctcccccgagtccctggcaactacccttgcactctgtctctgtgaatttgactactctgggtacctcatgtaggtggaagcatacactacttgtctttttctgtctgacttgttttactttgcatatcttcaaggttttttcatattgtagtgtgtgtcagaattttatttctttttaagaatgaataatagttcattttatgtatatacaacagtttatccattcgtctgttgatggacatgcaggttgcttctatcttttggcatttgttaacagttaagattttttagatttgtctttacaagggtatatatgattattaaattgaacattctaattggatgaaatgaaaagaaagaaagtatatcagtgataaagtttataattttgatttctttattgtacacaggaaagtgctagatcattttacccccaaatactattattatgttgtagactgcttacttttgatattctatgacataaatagagatgttggagtatacatcatgatgcgtatttatttacctgaagggaaagatggaattcttcataatgcgcatattggatattctgatgaactggacattgccagttctaaactctcatttacgttttgacttcttagtgtatgataatgtgatttaatgaatcacgaggaaccagagggatatttttgcctttttaaacttttagctttgtagtatacattttttctttagcccttcatctgtttttcataattatttttcacttaactagttttatcatattagttttaatatgaatgaaaggccatagtgtttgttatgttttcaaatatgaaatgccctgtacattgcattgcagtgatatggagtgctgtcaatgtcctagacttgcagggaatctgcaaacttgattgaacttttatgagtaataatttagaaagatattaatgtggaatacgtgccattgcattatccgcttcttcctttgtttcactcaatttaaaacaatgcaatacaacaaaacagaaacaaactttgacaaaatccagctgattaacttttgtagtaagttgcctttctacattagtatattttaaatattgaggtatgatatacacagttttgatttctggggttaactagttgaaggctatagggtttaatatgtttctttgtacactcagtgtctaacactagatagagtaaaactgtattcaaaatataccagcattgaagaatagcatctaaaaattggattggagtaagttggatgtcttggaagatctgattttaagatggcagtaacataaaatacacttttatataattgtggtgatgttactgggtgttgtttttttttttttaattctactagtgagtcaggtggctatttctatttgaaagtgaaggttttagatttcaaattcagtatgggttgtagattacatacttctttgtaaagatttcccgtctatatttcgttgctgaatagtcatataaagatggtggaacctttttaagtctctctgatgctccaacaaagaggataaacaacaggatatttttattttatctgatgttcacagtattaggtactttcttttgtagaaagttatggaaattcttattttttgttgccatttgcaaagatgacagtgataatatatttacataaatatactttaatgccatttgtcttttatctggctaatctagtctttttgtttttcctttcttccaaattgttcacattaaatgtaaaaatttctgagccaccttactgtttcttacaaaattgctgtgctttaaattactagagtatgttttaattttttgaacatcattttattactacagctagaataataacccttctcctgtgcatctctcagttattgtaagaattaaatgatttattatgaaaacactgtaaattataaagcaccatatatactttattgatctctgtaagttatacatagttgtgtattgtacaaattgtgttttgttgttgtttgttttttgagacggtctcactctgtcactcaggttgtagtacagcggtgcaatctcagctcaccacaacctctgcctcgcgggctcaagcgatcctcccacctcagcctcccaagtagctgtgaccacaggcgcacaccaccatgcccagctaattttttttttttttttttttttttttttttttttttcctgtagagatggttttgccatgttggccgggttggtctcaaactcttgagctcaagtgatccacccgccttggcctcccaaagtgctaggattacaggcgtgagccaccacaccttgcctgtacaagtttgcaaaaggcagaattttatatatatttcctgtgtattattctaactgggctcttatatgctatcggtattgtagtttcttggacaggcaaacgtttttattgtgttttgtttgtgtgtgttttacttttttaaaatgtcttgggtagttttcggaatctgttttactcatttggtgattataaatttagaagtttgccatgtaagatagtaaaatgttttagatcatttgggttgatttttctgcttctttttttttttttttccattttcctaaacttaggagtaaaactggtttaaaaaactttttgagacactttagaagattaagtggaatggtcatattatactttttcctttggtttttactttgtattaacatgaaggcatatattgcatttagagaaatatgaacacagtaaaatgttttcccatcagcctttcaaatttgttgtatcttgattatgaaagtgttgtcattttaataactagtctaactaggctgtcagctggttcttggaataaggaagctgcttgggcattagtgcttggacctcccactctcttattgtcaatagataacactgaacaatttgaactatttgatttacatacttgttaagtaatttgtatatatgccttctatttggaaaaattatttttgaagtggataaataaaaaaattactataggaataaaagagaacaatgtaaaaattctactaccttagaatgtagtagaatattattttgcaaatttgtaaattgtgattcaagaagtatttttatgaccttcctttccatttgtacactctgaactagatcaaatgaaaatcatcacgagatttttcatgcccatttaatgttttattttagaaagagttaaggagaaaaaaagtaagttgaaacaactgaactaatctcttgtaaccaacattcagaacaaagcttttaaattactcttcatcttctgtgtttcttaggattccatgtgcacagattttattttatgccctcagttcaaagctaaaacacatcaactacccctattatttaaaaaaaagttttttcaacaagagaattttaaacaaaatgtctgttcttttattctattacagaactcaggtgagaatccttctcatattttaacatggaaataatgttttccttaaaaacaacatttttcttgtttagcttaaaagcagaatggaaacctgttctcatttgtacatatttagcctaccctttggcttaccaatggttgagtcatgagcaaaattagtttgtgtatgtattttaaaagtcagatgtcaagtaatcaccttttaaagaggctcattataattagttacatgtatgacagtttactcatgaagaaactgccatttatgtaatttcacagtttaaaagctacatgcttgagcagagtctatgtttctgtatttaaaaaataaagtggattttgtctttgtattaaaacatgttaagtaactatatctttttcatagctctgcttttacaatgatatcaaagcatcaatagaaaggcaaattaatttctgataatttcaacgttattggtatttaatttggagccatacttatacctgataacttgacttttccctttgtttgaggatatttaactcacttaactcacaggctgaaaagaagtagagaaaaaacccagatgttcagtttagcaattaaaaaaggatttgcacttgctgagtacagttttttaaattagacagcatctagttactctttgatctttcatttgtggtgttcatgcctaggcattttaaaactaactaaagtaaaaatgcttactcaggagaaaagacactgaggaccaaggctcctttaataaatggaaggcaactgttattacaggaacataggaaagtattcaaaagatttcttttgaaatcatttcagaagctgcattaaatggttctttcattcctgattctggtttgccgaatatcaccattagtcattaagcacattgctttatcatttcagtctctgtctctgcacatacaactctcacccctcaagctctccactagtctacctcacctttctcttcaaaacttctccaggggccaactttttgttaaagctgtcctatgcaaactcttttactttatatccattacttatttaaattaatttttaccctgtgtttatttgaaatcatttggaaattatgaaataactgaccttaagtctttttcatttatattgtacagtgcttctagtagagaagcactaatatatctatattcctaatatatatatattttgataggatgcgctgcatagatgaagatgagatagctattaactctaaatgaataggcatgaacttttcagggagtcagaggagctatagaaaattcacgtttagctccttttatttaaataatatgtaaaaagtcacatttctttgatgacttaaacctgctgtagttataaagtgcctaaattgtgagtgcaggactcttatcattgaattactcctagaggtcttgaattcatgcacgctgattaaaatatgtaaaaatatgtgaattatcatgtaattgataccatagtgaattaatatcattttgattaaagtcaaatttgtttaaaagttttactgaattcataacagctcaaccaataatattagaaacaccactgctgtcatgtggcaatgcaagtgtttcgacattaaaaaggagtgcagggtggggcacggtggctcacacctgtaattccagcattttgggaggcccatgcaggaggatcacttggggccaggagttcaagaccagcctggacaacatagggagaccctgtctatacaaaaaataaaaacttagctgggcatactggcacatacctatagttccagctacctgggaggctgaggtgggaggatcactttagcccagaagtttgaggcaacattgagctatgatcgcaccactgaattccagcctgggcaacagagcaagaccttgtctcttaaagaaaaaaaaaaaagaaggagtgctgatgtcccaagagtctagacacctgctggactctagttgcctaactttaaagatgagaaaccccggcccaaaggagtgaaatgacccacctcacatcacccagaaagtgtttaacatagaactagatctggttcctatggccctgtaatcatattacttctctatacggctgtggacataacaaatgggaatgaagtttatgagagagggccatataaaaagagcaataggctgggtgcggtggctcacacctgtaatcccagcactttggaaggccgaggcaggcggatcatgaggtcaggagtttgagaccagcctgaccaacatggtgaaaccccatctctactaacatacaaagaattaaccgggcatagtggcgcgcgcctgtagtcccacctactcaggaggctgaggcaggggaatcactcgaacccgggaggcggaggttgcagtgagccaagatcacgccattgcactccagcctggaggacagagtgagactctgtctcaaaaaaaaaaaaaaaaaagcaataaccctggcttagattatcttttatactttgaagtgttttttcatcatcaagaaataaaatgataggaaaacttgtttaatgaagataatgttatatagtgcttatgaaaatagtttcatctattacactattaatttttgattctttagaaactcagtaatagcaggagcatcatttgaatagtactcaaactttttgacattatttccaattgtgattttatttctttataaggcctgagaaataattagggaagatttggtgagtgcctctttagacccgggaatgctaatacacagagttataaaatgaatggcctgcggtcattgaccttcttagttctcctaacccttagttctattttatgtccattatctttgtttttactttgtggcatgtctttgctttttggtgttgctttagtgaaagcagatttatgggagagaggtggaaatgctagtcactcagtttggcttttcgctagcacttcttgaaaatattcagttggtgaatattgaaatgaatgacaaataaaatctgagggttatatgagtttcagtttttaagtcagtcatttgaaatatgtgatgccacagtaactgctaaataagtgactttgtgtttctggttacaagactctactagttcagtggtaagtcctatagccgttgtataagttggtgagaaaagatgtaaagtgtggtacctggtatattgtatgcacaggtgatataaaaataaacaaaggtagaaaaagtcaagtcaggtattcactctacagaaggagagtcaagtcagtgagttgaaccaatgagcaagtggaagaaagttgctgtgagggaagtgatttaaacagttaacagtttcattcttttctatagccaggtgaaggaatcataagttccatgaattgggtaaaaaagttttgtatggtggaaaatgtctcagtcataggcttggctatgtgaatgaaatgattttggttcctttgtagtttgatccttgatgaacctgatattcagtgtaaatgtttcactaacaatatgtgtacattgcagtttggtagaagatgtctttctacctacagcaaatgtttttatagtatatatggctaatactatctatgagtaccttagtaaaatatctctaaaatacaggaaaacctttctgctatggatataaaattatttcatctcaggagactttctagccttactactctcattttaattcatcatattattttgaagaaactactattgaaacacaagacatgaaaacaagaagtgaacagaacatgaaatgaggagcttagaaaaaaaggttaacaataagtatgttgttgaaatgaatttgctgttaatgccatctgaaaagttaaagagttgtagtcaaccttatgaattcattaattaatataacaactttgttgaacacttactgttttttaggaactgaggataccaggtgaacaaaagagtttctgtctttataaagcttataatctagtggtggaacacggacaacaaacatatacctaagatgtgcacgggtgttaatacgtgtgtcttagtctcttcaagctgctttaacagaatgccatagactgggtggcttataaacagcagcgatttatttctcacagttctagaggctggaaagtccaagatcaaatccctagttgatttggtgtctgatcagggcctgcttttttgttcatagatagataccttttctctgtgttttcatatggtggaaagggcaagggagttctctggggcttcttttataaggacactaattccactcatgagaggtctgccttcatgacctaatcaccttccaaaggccccaactctacacaccgttaaattgggcattaggatttaacatatgaattttgaggggacacagactttcagtgcagcaaagataaagtgctatcatggtgatgtaatagaaattgattcagaaagaccagctttggatagggtgaccaggaaaagtttctctgagaatgaggcatttgaattgagactcaagagaagaggagcagccagcaagaaaagagcacgtgaggcaaaagaaatggcaagtgcaaaggtcaggaaattagacagaatttgccatgctggaagaacaaaggaaaggcccagtgtagttcatgttcacttagtgagggtggaagagcataactgaaattggattggtaagcaaaagctatgtcatggaaggtcctccggctcatggtgagaaacgtggattttatcttaagagagcatggtcagccaaatttaagcagaggcataacatgatcaaaattatgtttattaaaaaattgttctggattccctagggtaataggctaaggaaagatgtaagaactgtggaactagttaggagactattgaaataatgcaggaaagagacgatgatgatgacttaggcgggaggttgtttgttaatatataatccactgttattgtggctgcaaatgcaatcctgtgtctttccattgtccatttaaaagcaattttacaaatatcacttttttaaaacagtaactacaatgccataagagcctttttttgttgtaaactactgtggcaagaaattagttttaggtagagaattgcatgtgtacttagctgtgattgtattaggactgttctttggaagacttttattaataatgaattaataatagtgaaggttttctaagcagactctcttgcactgtagtaagtgtttcctatccattatctcatttgatcttcactaaaatcctgtgacatatgtgctgttattatttccatgttgaaaataagaaaactaggggactgagaaggtaaggaacttcccagggtaacaaagataaaaaattatgcatcacaatttgaacctagttctttctgataccacagctcaaaccttaaaaaaatctaaaataccttttattgagaaactacttacttataataaaatgcacagatcttaaatgtattcagtggattttcacagttgcatacacatatgtagctacctccccaaactgaatacaaaatgtttctagcactacagaatgttccttcatgctccttctggtcagttttcccccaacatcctcccactctacagactactatctggttttgatcaccatatgttagttttgccttttcttggacttcatgtgaatggaatagaacaatcataatttttggagtctcatctgtgttgttacttattgtttgttctttcttatggctgaggagtagtagtattttattatatcaatataggtccatttcacctgttgagggacatttagattgtttccagttcttagcaattttatgaataaaccagctatgagcatatatgtactagaatatgttttcatttctattgggtaaatacttaggagtagaattgatggattgtaaggtaagatgtatgtttgcctttttaagaagctgccaaacagttgtctcaagtggttgtaccatttcagtttcctaccagcaatgtatgggaattgcaattgctgtatatcataccagcatttggtattgtcagtctttgttttagccgttctagtgggtgtgaactggtatctcagtgtggttttaatttgcatttccctaaagacaaatgatattgggtcccttttaatgtgtttagtggccatttatataccttttcttttgaagtatttaagacttttgccctttaaaaaatgtgcattatttggatttttattgctgatttctaagaattctttgtatattccagatacaaattcgtgtcagatatatgtattacaaatattttcttccagactgtggtttgcctattcgtttctctagtagtgtgttttttgatgagtagaaatatttaatattgattgaagtccaatttgttttgtctttcatagttactgctttctctttcttaagtaatctttgcctgcttcatagttacaaagaatttcctcttgtgttttcttctagaagatttactttagctttagatttcagtctttgattcatttagaatttacttttgtgtataatatgaggtaaagagcaaagttctttttttttcatgtttgtccagttgttccaacatcattattccctattgaattattttggtgcctttgtcaaattaattggctatgtatgtgtgagtgagtttctggacactgtactgataaatttgtatatccttatgccaatatcacattgtcttgtttactgtcacttaatcaggaagtgaattttattctttttcaagctagttttatctatccgagcttctttcatttttatataaatttacagagagttgtcaatttctttaaaaaataacctgtcctgatgtttctttgaatggcattgaatctctacattaattttgtgagaatgaacctattaatatggagtccttcaatctacatacatggcattatctctcatttatttcatagcccagaataatgcacaagaaagaacacatgagcggagactagttgatcaattacctctagcaaacatagggtctcctctctcttttaaagtctatttaaacaccaattctaagaaaatatgcgtttggtgttaagagagggtatctcatgtgaaagtgagtgagctatacttccttatattaagaggagcggttaaaacttcagaactgtatcgggtttcaaaaaaaattgttttccaaaaaaatgtgcagccctttgactagtaatatattttctgtactagtgaaagtgtgatctctcgtagtttaattcaattacctaataagctgatatgtgatcactagtattctcataaaacatcacataaaaagcaagcagtcgtggtcaggcttggtggctcacacctataatcccagcactttgggaggctgaggtggcaggattgcttgaggcctagggagttcaagaccatcctgggcaacatagtgagaccccatcttgaccaaaaacaaacaaacaaacaaacaaacaaacaaaaattagccaggcatggtaatgtgtgcctgtagccccagctactcagttgggtgaagcaggtggatcacttgagcccaggagtttgaggcttgcagtgagccatgattgtgccactgcaccccagcctgagtaacagagtgagaccccaactcaaaaaaaaaaaaaaaaaaaaaaaagcccaagcaaaacaagcaatcttatgtggaggcagtcagaaagtgctttaaagtcgtgaatagagttgcattttctaagtctaggggaaatgtgtacaacaaaactaatgagagtaaaagcttttgggacttgaattttccagtaagtcaatagggttcagaacattcatctttcaatacttaattttggaggagtaatataatatgtacctcagaggattactgcaaggattagagcaggaaatctatgacaagtgctgagcacattgtttggcataaagaaggatctcaataaacttaaatattttcatctttatctagatccatgacaagttctgggtgcaggggcaggtttttaacttgtttcatctctatgctttcactttagaatgctgttgttgaccatagtattcaaacatcttgcagaagcaccactttcctcaaatgttaatttggttttgatttctactttataggcagatatatatgtatgtatatggtatgatttacttccttagatggtatatatatatctccaaatttagtgtccatttaacataaagactatttttccttttactggacttgaaactattggaacttagaagaatgaaactcagtaaatttttttttctaaatccagttaattacagtagttaatttacagaccatggtatttgttattaacactaaaatataatttagtgttaggtttgttgatagtacatttaaatatacttaggtttgttgataatacatttataagtgatttgttataagcagattaaacctattagcatcaactagaagctacttgtgaactatttagggcaagagaggtttaccttacattagtggcttagaaaggccagagggacttgttcctttataggcaaagtaaatttgacatagaacagagtgcgttcactttttaaagtatattttatattattaggagtaatttattttcattaataaaattcgataggctagagttacaaaatgaaattgaaaagattctttttcacaccctgtttccactctgcaaaaatagttgctggttatctattagtagtaaactgtgtatctttacataattatgtgggcattcatcttttttagcttaattgctaagatatatacatagttatatatacacatgattttgatgctactcaatctgagacccttcctcccacaatctattttcagaattcttacatagtttattttcatttgatgtagtgcatttctagttgcacatcttaagcctattaaattaaaatgggttttaatgcatatctatttttaaattttctgagaaatggatcctttggaaattaaatcgctgaatggagaaaacgatctttatagctaaatgcgagataaagtaaaatgaatgaaaaaacagatttagtatgtcaaagtttgaaaaggcaaagaattttgaccactgtattggttaaagaagaaattttaaaacaaaaaattataggagaatatatatattgttggaagctgttataaaaagaaaagttatcatagtgttaaatgtatgtgctaaatgacctaataacaaaaggaaaaaagatattatctaacgttaccttaaggctgtatgataacagaaattaaccaaggaaagcaagaagaaaacttataaagaacaaaatacaaagacaaataataggaaaaaatcaaaagtatttacagtagaaccaaaagccgcttatttcaaacaaataataaacaaataaccaaaggcatggactaaaaatccaagagattgggaggctttttttttgttttctactttattggtgctttatgcctagagtatagatgtacctggctggcagtaaatgctcggtaaatatttattaaatacattaatatttcttacatattttaatagattaattgaaaatgaaagcaccatgtaataatagataaaatattaactgttataagttaatattgtatacatttatgtattaagcaaagtatacatctcaattccaaacataattttcagagtgaaaacgatacagtaactagtaaaacaatatgccgagaatcgtaaaaagaaaaaaagtataattttaaagacttcaataacaaataattaacaaaacaaatttgtattttcattttgttgtcgaagcccacagttttatataaagtaatccaaaacatacgaaaagtagaaaaatttctatttcattttatgaagaaagtctctttattccaaaatattaacagttcacatgaataaacacagaatccaaaataagagcaaatgaaataacatattgagtagtgttaatatcaggaatgcaaatctaatttaacattaggaattttattaacgtaatacgtaatataacatcaatatgttatataacaaaagtcttaccctgataggtattgaaaaggcaattaataaaatttattcacttcataaagaaaaagtaaatattaattgcagaaacagaaggtttttaaaaatactttaaccttgataacaatcctgtaaatttagtatccttcagtgtttttctaccccattctttgtatgttgcctgaatgctacctatgtcttttatggtgagtaatgtcatagtcaaacagttattggaaatgtataatttcaattggtataattttgctcattttatatatatgtatacatatacacacatataattttttgcagagttttgaaattgttaattgcttataattttcaacactggccagttagcccaattcagataaggagtatagcgtgaaacctcactgatttattttactttgtaggaaaagtagttacaattatttttagtaaagtggccggatgcagtgactcatgcctgtaatcccagcactttgggtggccaaggcgggcagatcacttgaggccatgagttcgaggccagcctggccaacatgatgaaaccccgtatctactaaaaataaaaaatcagccaggcatggtggcacacgcctgtattcccagctagttaggaggctaaggcatgagcatcgcttgaaactgggaggtggaggttgtagtgagccgagatcgtgccactgcattccagcctgggtgacagagtaagactctgtctcaaaaaaaaaaaaaaaaagttatttttggtaaagaaattcatgaaataatattcagtaagcttgtgtttagacactgtaatcttaatgattaataaagtaataaagcaattgtaatttttttgaaactcaaaaaattttatatgtgttttctctttaatcctcaaaacaactctttcttaagagttatagtattattttcattttgtatatgaggggtctagctcagagataataaattacaaagtcgttagagaaagagattcttccccatttttaatatttccttcaaggtaaagggaccttaattagtgcaattagtgaccttctctctctctctcctacttcacttccccttcatctctgctttggtgaaggtgaaatagcttaacgtgattgataaatttgggaagaatgtattaggcaaggggttttggaacaggcttaactgcaaggagcaccaattgggctctgtagtctagaggaactagagtctaggtttcaactctgcagagggaaagctgggttctggctgcatgaccgtacatcttgttttgcccaggacacttccacttgatgtcgtccccaatatgattattcataacaccatatttcactcccttgagtaccccagttggaataataagctatatgttcaccttaataatcctgcataattctagggttcggtattaagaaagcacattgcttgcatataaataaagagccgtgtactttaatattgtctttataagtattattttggcctcagtcagctactccattgttttatttctccatttctgaatctgaggagggaagaggagcatttttgagacccagcaataatttttgattagattagattttcagtgttttactgctttagtaaactttctaatgtactgtgccattccatatgagatatcaaattagaggtcaatttaagcaatttaatttccaaacaacttactcttttaagttatttggcatcatgaagacaaataagttgatgggctattttcaccttttagttgttttggtttaggatttgagaactttggaggaatgtttgaaggtttaatgtagggaagaaaagcaaaaaactttttctatactctcttaagtttgtacatggaaacctgtgaattaaactgacaatcggtaggttaacaagagaaaaatgaatttatgcatgcaacatacatatacatgggcgtgctaagtgatgagtaacttaaagggatcattagaatttggagtttatattcctaacttagtaggggaaaggcagtggggagaaaaggctcctgtgggaagaacaaataggtttctttaagaaagacaagtgggttatttttggtgaacaaacagaagataacatttgttacaatgtttgactgcaccagtacaagtggtctttatatcgtcttagggccagaaaatgcccccagatagaggatttatgataaatttacttttgggctctctgctgggattagaagccaccacaaagagataatttacggcagtcctcatttgttagaagtctttgcttttacttttattcagataagagaaactctgaagaggcttgtgtatctgttgaatcacagatgtcttcagcttaaaataaaatttataccaaccatggagtcccaagtgggtccccacatgaacattggtattcatttactgcaacactctcattttccagcttaggaaacgagggtctggagatgtgacttagacaaagttacatattgtattagtgacacaattggttgtagaatttcccagtcctcaggttcctgggtaaagtgtttttaataatatcccctctctgccttttagggtaggaatagggaacaatcagtgagaattatatttaggtagctgaattagaagagtaaatctgatgtttttatgaaaagctttatttgctatttcttgaatatcaccttaatatctcaacttgatctgtagaattttgatcacaagttacctttccactctcttattactagtaattaaattgaaaattcacctctgttattttgtcacagcctaccgcagatgattatctctaatgagctccttaggtgcagagcctaggtttattccttcctgactgcttagtagtggtatttatagaagtagcgttaaagtgagtaagcgtatgtaattcttatatttacctaagtgaagtttggaaatgaagttttttatgtgtatttcagcctgtttatccttgcatatgtaaaccaattacatcttaacatttgtttctggagaacaggccagaaacaaaatattcacttgtacttaatatgttgtaataatgggcatattcaataaaatatgcactggtaatacaattgggcatcatatctgattggatgaaacagaatatgctaaatgtgatcatttttctgtcacagaatttcatattgagaatatgccagttattttgaagtcagtatatttgctgggattacttggttctgcttgaaaggatagtgggatttttttttctgtgattatgatttctattgttaaaattattattttttgcttttgcatctaaatatgccctttcataagcagctgaaataatctggtcagacaataacccatttctggttaatttgatattagcttttttttgaaatttgaggatactttttagcatttatagatggccaatatcagattcaaatcaccagtcttcttaagaggattttaatgcattcccacttttaaatattctcagtatgtttactgctctcagtagtgggatgtgttgattctgaattgctaaatctattagaaggcgtttttttaaaatgtgtgagtgtgtgtgtgtgtgtgtgtgtgtgagaatgtgattgttgattttctttaccaaaaattggtatttgattagagatgggaaatacctttgagtacttttaaaaatgcaacttaaatttggttactactactgagttgttaatcagaaccctttaactggtggcacaggtaaatcatggccaacaagacctgtggccatccccaaatagactaatgatttgtgaccccttcaaatgctagacatttgaacaattaatattatctgagaactgttgatagcaactcggcttgtcatctgctatcatgagtaatgtagctttgcctttacatttgcaactctgttgtccaaaccaaaatttcacagttaaaatctctgtgatccttagaatataatttagtattattctaatcaatcacctctggttataggagcctgaagggttttaatcttcaacttcaagctacttagctaagtattctttccagcttcttatcagttctgtagtctctctgagttctgtatctttctattcggttacattttaggtgatgttttagatcccatagagatcagcgctttgagtaggtacttggcttcattattcttttatttaatttgggatcccatataataaaatgtgactaaacttagggtttgaactagatgttaaaagtgagaacagtgatcttagaggtttcttccttccccatcccccaagggggccttaaatttttagagttagcttgatagtgttttgtgaatcatacgtatttagctagttaactaccagttgtgttcatttccattctgtttcaaagtagtgctttgaggattgtcaaaagacaaattttcaacaaatttagtttaaagatctaattggcttttaatagcaattcacgaattgagtagcatctcactgaaaaatttagaaaagttgctctgaagggcatggtagaatggtcagtttttataagatagcttgagcaagaacaggaaaacagcataatatgaaaagcaaattggttaatatcaggttacttcaggttactgggttaaagcagaggggacttaccatgttggccagaactggcctatttgagaatttggctatcatctctctcctgatttctgaacattagtatgagggactccattttggtttggtctattccgttgggtcctagtacaggatctcagtccaaatcaatggcttcctataaattttatttaacaggaataaaggatgcaagacatagggaaatttcaagatgacaaacgtgaagctatataaataatcacataaattattcattaacagtttatgtttatcttgaatttactttgttatcactccattttttacttgagcatagatgttagcatattgttaaattgttatctatttcattcatttttaatttagattttcactgttttttcttaatatttagtagtatttaggtttctttctcaaaaaaatttgtcactatatccttttgtctaaaatgttgtctaactttagataaaagcatatagtgacaaaattttcttgaaaccacctttgcaaaaattatagctgagaaaattattacagtgaaaaagattggacctaaccaactcttatcttgcttctaacttccaagctgtccttgttcatccctgggcataggccgaactaacttcgggaggaacttagtttatagtttagctgtgaaacaaagatgaaaacagccctttcccaaacaaaacccttccctgcctggggactagagtgcctttgcaggactaacaaacgaactagccacaatattagaaattatggtttgggagtcatacagttggaggctgcaagattctaaaccttcccaaattgctcctggtgataacatcactattgtaaaacctaagatcatagtttgagatattttgcagaccctgcactgatggatcatctggcatcacttagattgacaaactggctcatctggtcttgtggccaccacccaggaattgattcagtacaagaggacagcttcaactccctgtgatttcatctctgacctgaccaatcagcacttcccactttctgacaccctacctaccaaattatccttaaaaaccctgatccccaagttttggggaagactgatttgagtaataataaaactctggtctttattattaagtagtaatacaactcaaataagactgatttgaataacaataaaaatagctggctctgtatgaattaaactctctattgcaatttccctctcttggtaaatcttctctgtctaggcagcaggtaaagaaaacccattgggcagttataatatttatgtacatcttttgtttctattctgcttgaaaaataattcccatagatttgctttaaaaatttaagtcttctccttgtgccacttaacagtattaattttattgaagactgttgtgaaaaaagttaatggaccctcaagagcatgatatatctaatggttaacagcataaataactgtgatatagtaggttatactcttaggtctatattataattgaggtcagcaatctaactttaatatagttatattaatataattctgtaagtatagctttaaggtttaattatttaactaagactattacgaaggaaataaaaatagttaagcatacgaacaattctctctccagtaatcaaagattttaggaatgaaaattcaactctctccaccatctttgctatttaaaattagagaatagagatttagtagaatcatttcaagtggtattcacaaaaaggtatttgcctttaccttaacactcacttttggagataaagattttatttttcctttgcttatgtacaataaaagtacagttgagttatatatttataactcaagcttcaggcagtaccaagtcctggaattttttaagaattcaatcatgagcattctataaaagttgattatacgagattatccaaaaggttcctgtaaatcttactttatcacctacattttaaaaactcatattgggtagagaccagcaaagaaagtttttctgcaagtaggatttttctcttatttttttaataaacattttctttggctattgatactgtttctaattgattttataaatgaatagaaaagataagagaattctggaaaatataaactactcacaaattaaaatttattgctctttgagacatctgcctttccctcttaatttgtgatgataattgctgttctgagagggacagaaaaaacatatcccagtggcttatttagcaaaacactagaatgtttatttgaacctgatcgcttttaaaacttggaaaaggtaaaataggtcagaaagatgtaatcttttatgggaattccttcaaacatttaattcccaatattaaatgaaaataattggaacacaaagagcttggaacactattcacttgttcaattttgtgttcataactgtatcattgggttgtttttgttttggtgtgcaaaatattcctaaatggcaccaaacatgaatttgtagggattcagttttagaaacacataaagctaaacattctgctcattaccatgtgtcctcctttatatcactaagttcactttgctggatgttactacttttatgcagtaattttattaagtatatcaaaggaaatatttcaagttagagatgagttctacaggcttgtgtgtatgtctttttttttttttttttttttggatggagtcttgctctgtcacccaggctggagtacagtggcataatctcagctcactacaacctccacctcccaggttcaagcgattctcctgcctcagcctccagagtaactgggactacaggtgtgcaccaccacatgtggctaatttttgtattttttgtagagacaggggttttgccatgttggtgaggctggtctcaaactcctgacctgaagtgacccactcgccttggcctcccaaagtgctgggatttcaggtgtgagccaccatgcccagcccaagcttgtgatttgttcaagattcatcaactgacaagaaaatgtcaatcaagtaacagactactttcttttagtgtataatagaatgatacttggctcttgacatttgtcttttttttgtacaatactgtcatgacagccaacacacttgtcttttgattagtaaaagctgggggcttgatagaaatcgtagactaaatttaactagtacagcaaattgagttgcgatccatatctgtgaatcttagaaaatttgttcttaatatttttgtactactgtgagcaaatgactgaagtggagcaattgtagagaaggttgatgcaaatacatacttagaagcctagtacctgaaataaactaggagcaaattcttcagtgacttcagtctccggtgatgtggcacaagtatggctttttctctgtttctggcattaggcttttcagagaaactaatgggagtaatggttctctaggtgtgtaataattttttatgactcttgaaattactccaaaacaaggtctccctatcagtgatttgtggaatagtagtgccctggaaatgccagtaagttgttctgagaaaagagaaattacttgatcaagcgaatttgagaaactttttgttacacaatcagctgtatactgtttcactgtaggatatctcagagtcaaaactaatgacatatattgtgaattgctaagaaggaggtatacagttcacagcatttcccaaaccgacttgatcctggaaaccacctataacatctagtaagatgagaatgctccatagaaattaattgaggaatgttatctaaaaacctaactatatattaatgtatactttctagttactgttgaatctaatttatattcaaagtttaaaaaatgttggtagaaataacttgataaaattgaatggtcttttatgatataaactcatagcatatgagaataaaaggaacaccacttaatagtaactaccaaaaactctaaaaaataatatttaaaaatgaaacctagaaacatttcctttaaattaaggaagaagagaagaatgctcactgttaaaaggtttcatactggaaaagaagaaacaaattctcaatatttgcagaggtccaggagaatgtacagagcaatcttcaatatcaacaaaagttgctagatcaagatcaatataaaaaattaagtgttcctatacacctaaccatacagttacgaagggtaattttaaaaagagaccatgtagaaattacataaaagaatgtaaagtaattgagaagaaatctaataaaggttgtagaagatcttttatgaagaaaattttaaagtatcattgaaagctatatctgtatggatgggtaagagtcagtatgtttaaaatgacaagtctccccaaattaatctataaattcaataaaattttagttgcaaaataccataagggttttcatataacttgataatgtagggaaggtaaaatttttctctaaccccctgtggtctccagctggtactgatataagacagatcaacaggagaaaaacatacacattttatttacatgtgcctgtaaacaaaatgctctcacaagaaaaatggagacccaaagaaatgactagctctaaatgcttacatactatgtggaacaaagagtggcaattgtagaaaagtgactaggaagagaggggttagtttaagaaggtctgtttgtacagatttctttcagccttaactcccctcctcttgtgatgagactatttctcttctcctggtatagggaaggtatgggagtttcaactcctgctttatgaagaaaagggaaaatcagagtgcatctcttgcacctgctgtttttcaggtgcctttagctcaaaatgatcaacatgtcaaatggtgtattttgggatggcatcctgaacttgttcagtagataagttgatttatgtggaataataagggccaaaaatagcaaagataatttttaaaaagaagaagaatggagtgagaagcagcggaattggagtgtaattgttataccagatacccaaacttacttgtggtaaataaaagaatgtggtattggtacagggaaaaggaaacatactgatatggcagaatagaagagagcactgaaaatggatccacatatgtgggaacttgatgtttcttaaaggtggtatcataaactaatagaaatagggaccactgaatacatgataaattagtttatccacagggaaaaagataaaacagacactatttgaaactttaccccaaaagactaaatatgaaaagtaaaatggtaaagcttttagaaacaagttacaacaagttatagaagagtatctgtatgatatagtggtaatgaaggatatatttgttttaaaaactcacaaaaaacagatgccatcagtaaaaaattaatagaacttaccacattaagatacaaaaaaaaccaaataaatgcacccccccaaaaaaaaagtttgtattaccatgaagaaagaatatgctacatgtaaatatgtaagccacagcctgagagaaaaaaaatatcacatgtgaaggataggtacccaggctattaaaaaacaaaaattctgcatattgataagaaaaagacagaagtccttatagaaaaaatgaggaaaggataagaactatcacataagaattgattgaagttgtcagtaattatatgaaaagatgttcaatgatatgagtaatgttaaaaaatgcaggttgacaaaaagagagtccaggtcacatccattagattggcagctactggctgccaatattattattaaagagtcatattaataatactatatataatattgttatactatatataatattgttatcatattatatataataatgttgttatattacatataataatgcaaactatcacaagtttacatttaattatatataatataataatattaatattaatgtcatgtaacacttattgttggggaaagcatggagaaacaaacttgtacccatttctgcaggagtatagatttgcaaagtcactttgaaaaccatttgataatacctagaaaaattgacaattttcattcatatactcaaggattttcctactagtttacaatgtaaggaaactctcacaattgtgtataagtaggcctgtacagagttggtcattcaggactgtttgtaaatgagggaaaaagtgaacacaatttaaccatctcctcagtagggtaatgcctaaaataaactgtgatatacagttatttagtaaaacattattcaatggttaaaatgaggaaatttatttatttatatcaacatggttaatctggaaattagagtgagtaattaaagtttcagaggcacacttacagtataataccatttctatgaaattttaaatgcagaaaacagtattgcatatttgtggatatacatgtatagtgaaagactaaaaacatgcatgggacttatacctatgcattaaaaaaatattttatccctaggtagaaaggaaggaaaaagatggaggcttgagggtttatgtatatatatgactttttttcccttttttttctttttggaaacaaaaatagggaaatcttaatattggtttaaacatggcggtggataaatgtttttgttatatattttttacgtgataaaactttcactagaatttaaattaaaaaaaattcaaagtattcacagatttccatttttacaatttcagaaataggcataggaagaggagccgttttcagttgatcactgtagctagtgccttgaagatgaatgtgccttgaaactttcaaattatgtaatttgaggtgaatgaagtaatggtatatagcttttgctgatttgttaatatttaattgggccaggaacagttcaagtctttaaatagaagtatatttgtacaatatccagcttagcatccagcttgggaaacactatttcccatcagctttaaagcataagtctataaataatatatgaatttgaaccttattctaaagatagtgagagatttaaaataacagtaaacaaccatagtcttcctgggtcattcttggacacatttttgagtaggtcaaagttaattcttggctattctgggcttttctcaagtttgcttctatctcttagagattgatggctgcatcaataggtgatacattcacatacttgaaagtataagtgactcaggatgcataatgagttttatctctaaatgatacttagattttaagaaagttcaatgacttacactaaaagaatgaatttctaaaagtggaagtttaaggcttgttcattggagtggtgggtgggggtaggtgtttagacaagggccttcaccagacctcccagttccatcccctagtgagtggctgctctacttaagagatcagtgtttgttctttttacctaggaaaataaagtgagagaacaagtatatttaatgaaaatggtaacgttattttaaaaaattataaattagagaccaattagaaatcacacaacctcatcactctgaaaaatattttgtattcagatgttctttctaagcatagaatgaagtctaagctgagatgtcaccgtggagagttagtgaaggccctgtgataggttttcaataagttaaatgtagggtccatttcactgtgatagccgttataagtaaattcctagatcatttattttcataggtcaacataaaggctagttccatgttgatattactctttgcagaataaccatttcattgtaaaccaatattattgtgtcatttcaatttacttttgcagttgctttgaggccaaactttatcaactcatttaaatatctcttttagctcaaataggcacaatctccttagtaaaaatatgttcacatctatacaaatagatattttagcttttagtttaggttttgaatttatttctcagtattattttcttttttaagcttattacagtttccattgagacagttggggtaaagggagatttagtggcattatctatgtgcatgttagtattttaagaatgaattgtgaaggataagttgggaacttctaaactgtgcatacatataggctaatatattttcaactttaagtatgtatgataagatagataatataatgaaacataatagatgatgtatatagtatatttatagatttactaatatataattatatttttatatttaataaaatataataaatttatattttttgtaaattcattgaaatctaaaattcagtgaattttattcaacctaaaggctctttaacgtatgtcaggtattagaatttaaaacaagatagcacaactttgtagcaattccacgagattcagatttcaaagagtttgagctagaaagtatttattatgtagaacacattccagaattagtccaaagaagacatgcattagagaaacattcgatctcttactattgaagttgtgtacttgatagatacttgagagcttattaaagcagtttcccatttttcagtatgaagctggtatacctaaatcagcaatctttgattctatattttctctgaaaataggacaaactcaccttcctattctggtattgccttgcctagctgctgaagttgtagtggcagcaacagctgagacagcagcaatatatcaatagaaatagtctgtaggatggaactgcagccacacacaagatctaagacttgtctaaaatttaatacagacattgctttgctatatcaatctaaataattatcccttaattatcatccctttattttcaatgtttcttgaataaaaggaaaggaataatcgattgatagctgtgattgttgtgtgttgtgaacagtagttccaggtgtgtgccaaagagcaaggtagtttattgtctttgtcagaggttagaaatacatggtctcagatagtcctaggagctcagaaggtctctgtattaataattttagttccttggcttttgttcttccagtcataataaacagtttgcatatcttaaatttgctccagaaacctgatatgaatatcctctaaattacacaattgtcctttttcactgggctggttagtgatgagtttccagctcaggtcctatactctaggaaataaatataacttaacctgctatcatctacatatatgtcattgagagcttttgacaggaatttattcacaaatatgtaagtcttgtcaaaataccctagtttttaaatatcctgaaatgtaagaatctcggaaaatctgtagttctgagattctggtgaacccagagcgattggagccttaaatagttttcttccaaatatcctaatttctttctctgttttgtttctcataacagaatcaaaccatggaaataaatgaagttaaagataaaagtgcaggtttgccagtcccaccacccccgtgcctggcattaaattaaaaataaatgccattctaaaacctggagctgcttttgctcataaaagggagttctacctagttaactcctgtttattttctggggcattaatattcagtgtgaagtctctcatatatatatatatatatatatatatatatatatatcgttcacggcttttagcttttcactctactccacatatgaaagcctccttgaaagcagagcagattggaatattgtttattcatatagttaccttatggcatttggcatttctgactctttggaaccagggacataggaatttggaagattgtaagatagtgattctctagtacagcctgcttacattcagccaatcagcccccaaaatatttaaatcattccaccctgtacctttcaccttctaagtacgtatacccatatgttaaaaacaatcttcccttttctactaattttttctgtttgtcttgtgttgtaattgaattgcaagatgtgggacaagtattttaaacactttttttttcatttctggtcctgatataattcagtgaatattaatatatttaagttaaaacagataatattcttaagtcataaaaaatgataatcttaatttatctggaattgagaaaaacatttattttggattacaagtaaaatttctctgcaggaaaagctagattataatgtggatactcaagagatgattttgagagaatgtaatttatttcacagatgatggagtgatttattcttaaaaactaaatggaaaaaggattttctgtctttatagccaaatcagcttactgtatcaatatttttctgtccttaaaatttcacatagtttagttccattaaaaaaacaaacaaacaaacttctgttttgggccaggcgcggtggttcacacctgtaatcccagcactttgggaggccaaggtgggtagatcacttgaggccaggagttcaagaccagcctggccaacatggtgaaactttatctctactaaaaatacaaaaactagccagacatggtgcatgcctgtagtctcagctacttaggaggctgaggtgggagaattgcttgaacccgggaggcggaggttgcagtgagccgagattacgccactgcactccagcttggggcacagagcaagactgtctcaaaaaacaacaaaaagaacaacaacaacaaaaccttttattttgaagggaagaaaacgtgttcagtttgatagcacatttatgagtagagtgtagactgtcaggaatatttagctttttaaaaaagattattcctacagctgaggaaaaaaaaactttctcccactcttgatgtgaaaattactaggtgatttgcatgtgagaataattttactgtagcatctgagaagtggtctgaatgaagaggtgagcccagttagttaccaggcaacaggtggctaaaggacatgaactctggcaaacatcaccagttcctcgttcattttattgtcagttggagactctccagccatgcagcccagttcttgagaattgtttatagaattgtttgcttctgaaggaatttgtaaccacattttgtttgatgaatactaaacaccttagaagccttctgattatactggcattgactttgtcatgaaccacttaaaaagtgagccatgatgactagtaacacaaatgtgggacccttttggatgaccacaatttgcctataatatagaaatatggtgctattcaaaaaaaagctcagacctgtgaacaccagggaagggggagagaatgggataggaaattacagactggagaagggactttttttttatggttggtatacttatactttcccacttttcagttgtgtgaataatatgagcaaaaattcagggaagtttcatggtgttgtatcttcattccttttggaaaattcaaaatcttatgtattgtattcaccagagaatggaagggaactaacaactgagcctctaatattccagagaattggtatcagatgctttatgcagattatctcatttttattatcacagcacttagacaggtagatactgttacagtctccttctacagacaatgccactagagagctgaagcattctgaggttaaaaatcttacctattgcctcacattatggtttgatttacagcaattttcgttctattgccccctatcatttggagtaattgactgtgttcaataatatttaatagttcctttatgcattttagtatatttgtcttgataaagtatatgcagaaattggagttaaaaaggatcttgtaaatcagattatagttctcactcctgtacttgagccagcctaggtacattaaatatctgtctagtttaaataattctagaaaagattccacaattttccttagtaacccaaatatgtcattgccttgatttaagccattttcttctggtttgtcctaaatagagatggagaacagctggttaccattcccaatataataacccatatatttctagaacattataaagcattccctcaggtttttcttcacagcctgactccttgtatccttttgatctttcttctttttccaaccctttcatcatctgtgtgggcttccttcctttttatttctctgcattccctttcagatgtggagatcataactgggcatggatagccagcatgagtcaagcagtgatgagtaaaataagaaacttacctcagagtttctaaactaattttctatttatgaaccccagtaatgtgcttgcttaaaacacaacgagaatggtggctcgctatcatatttcacttgtaggtctgctatggtacaaggtgtgttttttctgctacatttcaattctcgcacgtggccagcctttaccttgtatgctgtgtcttatattccagaacatattattttgcaaaatgacaggaaagacttgcataagtatgaaggatattttgatgtgaaaaaaaaaactttttaaaagattttaatgtattcaaagtgattgtgttgttaaaaatgctttctttctttacactgggaaataacttatgcctgaatggttgataatgcaactgtctgaatcatttcattaattacgtagagttttctaatatactaaccccattttaaaagcacttctaatccaccaaagttatttctttgtatctattttatttgctgatgggaatttaataagcttgccatttattacattacttattttactaaggaaatgttaaatagcactaaatagtaggcaaagttgtagccataccatcctttaaaactcactctaaaatgtacatattttgttaaaatagtgagccacatttccttttcacttcagagcctatatagtttataaaatctcattgtttcttaggagttactagcatagtacccctttcagttttaacttttctcattttgttactccacgttatgtcagtaatttaactttttagttatagacaaggggtcaaattatcatttttatttagggaatgtcctattttcacatgacttcaacagaatagtttctgttagtgcacctaccattttcattttgtctcttacagtgttacacatttatagatttataatttgagtttttcacacatgcttttttagtttaattaaaagttcatgttcattcagtaagtgctgtacagtacttgagaggatgttcatcactggtttaataatactagttcagtccttgatagatgttagcttttctccataagtcctacaattagccattttgtatagaaaagaatctgtggctcagtgcagctattggaaaagcacttcaaaatttcttaactactttaccagccaattagcatctcctttactcatgaggagcaattttctctctttagccttgatcttaacatgagacacaccgcccgtgtctctgtctcctgcccccaccacatgcagaaagttatatggtgttacaggtttttggagctcttccccacaactatgccagggttccttgctttgagaaggcttcactgagactgatagaatggttttcttctttgcattcttgatgcatacattacgtccttttaaaatgttgaggaggcttattagcaagagaaatatatttcttcccattaaatttcattcactatcaatttttaagaaaatacagtctccagtctaaggagatctatggagaaagcaaaagctacctttgaatagtctcttagaagagcacatttgttaaaactttttattttgtaacaattgtacatttatgagaaagctgaaaagatagtacagaatgttctcatatacctagcgcttagttcagaactaaaaacttttcaagaccagctagcttacattgtctccttcttgaaggccagatactggctaccttttaaaagcaaatgcaaaggcctttgggtggttccttgtgtgtaggtagttgtagtgtggagtatatagctgctgaatgcagaaatcagagaacctgaggcatctaaacaagcttttgaagtagggagtgctaggctccatttaccacttttctttttttttttttttttgagatggagtctcactttgtcccccaggctgaagtgcagtggggtgatctcagctcaccgcaagctccgcctcctgggttcactacattctcctgcctcagcctccagagtagctaggactacaggcgcctgcctccacgcccggctaattttttttttttttttgtatttgtagtagagatagggtttcaccatgttagccaggatggtctcgatcctggcctcccaaagtgctgggattacaggcgtgagccaccgtgcctggccggaatctaccactttttaaggaggaagaggtatttctggaaaccaccctgatatctgattaaatataacttggtaacagcaactgagcgccaaagaaatctgctcttcattttttttttttaacctgccatagtttgtttaaccctggttctaacttttgacaattcttactttattcaggcagcttgttcttgtgtagtataacttccagaactgtaaaagcctcgttaataataccttcttggtcatttaatttcagtgctttatttttcactgataaatttgatctagtttttagtgaaaaggttcttaacctagagtaaataaacttttgtggattcacggtgggctttatagtgtgtatgagaatttgaattttcctgaggatctgtaggttctatgactgttttcaagagtgaatgcaatcactctctcccttctcacttccttctcaaatagtaacctttctcctcagaaaatgtcaagtaaattaggatgatgttccacagtactaatgggatttaaatgtgcatttattctctgttggtatacattacaatatacgtgtttctagtaagaataaaatgtgattatggacttgctttaaataaaatgaatttgggataataaaacttaaattgctagtgaggaaaattaattttctcttgttcttatataaaacaataaagtcaatttttttagtaaaatatgccagaatatcccagtacaatcaaatagcttataataatgacatttcagtaggcacaaggaaaaaaaattgcagattatcttattttcattctagaattgttaaggacataaaatctgagaagcttgttagattattgagaggggaactgatagaaatgataatcttatatatttatagaaaatacttaaatttcacttggtattcctctgacttccagataaacactatgggaaagaaggccctgtgattctttttaagaataatactgtgcttctaaggctactttatatcaattatgttttctgatgaatcacaaaatgtgattgtacaaaaacaagcaaaaaggttttcaggtatttgagatttaagaagccatcattttgccacatgaagtacctggttcttaaaaaaaaaaaaaaaaaaaggtcataagaaatagaaagctgcaaccatggcagaaattcaaaatatactttgagaaaatacaccctccattttgtgctttctataaaatagatcatccattcatcatgaaagattgtgcacttcttatccagttgtagtgttattcctgttgcatcccaaatttatttccttcattcagagggtatttgtaaaaagaaatacatctttaaaagtccaaacattttaacttaaaaaattttgattttaaagaatcaacagtgcattgaagaagttcttataggtttggtgaccagttaaaacctaatccctggccaggcgtggtggctcacgtcagactttgggaggccaaggctggaggattgcttgagcccaggagttcaagaccagcctgggcaacatagcaataccgcatctctacaaataaaaaagtcagttgggcatagtggctcacgcgtgtgatcccatctactcgggaggctgaggtggaaaaattgtttgagtttgggccagtcaaagcttcagtgaattgtgattgtaccactgtactccatccagcctggacatcagagcaagaccctgtcttaagacaaaagccacaaaaaacacaaaacagacctaacctatttttaaaattttactgtagcattttctctacaccactaatataccacattgttattatatcatctatctgtatcactcactgaaccctcgactacttgagggtgaaaattcaatcctattaaatctgtattctcatatttagcacaaatcaatctgtattctcaacagctagaactcagtgagtactgtttaaatgaacaaattcacatttatcaaaacatgctcccctattttctttagctgtgccgtccagtatagcagctactggctgtatgtagctagtgagcacttaaaatgaaatgtgtctagtctgaattaagatttgatgtaaatatgaaatacacactagatttccaagattttgaatgtaaaatcacttatgtatatatatatattttaagataagagtctcgttctgtcacccaggatggtattcagttgcacaatcacagctcactgtagcctctgcctcctgggttctcatgactcagcttcctgagtagctgggattacaggtgcataccaccatgcctagctaattttgtatgtttagtagagatgagatttcgccatgttggccaagctgatcttgaactcctgatctcaagtaatccacctgcctcagccttccaaagtgctgggattacagatgtgagccactgtgcccaaccaatattttcatattaattccgtgttgaaataagaatattttttattaaatacaatataccattaaaattatatatttttttgctttttgaaatgtggctaccagatgatttaaagttatatatgtggtttgcatttgtggcttgcattaaatttccattcaatagtgctattcttaagcaaaagttggcaaatgatggtccctttggccatatctgtcttgtttttatatggccagtaagctaagaatgacttttacatttttaaaggattgtaaataaaaaatgcatgtgcaccagagaccgtatgtgacatgcgaagcctagaatatttgctgtctggtccttaatataaaaaagtttgcttacccttgttctaaagaagttatgagggtagaactcatggaccttagcctctagcatcttacactctagtgaaagtaacctcttagtaatgttacataatggaagtgaaattttattaagtgacagtattatgaatgtattcaggcattgtatgatatagaagtacactagaggggatcttgaaggatggaacaatttgagcagaaaagagtgataaaatagtgatgcactccccagatcccccttcaaagaactactaattgagctaggcatggtggctcacatctatagtgtcaccactttgggagaccgaggaaggcagatcacatgaacccaggagttccagtctagcctgggcaacatggtgaaaccccatctctacaaaaatttgctgggcatcatggcgcatgcctgtggtcccagctactctagaggctgaggtaaaaggatcacctgagcctagggaggacaaggctacagtgagccatatcaggccactgaactccatcctggacaacagagtgagatcctgtttcaaaaaaaaacaaaacaacaacaacaacataaaacctacgtacggtctcagctgctttgtaaagaggccccttgtccaaggtcataactttcccagggtggcccatattcagtgacgaatggcaggggaggtatgaaggtcccatcattttagctaacctgagacaactttgggattctgtattttagctccagagctccttaaggtgttggccaattttccttggaccagtgctttggcctagcttctctccctgttcaattctgcacccttttgcttctttactgaggttctgatcccaagggaattctctaatcaacattttgcataccacaccccatctcagagtctgctgttactgggagaatccaaccttcaatgggcaaaaagatgaatagcattccaattgttgagagttaagtaaacaaagagacagagggaaaaaataaaaaattcttttggaggtgaatgagattaatgacctgaatagcccacagtgtctacgtttgaaatgataagctataagattgcccaaaaggctttatcctggggacagcagaaagcttttggagcagggatgtgacatgaagaaaacagtgctttagaagaattaatctagtaaagacaaatgggattatagggaacagaaactgttaaagaaaaatatatccatttgtctgctaatttttttttatcagtgcctgatttcatgcatcatcagtaagtgatagttgaatacgttgtttaactaaaaccttattagttgaaatttgagaacttgaaattactctgatgatggactgtgatggatatttcctgaaggatggatcaggttcctttcccttagtctattcctgaagagggtaggaaggatacccttcaagggtgtcctaggctcatctaaagggtggcctggcattttgcccactccagttttccaaataccagcagacacagctgagcctattcttgccagttagctatgattgctttcttttccttttctgcagagaaaacagagttgcccacagccagcgtcaggagggaaagtgaactgtgtggtcaccctagagaggtagctgaagcagtttacctgggacctcctgtgtttgtttgtttcacagtcttacactactctggttttgaggaaagtgtttttttatttttgttgttttttctcaatttgaaggagttggttatttgatagtgctatttaaagctaaggaggagggccctttgttaacaaggttgggaagtgtggcacaagactaccttttagaatcatgcccacagagccagcaggagttgaaatagcctactttcttaccactgttactgccttgagaactgaacaagaaataaatattttgtcagtatatggtgatttttctcaacccgaaagaatttatccctccttggtctttattatgaattggtagaatatactttacttaaattttattgacaaaagtaaagatggacaatatacaattatgagcttattaaaaataacccataacccttcttgggggcagggaaatggttgcctctttaaagttagcaggttttctttggttcctttttgaaaagttgcctcaatcttgactggctttaatcagtaactctgaaataaattcaatttagttgcccgttggatattacatacttgcgtttccacagaaacaatttagtaaaatttgatattcaaaaagtaccagatggagatattatagacaagcaggaatgtaggatgcttaagtacatagtcatttgaaatgaaataaacaagtagtagaactatcttcttaacatgactcataattcctaaggaacatttgtattatcaaagtacctagtagttttctaaaagaatgactgtcttttgctcataaatttatttttaaaagttagtgccttggtttatcaaaatacaagttaagacatgtttatatcataatgaatgcagatacataggattgagtttatttcagtttgcattagaacaatttaatctcaacattcaaaatgtatgtactatgtatatactatattggagttcccacaatgtgttttgttttgttattttgatgtggggctgttttttattccccataaatctgatctgattatttttcttgatgatgggcagaaaatgtttatagattatgtaaatcactgattaggcatagagggtgactggaaagtggggcagagtggaagagagtagaaacgtggtagtgtcctctgtcttctagagcttctagttgatgttctgtgagagccgacctcttagtaaaccttagattatatgcttcagtatccacaacataatgttaaaggaatcaatagcacttaaatatgtcacttttttctgagaatacattgtctggaaaggtaaagccttggtagttcaggtatgtgggtggtatcatagatattaaacaaaagaaaaaactatcagataaacaaaaccaaagtagccatttttcatatggtttttactttaattccatggcctatgagagatataccatccccagatattttccagcaaacctcttctgtactctgttcaggttggctcctcagtcaatcccttttagctgcctttgccagtagataagcccagggatcacattatatgtgttctcagttgatggaataccactgagaaacatcatttcttctaggcaatttggcaatatctatccaatggaaatatagatataaccattgctccagaaggcatacttctagaatttattatccggacataatcccaaaaatgtagaaaaagtgaacatgaaattcccctcttctccacccctggcgtccttaatttcactctccaaagtgaaattgctatctgcatgtcttttcagacatgttttatgacaggtgatatagctatatacccattttttaatttatgtaaattggatcacactctgtaaactgttctgcaattagcttctttcatccaacatgtcatatacctatcacaaaatatgtttggaaagacagatggtaacacctttggagaatgggattaaaggagccaggggtggagaagaagggattttcttggttactttttcttttctctactgtttgagttgttttagcagtaaatatatttgtaaaatattttaaattaaaatacaaactactagaaaataaaagtgtgtaagataataataatgaggatagctaacattttattgagttcttacaatggaccagacactgctgtatacatatggcatgtgcttttcctcattaaattatcacagaaactgtacaaggtacatctattgagatccccattttacggatgatgaatttgaggcacagagagatctttggttacatgtccaagtcaatgtatgagaaaagagtcaaataagagcattgatatggaatatagatggtatccatgatggtttgacttaatgatttttcagctttattatggtgcaaaagtgatacacattgaatagaaactgtaatttgattaaccatacaaccattttatttttcatttttagtgtagtattcaataaattacatgagatattcagtactttattataaaataggcttcgtgctagatgatgtaggctaatgaaagtgttctgagcatgttttaaggtaggctaggttaagctgtgatgttcagttaagttagatgtattaaatgcattctcgacttagcaatatttttaacttctgatgggtttattgggatgtaactctataataagttgaggaacatctgtactgccatttataaatgatttctcctgtgtgatccagaagagtaaacattgtgactcgctagttttgtgagcagaaaggaagaaggtgggttcttttaaacaccatgacttctgcatttgttcttcggagtttaattcaaggagaaaatgggctatttcattaattccaaggactctatttgagggagtcattttcagaggaaaaaaatcatctatgctttggaattttttttaggtatcttaaaacaggtattatatgagtcatttctcataagaactggcttagtatagtaagaaagactccttctcatattttccaagattattggtgggttgagagatgtcagcaaatgatttcctctgttgcaatagttatccaagtacagaaagaagaaaatatatagtaggccaggcgtttgaaagtattttagaatagcatttcctttattcaacaaatatttattgtgtacctcagaaagttataattaatatatttttacattcaaattcaaactcctggctcttgaaaatctccataatctcttccctttttgtctgttaagctcttcctccacttttccaacaaactgcatctatttaggctggtttcttgatcattcttctgtaactatctatgtccttaagcacagggattatctgttggttcttagtgcctctggtgcctatagcatgggaggcttagaatggctagtgaatgaatgagtgaataaacacattcttttttgtctccatgctcttgcatatacatgtttccatatgtagattttgccttcccttctttcttcaaaaccttgagaccagagttagtgtgcctatagtgagaccctcttccagtacgactgacctcctggctcagatgcaacaggtctctactgtttcctgtaccaaatcaagactccttggacattgagggacattgtgcttctttgtatatccaagtgttagttcttattatgctgcttttcatactacctcaaaacgttcatatgcattaccttctctgtactcctaatgggaccatctttccattagatgcaggggatatgaacatgacctctggagagatgacctgagttagaattctgactcttctacttcctagctttgtgaaggtttcttaaaatttctacagttcagttccctcctctgggaaagaatgaaagagaagcctgccttttggaattatgtgaggattgagtaatctattaaagtgcttagaacagtacctggcatattgtaagcattcaaatgttagccattattactgtgcggcttctgtgtatattttatctcatccgtgatgaagatgagaaggcaagggctgctcctggcccctacaaatacacttacctaatagctattatcaatagatattagaaggtgggtaataacaacccttgagaagaccagggagatgactgaagattgattttgggtgattttttatgtagagactttaattcatctctcttgcttcttaatggatccaccaacttaataaaaaataattattgattgttatatgtgttagacaccattctaggtcctggtgatataccagggatcaaaacagaagaaaatgcctacctccatggagcttacatttcagtcctaagtaaactagaagtatgtgagatggtaatagggctgtggagaagaatgatgcaagggaagggggctaaggagtatatgtgtatgtgtgtgtgtgtgtgtgtgtgtgtgtgtgtgtgtgtctgtgtgtctgtgtgtctgtctgtcaagtggtgtgcgttgcaattttaaatatgatggcttagcaaagacctcccttagtatggtgcatttgagacaagttttgaatgaggtaaaggaatagccatgtggatatctgtggcaagagcttcctaagagttgtcaggaggtgcaaaggtcctgagttagtagcatacgtaatatgctcaaagagaagcaaggagaccagtgtgtttggagcagtgagtcagaggagagtaatagaagataaggtaaggggcaggggcacagctcatacatagcattgcagatcatagcaagagctgtatcatttacactgtgagcgatggggaccatttggaaggttttgtgtgcagggataatgttatctgtcttaggaggcaatggggtcaatctggttacttggttgaaatttggttgaaagtaaactgcaagaaaggaagggagataaattaggaggctattgaagtgatccaggtaagacagtgctggcttggacccaggtggttgtaggggaggtggtgagaagtagttgtattctggttatattttgaaagcagaccccataggagctgctgacaaattgaaaatggggtgtgagggaatgaattgcctcaaagataaggtttatggcctgagcaatttagcaggctggaattgtcatttactgagatggggaaaactgcaggaacaataggtttggtgggaaggaacaagagctaagtttggtcatgttaaatttgatatgccttttagacattcaaatggagatagagagttgacccttggatatggtccagaattcaggggaggagtagagaggtcaaatttggagataaaaattcaggcttgtcaatatacagtatttgaatcactgagactgaataggaaattatttcaaaatttcttctgtcattccttttccccccttagtttatttttctttattttacttactcttcttacctatcttcccatcccacaaattccaaggcagaagttagtattgacagttatcatccagcttgggagatgtggaggaacattgtacttttcttttctcacttcgtgatgtaatcagagtaagtgcttattgtagtgaggtgacagcatcttcttggtgactattaggttgtgatcaaatcatgttctaaatagaaagtgcgaaacttattttcatgttccttttattagcagtatttatttttccatcaaccatatgctaataattcatgaatcaatctataaacacttaaagaacactgtgtacctgtactgagaatgaaataagagaaatattactaaaagtttctggcctcaaaaaatttgctaattagtagaaagcctggtctcacgtagtaaaccaattagagcacaatgtatgatagcactgaattgtgccttgggttgtatggtgtggcttataaggaaaagcttattaaaactgatcttttgacatttttgacaatgttcttataaattactttcttttttatcatatatggatgggatgaagcacagagtaagatagagtgcacagcaaaggggatctgcccctcctatctgtccaataccccacaggttttggtgataatcttgggcaatgttccagtcaaacctgcctcccacttctcactaaagttagtgaacatgtgacccacattccccaaataagagcctcttataaactccattcttggctttttcattcatagagatagctattttatgagacatagataaagcattttttagtgatgtgcacgatgccttttttcttaattattaacttctcaaaacataaacacattggaggcacttaataaagggcagcttcattgcaagagctgaaagcattaatgagtttgtgttaatgcttcattaataaatcatcagtggctaagaaactagatcttccttttcctgaagtctttaatgtatcttgatgctccattaatctgggggtcagggaaactcctaaagtttgaggtcagatgatatcatatggtatttccattctctgagcaaattggctgtttcttacacccctgtattaatccgcctacccctagataaactggttagctgatatggataatgaatgcgtctttaattttcatgtgaggtttttaagactaacaaacatgagaagattgtatatagaggaggagtgttttggtttttgcttggtaatgctactctagcatgaataagtgagtagatatattaaaattcatttttatttagctttggaatgcttatagaatggtttgtggcagatatgtcttcctatttgggttcattttgatagacatgaaaattagaaaatattatttagatagtgtaaaaaagtaaaaaaaaattacctttcagtaatctccaaacaattttaatctagacaaatgaaagcatttttattgatagtaaaatattgttttatttttatacttgtgtttggtgatagccatatctgtcctcagatttcacagcagatcttttaagttattaggtcctgagcgaaaatttccaataaatccctactaacctttcaaaaaacaaacatttccatcccaggtggaatgcagggaatatgagaaacaattagacacaaagagaagggaaacagggcattagttctttctcctctgacacttgctgcctttacttgatgtttcctttttctctgtgaggatcagagtttgaggagtatttgggtcttggcaagtgagtagctaatctttagcaaggtcttaactgaagctaccaataaaacgcaatattttaaatgctttacactaataaagtctaaaaaaaaaatctgttagcattttggaatttagcagaactagctaaggccctctttggctttcttgacttccaggctggtctcctaggaattttttatgggagctttggggctcataaactgtacaaatgttggttctgacaacgtaatgaaaccacacaggccaggactgctgcttgaggagattattttaggactggctttcttatgaccccttactcagaatacttcttgccttccattctatggacagtatccctcagaaaggttggcttagtaccagtttctagtacctgctgtagacttgttttatttattttttacatctcctgtaggtcagagggaacataatgacttcctgtgggtttttgcctgaatacggaagtaaaagtaagaactttcatgaactctgtgtctttatgaaaaccattataagcagttctgcaaattatattaatagaacttgaaaagatttgttttaagtgatagtctatgaagataatagttctaagaataatgtaaaatgtatatacttgtatccagggaatatatcaagatagatagataggtagatagatacacacacacacagatatatacactgaatatgtatgtatgtatatatgaatatgtatgtatgaatatatgtatgtatatatgaatatgtatgaatatatgtatgtatgtatgagtatgtatgtatgaatatatgtatgtatatatgaatatgtatgaatgaatatatgaatgtgtgactatatgtatgtatgaatatatgaatatgtgtgaatatatgtatgtatgactatatgaatagtgtgaatatatgtatgtatgatatatgaatatgtatgcatgaatatatgtatgtatgaatatatgaatatgtatgtatgaatatatgtatagatatattccctattcccaaatattttgtgcatgtatgttttgtatgaatatttagggcaacaggaattacagtagtaccatgtaaatgtaaataatcacaatttaatattactcaaaattttcacaaacttagaaaattatggccatattttaatgtagtgaacgatatcaaattgatgttacttattttaaatatattttatcaggaggtctgaggataactgtttgcattctccttaggtagggatgaattggtgttttgatttgggaatggaagaaatatggtcagttgagaactcttctgcagacacaaggcacctggaatttatgaaagaaccttgagtgctagagataatcttctcttagagaacaagaggttgaagattgaggcacttagcaagaactcttaaattattcagtggtttcctcagcagcattttaattcttgctcgtaactgtttcatggttgactttcttcttctcatgtattgctatttttctttgtccttttctcaggaataggaagaaaatttcattaaagcacaacacagaattatattcattggccacacttcacagaagattcattgcataatttggccagtttccctcaccacccatttaaatagtgtggcaaatgtatttggtgggatttcctcaaccattcagaaacatttactcattttatttttatttttatttttattttttgagatggagtctctctgtcgcccagggtgcagtgcagtggtgtgatctcagctcactgcaacttctgcctcccaggttcaagtgatttttttgcctcagcctcccgagtagctgagattacaggcattcgacacaatgtctggctaatttttgtacttttcatagagacggtgttttaccatgttggccaggctggtctcgaacccctgacctcaagtgatccgcccaccttggcctcccaaagtgctgggattacaggtgtgagccactgtgcccctgacccatttgctccttttagatttagatatatcagtagaatgattgtagctcaggaaaatctactcagccagatagcattacctttattccttccattagcatgtgcacttctttccagctagttgtccaattcaggaggcacagatagctgtaatctaaagtatataccttcatgttctgaactattggtagagcaagtatggtaactaaatctaacactccatgcaaactaggtagagttttcagtcttgtagattttcagccaaagtgttgtaatgggtgacgtatgtctttttaatattaatggagggtgttctaccctttagtatcttttttgtgacagtgatggtggtgaattgctgtcatggattctggttgttatagatccagagtgttctattaaggaatattctgtgttgtaaatcccaagacaattgtgaatcttaattactctgcttgtaattacttctttagtgcaataaattaatcttagtttatgtctaagcattttgggtctcagggcattcataaacaatctctcatatttcctgtgtgatctgttactgttatcaagagaagtgttcagaaagagaagacaactggccccaaactatgtggaaactaataaatacagaacagccatttttgaattttagtctcacagtagcttataaatctctcaaattgcacagtgcataatgaaatcaatgaatatgtgaatacattaattcaaattaaaacttgcccaggactgatctggaaattgttcaacattagtaagaaagcatgagatatttttaaatgggagagaagtctaatcatcatacgtggcaaaaagataaggaagttgggaaatgtgcaataatatagacatcatttagtagatattttgaaaatacaactttggctcttaataataataaaatgtataattaaatactgttgcctcagtttatccaagatgatacttgtttggaggcataagactaaagatcagtgtaggaacacatctgctcagggggacctttgtgcccacaactgggagctcattttttttaatttaaattacctccttaaacatcctgggacctccttccatagattttttttcttggctaatataggaattcagatgagatgtattattggtccgagtagtagaagttatggacctgtgaccttgtgttctcccatcacaattttaccaacatcttcagtagtatgaattcaggaatggaggtagggttgcattggaggtgaattataaatcatgttaaattgttcaagaattttcttttgttttccttggtcatcaaattttgaggtttgctaagttttgttcttttctttgtttgagctactttttgttccttttatcctgcctgatctggcttcattttgtcatttttcatggaggttctcttatgtcacctattcgcccaccatggtattggtggtattcaaacttaatgttaattctttcatagtagcttggttatatgttcaaaaaatatttattgagtgttcattatgtgtttggcacttttctagactttgaagaaacagtggtaaacaagacaacgtgttccctgccttcaagaagttagtgttctagtgggaatggaaaactggtagggcatgagaacagatttcttttatacaagttgtcaaacttgtgataaaatgtgataatttcagattgtagtaagtgctatgaaggaaataacaaaagtgatgtgattccaatcaataaaatgatagtggggctgcttgagaaagaacagtaagggaagatgaattggtaacatttgagcaagctacccgtggaaaaagcaaggggagaatatttaagccagagaaaaaaggaagtgcaaactttctgaaagaataagaaggacaggatggaggcaaagaaagggcactaatgtatctggagtatcatgaacaaaagggaaagtagaataaaataaggttggagagacagggagtagctagtttaataggaacttacagaccttgaatcttaggttgggttctgcatgaaacagattctggagtggagatttgcaggaacaaatgtaactggagagttctcttgttctcagcatcaaacagctttgttcatgctggaggaagtcagctttctgagagattgacaagagtaggaaattaattggaaaataatcttcttttttgttctaatttatccttttaaccatttttttttgagatggagtctcgctctgttgccaggctggagtgcagtggcacaatctcagctcactgcagcctccgcctcctgggttcaagcaattcccctgcctcagcctcccaagtagctgggactacaggtgcctgccaccatgcccggctagttttttgtatttttttagtagagatggggtttcaccatgttggccaggatggtctcgatctcttgacctcgtgatctgcccgccttggcctcccaaagtgctggggttacaggcatgagccactgcacccggccatcatttttttttttagtgtgctctttcctttttttttttttttttttttttgcatcttctttgtatattaatctgtttttgctcttttttcttcaatggtcattttggggtataggattgattttgagacagactgaaaacagttaaaaatctctcttagcttttcagacaagaagcaataatgaggtggcctcgtttagtggaaactggaaagcaaagatgtgatggacttcagagatatatagggtccggaagttggcaattctgtgactgaatgcagggatgaaggaaaccaaggagttaaaggtgaggaaatcagttggggcaataggaactagaagaggatgagttctgttctgtggagggtccttctgaggtgcctcataggacagccatctggagatggacctctggcagctggaagtgtttagaaatcagaacagagtgcaggctagagacacaaattttagaaacgtgtatgaaggtaataattttgtaaatagatgaaggttactatgccatttttaatgtcaagtacatataacagagagcatgtcatttaactgaaaaatgatgaaaagctattttattttcacatatttaaagattgggcatagttagaaaggtgaatgcaccttccctcccactaaagcttctaagaccttttgaatgaggttagtaccagatgaaattctgggaacacacagacctccttgtgagggacacacgtttggcagatacataatcttaaggagagatccattagtttgcttcatgctgcttttggatggcaagaattttgtactgttttgcaacagatatagttttgatagattacattggagggcagaattttctggaaggccttttcagatttaggaaccatggaaaatcagtcattatttagtaatcaagagaattaaatgcttttattttgctgagcctgatctacctagtgaatgttttatttctctccgtgtgtgtatttcattttgcaaatataagtattattctgtgtactgctttattagttataattcatgtatcattttgtaacagagaagtatcttaaaattataatgtttgcacaagattctctgtgatgattgaaccaagaagggatgtaggaaacaggtagggtgcctgatgatttaatatttcatcttaaagacaaaggagaataaaaacagtccatttgtatttggctgcttttatgttactggcaagaacagtcagaagctccccattttcaactggtggttgggtgtccaaggaattcttgagtttgttatttcatatgaaggatgtgccagataaaaacccttagagaccgaaagtttccttgtttagtcacaagacaaacttgctcttttcttgtagcaaactatattactaccctttgtctgacttgttgatttcgagttggagggcagtgtccattggtccatgtcagtcactagtgcacctaataaaaggcctaacagatatttaggttgtcagtgtttgcatgctagttggttaagccatctgaattggatttgattgatgacctcgcttgcccttaagaagagggtttgtgaccacaagccacagaaaatgacatgtaagatcaattgatggttagtaagttaaaaaacatcccatcacccattttgtgtgaatattgtattgctatgggttttacttgggaacatataaaaaggttaccacatactccaatatgtgtttttcctacatttcagtaacacctgaatggaaatctaacatgaggactgttgaaattatttttttcaaatggggaagggagaagaaggttaataattttccatactcagattagaaaggtcacgaccatatcagttcaaagaagagaatgcatgtgctcatggctggttaccaggtgaattttgcaaacattttattatatacatagttgattttttttccttcctgggaaacttatatccatgaatctggagttttacattttggagctacattttttggtcccttctacctatattatttttaaaagatatctttattttaaaattgagcaacttgaagtgtatgtgtgtgtgtgtgtgtgtgtgtgtgtgtatacacatacctgtattgtaaataagaaaggtgcttaataagtttgtcttaaaactcatgaaagcttggcgtaaaatctcacactaatcactatggatgagaatggctctcgttgagaaataagggctgatggcttttttctcaatgatcatgttaaaaatatattgagagcattgtaggactccagatgcttgggttgtggctcacaatttttacagaattaatttccaaaattcttgattactccaggaggaaatttattccaaaagtaagctgtgtgcttccttcttaaatttaaaaattaatgcatcaaaggtgtaataaaaatcatctcttacaattagaggtcctaaagaaatgtttgaattattatggcaattagaagggtaccttacttaagattttgagagttttgttgctagcaaagcagagaaataaaaagttaattacttttgtaagggaaaacttgggaatataggtatgtccctgtaccttttcagatatgtaaacaatatttaggtatttttacagagaattgagaaaaagtacaggcactgacactactacaaccatagtagaagacactactacaaagatagtaaaggacaactttctatgtagataaatatcagttatttggagtttattatctgaaaatattttgataatttcttcccatttctttcaagataaaaattaagttttaatagcagatatcttgcttagaatcaagtacattttagtgacttggcatttattcattattcgtttatttagtttatcacttttttttttttttgagacagaatctctttctgttgcccaggctggagtgcaaggcatgatcacggctcactgcaatctccgcctcccaggttcaagcaattttcatgcctcagcctcccgagtagctgggattacaggcatgcgccaccacatccagataattttgtatttttagtagagacgggggtttcaccatgttggtcaagctggtcttgaactcctgacctcaagtgatccacctacctcagcctcccaaagtgccaggattacaggcatgagccaccgtgcctggcccttgcttgtagactttcattctctggttccatactccacaatattatcagccctatctctcaaaaatagcattggttatattatagcatcaattaattacattgacataaaattaaaatgtctctacttgtcacttcttgtaatattacctaattttgtttttctctaatttttcataatttatacacctaatttattacctttcacgggctcatgtgtttcctatttaaagtctgaaatgtggccaggtgcagtggctcatgcctgtaatcccaacactttgggaggctgagttgggaggatcacttgaagccaggagttcaagaccatcctgggcaacatggtgaaaccccatctctaccaaaaaatatgaaaattaccaagtgttgtggcgcacgcctatagttccagctacttgggaggctgaggtgggaggattgcttgagccctgggaggcagaggctgcagtgagcagagatcgcgccactccactccagcctgggtgacagagtaagaccttgtctaaaaaaaaaaaaaaaaaagaagtctgaaatgtaagtcatttgtatctgttcaaatgatataaggtggtatcaagcattcttacacatgatggtggtcttagaaaatcatttagaggatgctaggagaaaaattgagctgccatctggagaggctgctggattggcgactccctcctatcattggtttactctctccaggtgccttactaaagagaatcaacaaagagagaaggactttgctcagtaccttctgccttagaggcctgtctggtcatctgctgccagctctttccagggagagatgaggagcagcaggcctgtgctctcaagccctcagggaatgcactgcctccagtgggacagagtggagctgttgcttgtgtcattgctgcagcacattatttgaaactgacctcaagacttggatttgctcagtttatttttagaagtaatgacagtatagcactttgaggcctgaatgttatttctagacaagagtaatactgtttttctgagaagtagaatttcaggatttcaaatggattttttggtaaatatttctgaagcttttccagtaactgagactttctgggcagaaaggcaagatgggacatagtgtgcatcctctgttcttgctgacctcagtatctcagagtgtgactagacgctgttaccgagcagctgcatagtcatcttcttcccttgttctgagcaagtcctctgttacacaaagaagaaaaaagcaatcattcttttcagtcatttaccttccaacttactaaatttgaaattataattatacatacagtacatacaaggttgtctgtagggagtatatttgtttttatgtcttatattctggcatgtatatgagtttgcctaagagatttggagatacatacacatgcatacatacatgtgtctgactttttatgtaaatatattttgtatgacgtgttaatttatatgatacatggctatccaatgtggttatctctacaaagaaatgtactcacagatgcatttaatttttacagatacaattttcattagctttctaactgaagtccctgcctgtagactttcattctctggttccattgtgtactccacagtgtcatcaaccctgattttcaaaaacagcattcatagccagcagttttgtcttgcttcctatatgccaggcactgttctaactttttatatataaatctctcaacaattccatgaggtaggtgctgttaacatcctcattttacaaaagaagaaactgaggtacagagaggtcaaaaagctcactctaggtcagaaacaatcctaagtggtaaagtcagtctgaacccaggcagtctaactctaaaatctatactcttaactactatattgtgttgcacacagaatctggttcctcgtgcctctgatcaaaaccgatatttcctgcagcagaaaatcttaacatattagcacaggattaatttgttagctttttatgtttttccctgctcacatttgaggttgttatccacagacaagtatatcaaactattgctgttctccaaaccttccagatagttttctgactctgtgatgttaatcatgctattccttttatctgaaatttacttcatctttttctacccagaaaacgcctatttattcttcaaagcccatatcagccttcacaactcttttatgcattgttgtaaaattgtattttctctcatctgtgtttccgtagcacttaataagtaactccggttttggtgcttctttcattgtatggtggtgtttatttgcccttaagtgtcatgtgctcttcattgggagtaccatctcccctctgctgatttcattcaactgtctagtaaccagattcacctctcagccatgttcctgtatcatcagtgctgctctgcggtgccctgtctggttttcagtcacagtttcctgtgcaggtggtggaggattttgaaatgcttgaaactgaaccattacacccacttgagatagtttcttttgtctgtgtatgataggaggtgggtggggaaaaataagtgcacacagcctattacctggagttgagatcaccaattaaatgtcatgaatagggtaagataacacatattagttgtgtttaaaatattttgctccttagatttttattcactcttcactttaatttagaaaggcagttttcagatgttggatgagcattgactaatttccaaatacctttttatttgttttctgcattatagatcatgtgactcaaatgtatttagggtagctagcagatgattgaacatgatgaaactatgagtcttttatttatctaagtaaagcagtgaatgcagatgggtttattatagtcatagggccccatgtactttagtccttatttcatccagcaaaacttcgatgactaattttgacttcaattgaggaatattttatttaaaacatttgcttagaataatagtcattgtaaaggaacacttttcatgtgtttactgaaccaaatgctaagatgatacaattcctaattttaaataagataaatatcaaattataggtttttgcataattttagtaaaatagatgtgagaaagattggagattatgtgaggattctaggtacttaagttggagtagaggagaaagaaggaagaaatggcctactcataattgcattacagtttttttcagtcttgaacagaagttgaagtctgaatggtactgaagtaaatgagagattcaaatccaaaagaagaaaaagtcctcattataaattttggaaatgcataaaaatggtgaatgataatattctgatatttgaaaaaataaataaagctacattttaaaatttaatttataaaagtctgagtgactttttaataaattaaaatttgaaattataaatttatatgagaaattaatttttctcatataaaaatacatttttataaatttctcatatactttcctcttaaagcagtttatatgtggcaattttttaaaaaatgaataaattaaaactgaagattgctcttcctcttctatcaaaacagctaaaacatttagctcctattctgtgatgcaaagtttaacatatgtaatctgatttaattcttgcagttacctgtacagcattatcatcttccatcatatatgcatggaaaattaagcttagcaatttccccagaaaggaaggggtagaataggatttaaactcaggtccactgctcctgtatcccatgctttttctagtatattttggtagagaatgtcagttttgagtacagacatactttgtgctggagaaaccagcaaactggaattacaaactaatcaaatgacaaaatggaactggaaaaggctgttttttttttttaattgaatatgttactggcatatgtaaaacagaagtcatttaaataagatattcatatttcagttgtcgtttaaatatcagtagagagtttgattaaatagtggattgtctgggtgtctttatccatgatctttgcccctgcagttatgatcacttatttttatagcatggaattaactcagcataaaatttgaggtgagattttgttactcaaaataatcttgaagttttctgggattagtgaatgttttcttgggactggccatgtcactcactatctttgcactgaaaatgaagaatatacagtatattagtccattttcatggtgctattaagaactgcccaagactgggcaattcataaagaggtttaattgactcacagttccacattgctggggaagcctcaggaaacttacaatcatggtggaaggggaagcaaacacatccttcttcacatggcggcaggagagagaagtgctgagcaaagggggaaaagccctttataaaaccatcagatcttgtgagatctcactcactatcatgacatcatgggggtaaccacccccatgattcagttacctcccaccaggtccttcccctgacatgtgggaattatgggaactacaattcaagatgagatttgagtggggacacagccaaaccatatcacacagtgtatctcattttttactttttatacagaagtattgcacataatatgaagaataaagggaaagaaatatagcttaaatatgactatcagtaaaatacaatatttgcttcagtaaatgtagtcaacagggagctaagaaatacctgggtcttccagcacttcataatttaatgaatgattataggaaaattacagaaatccttttgtacttcattctttctgactcctaatttaggggaatggtctttgagacccacctttctcacagggagatggtgaagattaattagcccatgctagccaagttcccagtgctgccccagagaaaggtgttccataaatcagacctatcattaaaatgccttcatttgtgtctagtccttgcacaggatggtgccatcactccgtatcctaatgggagtcacccacattcaggccaaggacaggtttttccataacacaaagaacgtttgttctatgtgactaggcagatttcctcctctgtgtgcctcagtgtcctcatctatcaaagcagcagtccatagccagataattcctaagaggaacttaccctagagttgctctgatttatatctttttgtttgtttgtcccactcagcttcttgaacctattaaacttttttttaagctcatgtcctacgaaagaactgtaacagacatagagataggccattcagatgcccctccaaggaaggcagtcaggagagcctccagcagtcagggtcagcttcagctgcacagagctggccctcccaaagtcatctccctcttgtggcacctcacatctgatgactaagttaagaccccagcactagacaactctgatggacagcgtttgttctagagtgctccactggtttgagacattggatttgcctcatggttgtttctcatgcttcctgatctttcttccttctcctttccagatctgataaaatcttacaggtcttctatgtaaatatcttacgccctataagccatctcagcatctgcttccatagaatctgaacaatgacaagaacttaaataatgtgaaaaaatttgtgactggcttgggcaatgtagcaagatcctgtcttgattttaaaaaaagaaaaaaataataataatgtgaaaaaggactagtagaagggaaatcctcaagccacaaattactagacttctttataatgggcttgtttcatatactgtagtttattaatttggaaattgtattttcatattaaaacaaagcatgccccagaagaaaggttcagtcactttaggtaacttttctttagctgtcttcaaataaatcattgtgagaggcctttcttcctttccttttttcttattctttcttaaatagtttagatttgcttatctttgtcttaagaaaactagtaagtctgacacctactatgaagttgatctgataaagtaagttgtatgctgcgtatttccaaattagatttcctattgtaatggagggctagtatttctttatttgttctttaattcacagtttacatttagaagttttgcttaaaattattttatgttctgaaatcagagtcgtcaaaactcaattcagcgtttttaaaaatttgctttttctctacccatggttaagggatatgacttactatttctgtgggtttcttttacatgttattattgatttttaaaatcaggacagaaaaagcagagactggagaatatgtggctggaatatatgatggacatctagggaagaattaagaaagaaaagaaaatggctggggagaggcaagtatttaaaaaacaaccgcatgtgttagtagagaagaggataagagtctaaattttgacatacgtgtattagtaaacctaagctacttttgactttgcacactgtttatttatgttgtggtcacagagttaattatatctgttagaacaagcctttgaaagtttaatgagctctttagcattaacaacctttcatatttccttatttttttttcacctttccattcatccatcttaaattttgcagctcttaacaatgttattgcactagaaccccagagcagcattaggtgagtggaatgtgttccagggttaaaataaaaacaaggcacagtacatagtgtgttattcctattacataaagtattatataaaaacaagctaaatttctgctattagaaatcagaatagtggttattctggtgtggaggtaggggcagggagtaggagaggcttctgggtgctggttatggcacccagatctgtttcttgatctgtgtgctgatcacatgtgtgttcattttatgaaagatcattgtgcaatatactcatgacatctgcagttttctgtctttgtattttatacttaaatattcaaaaaattgggtgaaggaaatgcctgtgggctggatttactttgcttcacttagacctttaagaatcacagaaccacagctagttagatttaagttctagtcttctacaacactgtagggtttagagtaactatagttaataatttattatatattttcaaatagctacaagagaggattttgtatgttcccgacataaacagatgacaaatgattgaggtgatggatatgctaattaccctaatttgatcattatacattgtatgcaggtatcaaatatcacttgataccccaattattataatatgtgtcaactaaaatttaaaaactaaaaaaaaaaaaatcacagaaccaactataaaatcacagaaatggaaaaggtcttagtttagcccactgatgtcacgaagagaatagatgcctaaaaggctttgaagtcttgcaaggatcctagggaacgatgatttcatgtcttacagctgaggaaactaatgtcagtaaggttaggtccattgcccagggtctcaccagagcctgctaaagagctctcagatccacctttctctgctgttcagcttctttctactgtgtggcttagcctgtctcctaatagcagcttcttcatagaactattcttattaaaaacggggcttgagttaacctagcttatgaggatttctaatgacaactcttacaaaaagggtatttttcatttaacttgtaggcagcctgattttcagctgaccagaacaatcaaattataaaatattctagttatttgagatgttaccatagatagctttaaaaaatctttattttcatgacatttattttatcacatagctattattgcatagtttcgcttgatctctgaagctttatcaagatgctactagatactatcctatgcatattttccacttaacacaagtatgatatcccctttagatttatatgtattctgctaccatgaaaagccatttttttcctctgtatacatgagattatttttacttgactgacttatctctttaattcattgcctgtcattcagctcatatcatatatatcacatatatgagattgataacctaataaataatcccatttttgtcaatccagtaatcattgaatttactagaatctactcagttcttatccaagggccactactgacatgggccttcttatttagatggtattgcatcgcttgactcttagagaaggctctggatgattgacagattatcctcatgtctgacggaagtaagacgagcaagttccttcaagaaggaagtaagccaagttgtatcagatatagtctccattctgttactttcactttcctgttgataccccttcttcctgtttattctgaatgcatttaataaatatttacgagtatttgctgtagatcatacactgtcttaggagctggtataaaatggtgaaacaaaaaaaatcaacatagatcctgctgtcttgggccttattttgttagagacagagcattaaaaaaaatctttcagctaaatagaaatcacaaatgggtcaagtataatatagaggtggaatttgtgctatgtatgtgagccaatggtagggagtctgagcacattaggaatggcttccttgaagaaaagatacttgctttaggatataaagaatgaatagacagacataaatcagacagaggagcgattagtattccagcagccaggatagcatgcacaaaggttctaaaggcaacccaatagtgtaggggagtgaggctgaattttagctcttcgcctttagggttttttctggctaggcctaagaattaaattgacataggacagattaacaggagaaaagcacaggaattgatttaatacaacttttacaaagcagtgggagtcctcatgaagaaatgaagacccagagaaacaattagagtgaatcagttatagattgaattggacaaagaatagtaagttgtgaaaaagcaactaaattatgtggagaggcttaagagacaagagctattttagcaaggtctgtacagaattttctttggctcaaatttccatccttgatgataagaatgttgctttccttctggtatagggagaggacctttcagtgttcctgcttttaagaaacagaaaggaggccagaatgatcttgtacctgctgtttttcaagtacctttaattcacaatagtcattatgccagaatggtatatttttaactccttcaatggcacatttgaggaactcaaagaaggccagcatgacagggtcaaagagtgcatagagttgtgtggagcaaagtaaataaagtgacttatggattgggaacagtggaggagtcagtggactggtattcctgatggtttgaaaaaaaagccactctaggagacactgaataatctagaaaatgggcagtttatggccagcaactgtgatttttaactccctgattctggaggaggatggccaagtttcaaggaatgactgcgagagtggtgactgaaatcgagtggaaatgaagaccactggagacagggaggtcaaggaactgacaggctgagtgttgaaccagttatccttgtgtctgttgaaatagcccagaatgttggcaaactttcagtgaagtagaagactggatagatgccaagtctttaatacataaagtgggttgaatggtggtggggaaagagaaccacttagtgtgcccagtaaacatttcataagatttgaatggtttgtatgatagagataaagtttctagattttcaatgttatattttcccaattgttcattatattttggccattatacagatatatgaaaatctgaactaaaggagtttcctcatctggcttgcatatttcaagatgataggaattgtgtcataatcactggtatagaagctgtacagatcttggcttacccaaagacaagtggtagctgtgaatgaataaagcatagggataaattatgaatgaagaaaatagtgcatcagctctattagatggaaggtgttattatttttaattttatgcacatgtgcaaattttatgaactttacatggaattttacctctctgactacaattacctttgcatctacattaattacatagtagtcgcatgttttttttttctttcagagatgaactttttaatcagaatacttacttttcctctgattccatgggaactttaccatttatactaactttttgtggaaccaatgagttagatccttttgacagaaattgcacggaggggcattctctgatatggggatacatcttgtctggaaaggatcttcccctgtctgcacctccattcatgtttgtaaacttttatcattctccatttgtttatctggctagtgagcaatctctctgtaccaataattgcctaagggatttaaccagcttatgaaagtatgtaagttatgatttttaaagatgaaagcaatatgttatatatatgcctaggaaaagactggcaagacattcatcaaaatgtaaatagtggtatatctaggtagtggggtagttttatatcatatttatttctttaagctgaaatatacatgtttttcagtgagaatctatcatgttttacaatgagatttttaaagccaatattaaggtgaaaggaaaaggtaaaacaagggtaggggaaaagtcaggaattaggctatgtgaaaagaagagtttctttttctattgtgtagaagataggtaagttgtcaaagatggaatatgcacgcatggatgttagcagtatgtttaattctactgcaagaagctaatgcatgatgctctcttcagaggcttctggtcacagtcccttatttccaggtcacttggcagaattcctagagtctcaagttttaaggagcaaatagtagaagttcctccttagtgcctctgttgtttattctctcggggggagtagtcattgatttctgttaactgtgatacaaaaaacccactaagcacctggggcttcccttgccaccccctttccatttgttaggaagccttctttaagctctgagaatatctgtggattaacacaagtcagaaattgttttcagtatcactctgcagacagacatttagcaggtgggcagtagatctgttaatttcccatgggagaggaaattaactgtccagcctggacaggtttttgtctgccagctttgaagtttgtcacatagaggaatcttcctctttcagaatttagaaggaaccacagacaatttaagtggcattgaatatgcttccttgtaaactgtgggcatcaagccaggcagagttgcaataagctcttaactttaggcctgacccacttgtaatgctatgacaatgccaaatgtgtgttctaaatgatgcagtacttacctgagacagagcattctgggtaaaaggtaaatgttccttctcaatgaatgatgaacgatgacatctagaatgatgattaattgagaataccactctgctcagtctggggaattttattctgcatttcatatgtatcataaattcaatatcagaatcaataagatgatacactcctgaagtgtaggttatctagaaaaattttaggtgattttaaaaaaatatgcaagcatatttaacaactgctttagtataatctacctagattgttcttcctagctctgcttccaaagggtattggacatggaattgtgaaagcagaggtatgtgatgtaaaggcaatgatattcagtaaattcaaacactagatggttatatatttgttaaatatttataataaatctgtaatcagaattctaaccatctagcttcagtgggatgcaagtgggaacaactttattcctcttcccactgaatatatttatttcagccatgtaagaagtcttggttagatctcagagctttgctgtgtcttttagtcacaagaacagtctcatttcaggattttaaaagtcctgatcagagtaatcatttaaaatttcttacctcaggttgggcctgtttcaggcttgacagcctccttgcaccagggggtgtatggtactgacactctttgtcacctgacttcctctcccactcactggctgcccttagggccttttagagaagagctgtaagggactgggcaagtctgagtcactggtgcagttccaacctgcactgctaccctctgttagatgcatgattgctgactctctcttcggataaatcctcttagggacctctgggtatagttcctctgatagtcatgccgcccctggctggatgtttttagctgtctttgcagctcctgggtttctggctttacaccccacttttgggattacattgccttgccaggtggtccttttgggcattgtcccttgtgagatcattcctcctgtgggcctgtatcctgtccatgagaattttcttgcaattgttggaagcatagcctgatcacaatggagtcctctaggctttgcaattccaggacagttagcaagccacaatttcctgcctttaaagtcagatttaaaataggtagtagttatttttctctaactccaggagatgcatttttttcaaatatttctctcagagacactcattcccttccaatttggtacccttgagtaagctcttttgtggtgtgaagtaggaggtggtacagaatgttctaaccactctatcctgagtagtcctctctgggggtctcattaccttctcttgtagagccaaaagcaaacagtgggctcatgatgacagaatggcttcaaatgaacccttggcaagttctggtttggcacctgtatctgataattattttgtttttagccttcaaggtttcagctaaaacggaaaatttcatttgttttatattttttaattgatatgtcatagttttacatatttttgaggtacatgggatacacaatttcattttaaacatcttgactcagtagtattttttttcatttaggtggctgcattaaacctcatttatgtgtgtgtttgtgtgtgtgtatgtataggaaatgaaagcattcacaaatgtggtaaacaaagaatatagaattaaattaattttatttttaattaattaattaaattaattcaattaatagaattaaaatatatagatgcaagattttaagtgtcttacattttttaacttggggattgtagttcaatcaatgataacttcattttcttttttcaattcaaaggatattcttataattgctagtttaattattagtttgcaagtacttaaaccgaaacatcttacttcatcttccaaaacagctagcagttcccttgtgtttgcttaataaaatattaattacaaatatgttaagtagcatgtctgatataaggactttttcccttaaaaataaatacatagtatctcaaacttacagtatcttaataggatagagaggaataaatatacctttacacatgtataagatttgcttttttgtcattcttggcagagtctgtactggaagccaatttctttaccttgactttcaacttagtgatcattttactatggcgggtcactcatgactaatgtaatataagatatgtatgggattttaatgactagttttagcagtataaatgagattctattcacttaaagaagaaagttaatattataaattatctgaggtattttaatatgcaagtcttttttgtgtttagaatttaaacaatacattctcatcttctactttttttcataagcataacaaggaacatgcatccacacttagcagcacctcacatgtatgcaatctgggaggttcttcctaaggaaaagattacaaataaaaaattaaactcaaaagtgaatatatatttaggatgaaatagtcataagaatacaaattttaaaaagctgacagatactacaaagaataacaaattccagaaaaataacaaaaacatttttcctcctcctttgttcacacacttgtagggtgatctgtagttcaggttcatatgctgataccacctctggtgtgtcaacatcgttatctcatggcagactgggaggtgggtgtatttccaaaacatccctacattgggatggctggcaataacatacctcaacatagaagtgactgcaaaccaggtaaatatgttttattaaacctaaactacatgtatgttcagtgcagctcaactttccctttgttagatctcaaaaatgttcatgcttgctccagtgtcgcccaacacaaagagaagtgcgatggaggaaaaaggagagtggaaagaaatagtgatcataactgattactgttaagatatcatgttttgcaacttttatgaaaacatatgagtctgtaaacattgctaaggtcctttcaggagtctgtgcatatgaagggcccagatgcctaagctactttagcttcacagttacctctcaggagaactcagtcacagaaaaatgaataacagcatgttccagatgctttaaaggaaccataaaaaatctgtgttcttttacatttcattccctttattcttctaaattgttatccaaagttattcttttatctctatttttaatgtgttagtattaaactacctaaggaaaattttcctgtggaaaaccatataaatattttatacttttcactttttgtataaattcgtgtacttaattcttaggaaaaatgcttaagaataacaaaatatgtttatcataccacaataagaaaacaaaaaaagaaaaacaaaatccctgaagtaagtgttctcttgtgttactgtacaactgcctgtaaaaatcattggggccactggaaaaagatggttaagggtggattgtgtttatctttttttttttgagacggagtctcgctctgttgcccaggctggagtgcagtggcgcgatcttggctcactgcaagctctgcctcccaggttcatgccattctcctgcctcagcctcccgagtagccaggacaacaggcgcccaccactgtgcccggctaatttttttttttttttgtatttttagtagagatgtgtttatctttagtatgccttgtttccattctgggtccttctaatctctagatagccaaagcttgaaggattttaatacaaagtgtctcaagtgacttagctctattatgcctaaaagtcaaaatggaattgtgcagcaaatttctcacaagcaaaattacatctaaggaaagtactatttgattgtagactgagggtagagttaatatattatacaaaatttatctcatcagtcctctataatagtataattggaataattttatatgaattaaattattgatatacaattaaaataaagatatagacaaatttaaacctctttaattcttaacatgcaccaactaatatccttataacttgtggtttatataagggcttgttacttacaatattaacaatcagttgaaacatcatagttttttatttatttatttatttgtttgtttatttatttattttttgagacagagtcttgctctgtcagccaggctggaatgcactggcacaatcttggctcactgcaacttccgcctcctgggttgaagcgattctcctgcctcagcctccagagtagctgggagtacaggcccacgctaccatgcccagctattttttgtattttttgtagtacagacggtgtatcaccatgttggccaggctggtcacgaactcctgaccttgtgatctgcccacctgggtctcccaaattgctgggattacagacgtgagccaccacacccagccataatagttttaaatggtactgttgacagatggtcatctgttctgtgtgaactctgtctgataccatgtgtcctaatgccatctggaagttttgatttcctcctttggacaggtcttgactctgacctactgagtactgcttggatcctctttctcctgaaggtacatgtcctggctatctggccattctgcataccactctcctcttcttatgcttcctggtttactcctcctgcctaaatcctctggtgaccttcataagacatgtttcatatcttggaacatgcagtgagtgatatagccatgttaacagaatgacagacacacagacagacagacagaggcactctcgtgaaaggaagacagcaacaccatcacagaaggtatgaaaactgaggggagatcgctaatgtcaggtagagctacgaagggtataatcagagtttcctgcccatctccttccttgatcttccaaaggaaatctacagtccaccaacagtctccattcaatactatacctcctccagtgtacctgttctacacaattatgctcccacttttccccttcccaagggataaaagctcaattcagattccccttagcccatcacctagaagtagtataaggcttagtaagaggctctcttgaaacttctattaggtcttagcagagtatgcccatctccttcttaatagctatgtagatagtttatataatcagacattaaataaacatttatatgaaaatattttatataaattaggattcactatagtttataattttaaaaggactacaataggttgtatcttcacttaaattgcaactgaacaagagccctataaaatgtagattttgctttacattttcataattttgtgtaaagcatttttaaataacatatataatgttatatctctgaatagatgccattattgttgtggaagagggaaaataatttcttctgtaggacaacataagaatggtgccatcaaatatcaatatttattcctttacagtcctgtgaaagagaataaatatattatacagcagctccctcttaaacaattttatgataaactattaatcagaagagatgtttcagatatgcaaaatggatgaataaaagaatatagtaagtttatagataaaaccgaacaattttatttatttacaaattttacactcagacaaataatagttttttctatattatttttgagatgtttagcatatactataaaactgaataattgtgagtttttgtccgtattttactgtattcagtttgtctctttctgaccatagataccagtggttctcccactatttctgttatcggtggcctggagggcataatcatatgattttatgaaaaacagttatttttataataggatacatgtaaaataaataatttttatggaattaatataatttttaatgtagcttttaggaatttagttcttttaaagttggacacatttttagcaataataatgataatagtgttgacactataattttttgaggacctcttttgttccagatacagtgcctggtgctaggtattttatgcccatgttatggaaggagctttggaaaggtcaagtaacttggacacctagctagtagttagtggtagaaccaggatagcaattcttgtctgcttcactctgaagccagaggtctttccatttctctggcttgtctcttacagtgtgtctagtgttctacaaaattagggaccttcgttatgggtttttattcctctgtagtcagttgaaaattccattttcctccgtagatgaaactgcagaatgaaggtaaaatgaagtagaggcttggttcttttttcacgtaattttttttttcaaatgttggggttgagcttctccacaaggaagccatggtttccaggccatatagaatcaaggttggactcacatcataattcataatctacatttgtatgagcttccagcacagaatagactttcaaaaagtttcacttctaaattaagatatagaaactttcattcaaaattaagatgtaggaattttcagcatctatatctaattctactttgccatgaaaagaagaacaatcatcctatatagttgtaggatcttactgatgcttccaaggcatagtgggcagcagaaggactggtccctaatgtcagaaagattctaggtcaaatagttaaaaattcaaatttatgacacaatgacatagcatagttttgtaatatttaattatgaatttttaaaactttttgttaaatggatatgacagctttaaattcatatacatcctgttcaggttttgtagtcaaatggccctttccttagccccttctaccttgcagtctgttcttaaatgtgacctacttaaatggatagattctatattctttctagagaaatgcctcattcagtgagacataatttctctaacaagaaaaatgcattcactgtgtaattccaaaacctccaggaagaaggcctctgagtagctacattatagtgctccggaatccatgcactaaaaagtgcatctttctttaagagaggatctctaggttctcacttccagcttatttatgattatatttttaagcttttgttttctctatttctccgttcacagcaattgtgaaaaaagaaggggcatccatccttcattcatttattcagtcaacaaacatttatttaaggcctgttatgtgcccctgaaactgttttatgtactggagccattcacagcactaacagctgacagcaataactcatgaagagattttttaaaaaaatgtaataagcagatgcaacagtataaaacttcaaatagtttaggtacatttagtattatcttcccctattctgagaatgagtagccagccaggtttcttccagaggggcaagtagaatgtctcttactcgaggctgtagtttcttggaaatgaaacaaatgtgaaaaatttcaaaatcgagttgggttggctgtagtaaggaagccagggaggcaaaattaacctgccctcaaaaacagatctgaggcattgatctcaaactggagcataaggccaggaaaggtcaggactaaagagataagaatagggaacacagcagctcagcagctcagcagcttaagctgacaagccgaaaggccagcaaggtaaaaattagtgatagagctggattttaaacattccatttttcatgctcccatgggcaactcctctgtaattttgatataagattattttgggagtgggattctctttgtggggaaggggagtagaagaattaaaccttctcggccatggcaaattcaagccttccttaggttttatgcttatatgtgtgtgtgcctgcgtgtgcgtgtgtgtgcatgcgtgcgtgtgtgtgcatgcatgtgtgtgtatttgttgggaggggcagtaactgaccaattatgacagaaggcaacccctccttttgcccaaatccctcccttggcatttggtaggtggtgcaggtacctgtgggttttcacacctctgtagcctctgaggacttcactggattacaggagagtaataattaatgctaataatgaggactcagtggtgtcaagaaagatgaaattcttttatatatgtcattcatgtaagaaagcaatgactgttagatcttcccccaaccccccaacaaggttaatattttaatgcttgggtatttggaggagtaaataagtacttttgaaatttgcttattgataagagcttattctctgatattgcctgagtagatatattgttgctttatgtagctttagtgatatttctatcgttgagtgaaagtgaatcagggctagcactttaatttgcatttgtgatcaggattattcttttgcataaagattaaaatttgatttggaacaggagtcaaggatttacttcattaggtctgaattcacattttccacctcatttgaaataaaatattttgtaagttaaaatatatcttagctgggaagcaatgttataacaacatttcaccaaaattcttgagaaatgttttaaaatccaaaagtctttctactggtaatattattcccccgctgacttcatgtcaaaaccaaatgatgatgtattttccttaaggcattgtttatatggcaggtcttcaaccatatattactaacagtttgtaccttatcagacctgacaagattacagcctgaagagttatattttgattcatataagagtatggacttgagcttcaaaggaataataaggccaaactattatagttcaaggactttaataaatattaaatgataaataaggctggttccacactggcttcagggcctgtggataataaaagaaaatcttcaaatggtgccaaacagtattatggctgtcttgccttttataatctgtctttactgcttgccactgtagttgtcagagctgggaatgatgaggtagcatatgtagtttttgttgctgacagaattaaaagtaaaggagactttaaaagtaatccatctctgtagcaggataaatacagaaatgtgctttttggtaatactgtagtaggtatttaatcactcctcacctgcctactctctctaaaagtcaggttgtggacttgatgttaaatgtgaaacataccaggtgatatgcattttcattattgttaatttctagttttaatggaaactagaatttacttatatcatcatgtttgggatgtcaaaacatgtcccagtgggagagtgcagaatgcctatgattcatagaagatcactaagttatgtgattatatggaggaaaagtaaatgaagctgcttttcaagagaaagcccatcagtactattgttataaagtctactgtgggctgggcacggtggctcatgcccataatcccagcactttgggaggctgaggagggtggatcacctgaggtcaggagtttgaaaccagcctggccaacatggtgaaaccacatctctaccaaaaatacaaaaattagctgggcatggtggcaggtgcctgcaatgccagctacttgggaggctgaggcaggagaattgcttgaacccggggggtggaggttgcagtgaaccaagattgtgccattgcactcctgcctggttgacaagagcaaaactctgtctcaaaaaaaaaaaaaaatctactgtggcagacaaattctaagatgccctaataatcctgcctcctgttgttcatgcccttgtacattgaaattgggccagcctaggtttttttttctaaccaattgaatatggaaaacatgatgggatatcacttctgtgattaggctaaataagataatgacctgcccttttgcttaccatactcttccctttggtgactttgatgaaacatgttgccatattggcacatgcaaggaactgagggcatcctccagccaacagctagctaggaactcagacccttacctcaacaagtcctgtaggaactgagtactgccaacaactatgccagcttggaagcagatccttcctcagtcaagatttcagatgagaccccagccgtggctgacaccttgattgcagcctggtgagagaccctaaagcaaagggctcagttaagatatgcccaggttcctgacccacagaaactgtgagattatacatatgcattgttttaagcttctaagtttgaggtgttggacacatagcaatagaaaactgatacattagatgtattagtttgatagggctaccacaacaaagtacaacagactaggtggcttaaatagccaattgtgagaaatttattttctcacaattctggaggctcagaagtctaagatgaaggtgtcagaagcgttgatttcttctgaggcttttctccttggccttgtagatgcctgtcttatcctcgtctcttcacgtgatcttccttctgtgtgtgtcagtgcactagtccccttttcatatatggacaccagtcatattagattagagcccacaataatgacctcattttaactcagtcacctctttaaacattccatctccaaatacagtcacattctgtgggaactggagattaggatggcttcatatgaattttatggggaaacaacagttcagctcatacgataatttttttatagttatgtttatctctatagcaaaaactctgtagaacttactgtctgtaaaggtcttttgcttcctttttattctttattttaatgtaattatatatttttcagatgatttatatatataaaaaaatcacatagttcagcacatatattttcatatccctgtctccataacaaaattcaaatctctgtttaagtatatgtctttcatgtactttattattattattattattattattattatttttagacagagcctcccgctgtcacccaggctggagtgcagcggcacgttcttagcacactgcaacatccatctcccgggttcaagtgattcttctgcctcagcctcctgagtagctgggattacaggcaccaaccaccacacccggctaatttttgtgttttttttggtagagatgagattttgccatgttggccaggcttgtcttgaactcctggcctcaagcaatccacccgcctcagcctaccaaagtgcggggattacaggggtgagctactgtgcccagcctctttcatatactttaggtataacactttgcaatatttatggtattgctgttagaggcattttcaaaatctacctttactttttgtgtttgcttgcatacttctaaataagttggaagtagcttgtcttaagaataagtacttgttaaaaagatagggagtttgaagaatttacatttatttgaagtaggtataattttagataatggtaggtccagagagtatctatctttgtatttgggaatccagatataatggagatacactgttagagcctatctaatgctgggctgatttattaagacactgttttttgacactttgagttattaatagcactatacgtgtttaaaatatttttctaaatggccaaaaaaaatctacattatatacattatatacaacagttcattatagcacagacgagtggttttcagagtgtgtctgcagacccagggagtgccagaaactctcttaggggatcttcaaggtcaaaactatttccaaactaaaactaaaacattattttccttttatttaaagaagtgttgacatttttatatgtgttgacatgtgttgcatcataaatgcaaaagaaatagtggatgaaattgctggaggctttgcattaatcgaggcagtggtgttaaactactggcatttgtattttaaaatagggataatattgccaatataagatggtggttgtaagatttaaatcagatattttgtgtataagttttcaactaatgaccactatacactgctacccttatcagcaacatgtgtttctaccatatttttgtcttctctctatgatttattttgtgttttgatgagtcattttggttatatttatgtttataggtacctccaccaaaaaatcaaagaagaatattaagataattcttaaaacacaagtctatagtgtttcatgtttcttcaaagaaatggttagggaaacatagaaaggtaaagatgagcaagcaattagggatttttggaaatctttgatattaggaagagcatcatatacctaggaagttgagccaacaattgtaaggagaatggttaacagaacatatgactgaacagagaacattctccattagggataaaatataattacctgacttagcacttattccattggcaattcaatttccatatatgcatcctctgctctaaattggtatgtctatactgggttatttaacttattacaataatatatacttgatgtaaagatgagaaagaatagtattgttttgtgcaatttccactattttcccgaagtctaaatctagcactgttctatactgcactctgtcaagcatcaagtcagtgaaaaataaaattagattgttgaactatgtgctattcacttaattctaaatttgaattatcattgtttcaaaatgaaatcaaaggataagtaaatgcaaaggccttttgtcattttgttatgctgtttattgtgttttattattttttgctttatttttgccttattctgtttttttttttaacagatcatcagaaactagaaagagaagctagaatctgccgtcttttgaagcaccctaatattggtgagaacgtatttttaatgttttttaaatgttaatttaaaattttatgttatttaccacaataaaaatgctaattttataatctagaatatttataacttttaaaaaataggttcctaactttcaatcttggttacatttgatacctcaaagttttcctgtgtttgctgtttgttttttgatgcaatctttgaagtagaaatgtgaaaaattaagtttgtggaaacaaagatactaaattaattaatagtgtatgttttctgttgtgctgaaagttgtgtaccaaccagtggaaaacctgagtgtaatttaaagaataaataaataaatttaggtaatccctggttatattagctttattttaaccacataatttggagtctgctatgttaatgagttcaatgtcctttctgtagagtcgtataatgaaaacaataatcctttacctaattgggaaaatagttgtgaaggtaaaaatgaaacaagtataacaattttttgaaaagttatatatatagtttttcaaaaggttgtgattatgtataaacacttcaaaaaataatataaggtctcatttgaatagtgcttttatgtgtctttaagaattgttcagctacaggccgggcgcggtggctcatgcctgtaatcccagcactttgggaggccgaggcgggtggatcacgaggtcaggagatggagaccatcctggctaacacatgaaaccccgtctctactaaaaatacaaaaaaattatccgggcgtggtggcgggcgcctgtagtcccagctactcgggaggctgaggccagagaatggcttgaacccgggaggcggagcttgcagtgagctgagattgcgccactgcactccagcctgggacgagagagcgagactctgtctcaaaaaaaaaaaaaaaaaaagaattgttcagctactgctgctgaagtatggaaagacaggatttatgtcatcactttactcagctaaattacattccatatatcctgtagaaagtttactttaggccaggtgcggtggtttacgcctataatcccagcactttggaggggtgaggcagaaggatcgcttgaacctaggagtttgagaccagcctgggcaatatggcaagaccatatctctacaaactattaaaaaaattagctggatgtggtagtgtgcatgtatggtcccaggtactagagaggctaaggtgggaggattgcttgagcccaggaggttgaggctgcagtgagccatgcacttcagacagcctgggtgacaaaatgagaccttgtctccaaaaacaaaaaagtttaccttatagttattgatttgattctagaaatagtaaaaggactttagaatatttatccctcatgaattataaaattgcatgacttttcaaaatttttaaaatgtgatgaatataagaaacaagaaaaacacaggaaagaaaaagtaaattcagaaatatgtgtaaactggattctgtgataataggtttgattattttggaaaaatgttactgtcccagctccctcaattttattgttaacctaagtatttctgatctagaagcagtgagaaaaggggtaacagtgatgtagaatttgcaaaatctttcactgaaaagtttacaggtgttttaattttatgtgtaggggcattcaatttctattcctgctttgatgtttttagtattctgcacttagtgggtgcatcttagggtcttaaatgaatggatactatgggtaaaaaaaattgtaacactggcaaattcacctatatcattcactcactcaacaagttacatttctaggtgtatagtaggaacaaaacatactgccagctgattaaaaggaaccttctggtttgaggagagaacaaaacaactctgacatataaatctacctctctagaagcattttactctgacaaaaatttatggcatttcttgtttggctgtattggtttgctaagactgccagtaagagagtaccacagactgggtggcttaagcaacagaaatttattttctcatagctctggaagccagaaatctaagatgaaggtgttgtcaggtttggtttcttctgagacctccttcctaagcaagtaggtggctgtcgtctcactgtgtcttcacatggtcttccctctgtataatgtctgcgtcctcatttcttcttgtaaggacaccagtcatattggattagggcccacactgataacctcattctcacctaattacccctttagacactctatatgcaaataatacagtcacattctgaagtgtgctatcaggattagcatatcaacataggaatttggggaggacatcatttgcccacaacattggctaaagagaaattacgcaatgaaccactatagttcaaagattacttctcttgctcaggtttaagataaaatcaaatctttgtttagtgaagttgcaattcctgtgcagaaagttgttatttgtttgttttggtttggtttggtttgtatcaggtcctcctatgaaactcaatttttgtggataatgaaactagtttcctccatttcctctaggataccaaagtcaaacactcgaaaaactgccaagctaaaacaagaactcttttcattttgacactacatacagactaaacttataaaaagagaaagaatgctggggaaagttctaaacttttgtgtcctagatagcattgtcaacaccttctgacacagtgtacatctttttgcgaggatccataacagccaaatgtcataattccttggttacctcactggaggttttctttaaccttttaagatttcaggagtacaaaaggaactgtgacaattctaggtccttgaaccctaggacccatttctaaccacaagagagatttcgagtgatcctttatctcagtgtataagtcatagatggattaaatttatgagacataatctcaaaaattgtaacactggcaaattcacctgtatcatttactcactcaacaagttacatttctaggtgtatagtaggaacaaaacagaccaatatccctgccctcatggagcttgcagttttgggggagacaggcagtaaacaaagcattggatattagatggtgataattgttgaggaaaaataggaagcagagagggaaatactgggtgttggggtattccagttttaaatagttggtcaggaccatttcatagagaaggtgaaatacatttgaatgcagacctaaaagaagggaggaaggaagtcatttggctctctgggggaaaaacaaacaagcaaacaaacgaaaaacattgtaggcagagggaaccaatagcctgcataagggccctaaggtcagtagattccaccaaagctttttatctaatgagagaaataggagatgagttctttctcattttatcttaccttaattgatgaatctccatgacatgtaatctgacagtgttgtgtttattcatgtaaagaacgattttaaaacatcaataacaacagtgactgtcataaaatagtaagcaacagccaacaaaggaggagtgttttaaagacagatgccataagtggacatctgcaaatgcattggagagtagttgacccagggtgtaaggaaagtactgcagttcctgtcgatcatcgcactagttaacagcaccacatgaatcactagtactcaatcatgactgaatcatattacacagggaaaacagcatttgctcttgatttccctgacataggtaatatgatatctaagtaatatcagactcttatcctcttctccctgttctctattttattatttccttggttttaaaatcagctaggctttagaactttaaggaaggaaataactatttttgaccattttttcccctgtgaaaatgtgcttgtttcatttttatatttgaatgtgtctttctcttggcacagaatcaataatcttgaaaacttgcagcaagcaaaaggtttcttccaaagaaacacattttaaaccaactaaaaatggtgattcattaaactactttttttcatgtgttattttttatgtttttctgaccttaaaagtaatactgttagtggaaaatttggaaaatacaacattgtataaagaagaaacctgagggctcaacttttaatatttgatttattcatttttgcctttttataatcttatatatatatgctaattttcagcattctcttgtgtgcattttcatacccctttagatatatcatgaaaatggtctcacccaacaaaatttcttgagtgtgtagccattgccaagctttgttctaggctatatgcactggtgatgaaacagtgattgagagagacaatggccctcttttcccaaagctttgcatcctagtgtataaacaaaacaccataataatgtcgtaaggatttgttctatgcagagaattaaaatagggtaatttgataccaggggaccgggtggctactatcaaaaacaaacagagccagacaccagttaaagccgatacagattttattttgtactattgcaattgaggaaagaactgaacttcattccaaacacagcaatgacagctggggatttatagtcaaggagcagagtgagggggtcagtggatggaagatttttaagaggagacatcaaggatagggagttgctgaactggactaacaagattcttgctaaaggcaggccaaggacttagacattaagggtagaggatgaagaccttgatgagatatcaaaggtgggaaatcacttcgtaggattcttcatttaggctggcttaggaaggttagggacattgtccaaggatgagatctagttgaaaagaggaacctgcctgatgtttggttagggagagagtcttggtcactgctttagagcgttttgtcaggcaagatatatctatggaggtcacatttaaactgatatctaaatgacaggtggaagccatcatgaaaaagagaaaagagtttcaggcacagagagccctccttgttaggggaaaagtagggaaaccagtagatggactgccatgggggaaagggagtgactgaacagggcaggtagatatttaaccaagtagggtttcgttaaccagatttgggagtttgggtttcattctacatgcaatgggaaaccaatagtgggattttaagcaaaagtgtatcataatctgctttgctgtgtctgctatgtgtaaaatggtttcctagttacatgagcacaatcagtgataatagtgttcagtcaggatatcagaatctagtcttatcagcctagtacccctgaactacatcttcttggataagaatttaaacagctccaggttggttctctctttggtgtggtccacatgatccaagaaagcaccatgcatcttttggctcaacaaattgtagagtacagcccgtttttaaagaagctccatctttgctgtgctctagccaggcaatttttgtttgaacctcaaactggaaagattatagctgacattaagatgttgaagcaatttgaggagaacaccttactttgtgcttagcttagttaatgtttgatcattctgttcaccttttattttaataaaattggcttatttttctttgaggaattaacaaatttgttgtaagccagaaattctgagctatatgtcaacatatgtatcaaataagtaaaagaaaaatacctttcaggtattgaaataaaatatttgaggtgatagccaaattctcaaaattatttgatattcatactgtttttattcttggtctttgatttgaggaatttatttaaacttatggtgaagctcagataacaaacaatggtaaagagaaaataggaaaacaggaaaaaaattcatttaattcaaccataagagtccaaaaacagctgggccaggaaaggaaaagaaaaaatattgagaactttgatctgacttatctgattgtcccaagagagaagatattcatgtatgggcctttatttgggaaaagatcaatatttgagacaactttgcagttcatgggatgatgaattctgttgccgggttgtcccattccctaaagacttgtgtttacattttgtgtagactttagaaagagcaaggtaattttttgaaagtttgaagcaacatttatatttgtagattaacactatctttataaggtaagcgtttcccattataatatggcttaatgaacttcagcagctagagagcaaatggaagagctatgtaaccttttgaatctagtctttagtgataccctggaacccctagtgcagggaatgaattaacctttctagatcacgtcatagctcaatgattacctcctctctactggctttcctacccactaccccaaaatgcataaacacactcactcatacactacaaagtgtaacagataataagaggcatagtgttaatggaaagctctatagattcactgggccacagtttattctccttctgatgctggcctgctctgtgatctgcttatacaatcccatccactcaccaagttctagttcctctctttgtaaagcagagaaaatatttgccttttttatttccttccaagaatcaatagaatgaggtaatgcatcttactttggtgaggagttaatatattttgtaagacgattaatttaaataaacagttgagtacattattatggggtactgcttaccaagtagtaactaattaattcatttcttagcatttagtagtgtctttctgagatgtgcgtattcaacaatggggaaatatatttcagaaactttcaaatatcatatattctatatgatatatatgttgtatatagtatataatatatgatatgtattacacataatcagataattgtaatattgcaacagcagatcctatacattatctagcataaactctaatttttttgttttaatatttaggagagctaaaattttccaaatgtatatgatttgtccaaagtcacagttctttaatgatattgccagacctaaattgttgattgcttctgtaaagagatggcgatgtttagggaacctaacttgaagcagcaagattgaaaaagcaatgtttttgttcccttttgaggagagttttgaggttgtttttggttcaaatcgattcctcccctcacataagataaacattaactaaaaaactttcaatattaatacaggaagagaaagcctttacattttagacagcataagttacagctacctaccatatatattagccctggtatagaaccagtgtgtttaagaaagatgctctgcttaaagatgatttattgtttcacatatataacagtacataaaatttcatgtgctgacaggtggagattaaagaatatataagagcctttactttctataaaagcatgtttcccattcctatgagtaataatggcatttaggatctatataattttcttttcctaaaatttaaaactggaagagctcttaggaattacctaagaccaacctagattctacaaattgaaggtttaagtagtgaagtaatatgcccaggatcatacccagatctaaaaagagatgaaaaacacacaatctgtgtattacttcgtttagcacgtagtgtttcttctttttggtgactttggagatatgatgtcatcctgtaaaagtaatattttaaccacaatcttagatctccctagttttcacaagaaatttttcgctcaaataccattcctcaagtttttatgaaataaattaactgtcattttttgtttgttcttttgtctttagcagatgattttaaccataaattttgcctttttatccttctctgcatgcagttgtcttctaggttcctcaggttctgtaaggaacccatacaatcacattgtacaggttaagcttactaaatatttctcttaaatatacccagtatttacttataaatgagtaaattgccttatgtgtttattgtaccaatattccagtttttgaacccttggaaacaaaatcacataggaaagaagagtagagttaatgcagagtaaatgttaattgatctactgagaaaacaaagttaatagttttatgaatgacaattaaaagtctttttcaatggcatcagaagttgagcaacagtctaagaaagcgacgcagtttttttctgtgacctctcccttattgatggttctgcctaaaaattagagtagtttgtaatcaaacaagagtaagtaatttttcttgttaactactttctctagtgactctctaacagattaaaagtattttaatactatttagtagcaaaaagcaaattatcttattttatatttaccttatttgattaaatctcagctctttattatgattatttggtgagaaggccaaattacttcttagaatatataacagtctgcaaaattgattattctcttttaataaatgtgagaactagcacagcgatatatttttctcttcaaataaatatgttcaaaaaattctaattatctgttttagctttttttcctttgtttatacaatatggtgccagttatgtattctttataattcttggtagaaagttaaatttatcgtctttttaagtaaatgcttattttactaaaaagacaaaatttgaatataaaaattgtatattcaagataatgcttcaaaatcttttccattggtgaatttgaatctgagtacatttgttactggtttctttgtcaatatttttttccatgtatcaatgaaaaagccacttcactaagttaatttagaagtaggtagatttatacatgaaactggagaaaaagagtccttctgttacaaatgaaggatagtttcatttttagagttacttatagtacatagattacactttgatctatcaatgcataatatttactgaaatagttctgatttattctactaagcctatttgatttccatcttgccctgtctccactacattcagggtagaatcccctaacagggtattggaagtttatagtaatttcttcagctcagaagtcggccctaaactgaaatttgaaagaaaaataatcccaaacatgaggagtactttgttttgttggggcttgagttgtgcagaatcccacctccactcccttttctcaccatggggaagaataactcatgtcgctagggagcccagaagatagttggggaagtgataacactttttgttcacttaaaaatcattcctcttttccctttattccagtagcattgataataaacttgcctatggtaagtacttgtattaagatgtgaagtaggccgaattagaaaaaaaaattagattggaattccaaagaacttcaccactagaactaatgataaaactattaactgtgttatcaggctctggtctaaagtgttttccatgcattagttattttaattctcataacaaacaaatatcattcttgtctccattttacaggcaaggaatctaaagcctaaagaggttacacaatttaatcaagatcaggcagttagtaaatggtggagttggaatccaaacctgcatattctggcatgacaatctgtgctcttcaatactgcactgtatcgctgctgtataactctgaattagtcatactattctttaataagtgcagaaaataattttaaaattttataaacattgattaaaaaatccttgcttaaattatctaattttagtatttattattagtccttgttccagagggaaatattagcatgacattattattcaaatgcttatggaaaatataggtattatagaactaattatattttaatgacaatttttagtatcttggtaaaaaatctggcttatcttttacatcttttaggtggtcacatctggccctgaattaattattatcgctgtacaagacagtcttttacttttctctcttactgatcatgaaaatgaataaaataattgtcagaaaacaatgaaggctaaggaaacaatagtaattaatataatttgtacaatgtatgacaaaacattttaaaactctgctttacattgtagaaaaagaaatcaggaccagatagtaatgtgatgatgaattcttacatcagataagccctcaatttttttaaaacaatcattgcttataacttacttagagtatacagaggaataccaatttaggggtttgagataacttttgaaagtgtactttagagttcaattatagcatttctttttgtcactttttttcctagctgcagtttactttggtaggaatttgccacagtagaaaaggtagcttcatattcttattatttacacatttgaacacaggaatttgttttctttaaaaatgctccataggtagaagtgtttgctctctgaatttgatttatagtacatcagtttaacaaaatcatatctagctctaatgagctcaccatggatttatgatcatgtcaggttattgtttgaaataacttgttaattttattatttagtttagaagtctaatggtctatgttgaaggaaagtaaacagtgatatgacttgaattctcttaaaatattctttcacgtttttcacttcagtagtaatttataacatatcctgtgaaatgacagaagattttgctcacactgttgaagttcagtagtttttataattcagtctccaaagattactttcagtttttagtgatgggctattgtgtgttttaaccaaatgcatagaataagaggaaaaatttttgtagcataccaagttgttcaccaaagaagataacagtatgtttcgtgagcattattttgaagtgtaggatgtcttttctttcacttgttctgttcagaaaatgatattacttactaatacatgtgcagaatctcattattttgtaaacactttccttgagacatccataattattatttccataggcataggcagttttgcatattcacatgaatttgtgttggatatttgtcaaaaaacatgctatgctttgtcttatctatttttcatttagagcaaaatgctcactttcaaattgaagtgataaaacatcccattatattttgattagatctggaaatgttttttcgaaatcttttgaaaaatttaataaatgaaatgttaatttaatttgtttccacccattatatttttctctaatttctttttttttttttttgagatggagtttcactcttgtcatccaggctagagtgcagtgtcacgatctcggctcactgcaacctctgcctcccaggttcaagctattctcttgcctcagcctcccgagcagctgggattacaggcatgcaccaccatgcctggctatttttgtatttttagtagagatggggtttcaccatgttggccaggctggtctcgaactcctgacctcgtgatccacccacctcagcctcccaaagtgctgggattacaggcatgagccaccacacccagccgtctaatttcttaaacaatcattagattagttttatgtccacatttgatattggaattaaaggaaattatattaatctggggaaaggtaaaatgaaagataagaaaaataaaactatacataatttggaagttgtctcctatttctttgtttgagttgaagtctcactctgtcactctggctggagggcagtggcacgatcttggctcactgcaacctctgcctcctgggttcattcaagctattctcctgcctcagcctcccgagtagctgggattacaggcacgtgccaccacacacagctaatttttgtatttttagtagggacagggtttcgccatgttggccaggctggtctcaaactcctgatctcaggtgatctgcccacctcggcctcccaaagtactgggattacaggcatgagccaccacgcctggccagttgtcttccatttctaatggttaagcttgattgagttgaatagcgctaactctgttgtagctaaagtactggtagactacaaagatgaatgagacatattccttgaccaaaaagagttcacaattttaaaggacaaataattatgtatgcaactgaaatatagtgtgattatatactataatgaaactactaataaggtgccatgggagcactaacatacaagctaagaatcttaactgaaatatattggatggtgaacagaattttgccataaagttgtagggattggactgaagagcattatagaaagacaggcccacaaaagaaaaaatagagttaaaagtctttgtcgcacttgaatgactgaaaacctgtaatgattggcgttattatatatgtgtgtcagaaataaaagttgattgagaataataatggagagtctgggaaggaatttgatttttaatctggagaaaataaagaattaattaagatttatttagtcgactcatgattatatcagttttttaggacagatttagtagtaataagcataattatgtggtgtcaggaaaaattggtgttgaaagagcatctgaaagtctctggagtgaatgtaggtgtaaggcatgatgagttcctcaaccatagcaatgggatcagggatggcaaggagggcaaagctaccaaagatgttgctgtggaatcagatcttgagcaacaattaacttgtggcagatgggctaagaggtttctttgaggtttctagtttgcgtgactagagagatgttgatccctttaactgacaataggcaacaaaggaggaaaaaacattgggagaaattagaaatttcactgatttgaaaacattatttttttaaggattggaacatttccattatgggggaacatggacaaaaaaggaagactagaagtcgcaaatgccactacccaaacccctgatctttcactttttggcagaagatataagcttcttaccatgtgagcatcctcttcaggatggaaatatttggctgtgactgtgatcatctttcttagactaagactgaatgctgctgagtcaagagcagtcaagttgggtgctcaaagtatctgctgaaaaagcaacataacgtctgtagcaactccatcaccacctaactgtggttgagcacttatttctagggtgctttttccccccattctgtccactaaagtaaagctcacttcttaccggtcccttgtgcctttcccaaacatgtatcttttgttggctcaactactttcatttgtgtatatcccatcagacttgcatgtgggataccacatagagctgtagagagtatgaatatatgttttgagtcatctacatgtatgggatagtgagagcatatgaacgtgcccaacagtatattaccaagggggccatagacagaatgatgaaaatgcttatttgtaaaaatttgacttcttttaaggagcaataacaacagccattttcttagattactttcattctgaatatattttaaaacatttaatatataaaacagctaaatttttattctagatgaataaaaggaaattatatttgggaacaaaatattttgagatgtacaaaaatgcagtataggcttctttttacaataataatccaactaccccaattttaaatagggttatatcaatttatactcttagaaaagtaggaagactataaattttaactacagtcttaattttgttaaagctataatgagttactattttgaaggtcattatttccttctgccaatctccttctcccaaataatttctcatttaaaagttgtagtgccaaatgtgcatttaagcttatttgttaggaactctctaagagaactctgataaaacatggttttcaaatgttattctcatatgtgttgattattccagtgaccttttcttttgatatttcttatataaatctgccattcaaaattaaattacatcttctggtcattttctaagaatatattcataatatggatgagagaaaagagatggaaccatttttcccccacagaaagacagaggatcattcatttaaggtaacagttttcaacctgggatgattttgccccctctactctctcttccttccggagacatttgacaatgtgtagaaacatttttgactgtcacagttgtgggtgccattctggcatctcttgggtggaggctgctaagcatcctacaatgcacagaagagcccttcacaataatgaattatctgctccaaaatgccatagtactaatattgaggaactcagtgatttaaagtaagagttacaattacaacaaaaagataaatagccagcattatttgatttacttctggggccatgcaattttctttttcataaaaaaagtaggcagtgcatcttcttaagtaaaggacaaatctattaaagaaaataaactgcttttgaaacaatttatattgtatctaattaaattgaagcatagaaattgtacggtaagcagagccaaggtagcatagtctgatgctgacatatgctaattacaatccttataaatctattcatcagaacagattttattaggcaaccttggcaatcctgattccttcacacacaaaaaggtaatgaaagctatttaaatataatagaataatttagtcttttaactaattttgacgggtcttttccccaattaatctgaatcagtgatgtgttactatggtgtaacaactgcaaaacaccttccagtgaaattttttaaaaaattatgtaaggctatcatgaggtttttcggtaaactagaaaacattattttttgagataataaataggttggaggtttatgatgcagttatttgtttttcatttgggaaggttttaatgtttaaatggtgaagtgacaatatccgatttaattttaacaggattactctggctactgcaagtctgaccatgtctttcctctcctcggaaactaatcagtggcttcccactgcactcagagaacgaggggatggcatgcaaggcttgcaaggccttccacaatgaacaccctctctcccttcttagcttattgttcttctgatcttagcttctctccccctcagttgctctgctccaacccctctgggctccttgcatttcttcacctgttcctgatatcctcctgctgggcctttgcctggagttctttctgaggatacagcaaggaggcatgctggctcacttcctgcaggcctttgctcatccaaagtggaggcctgccctgacagctgtgtgtgaaagagcagccttcctcccccatgccccacccagcactccctagcatccttcttgctttatctctgatgcacttaacaagattttgtatatttacttgttgatttgattgttttctacccagtagtatgtaaaacttcatgagggcatggacttttcttgtttattattgtacctaaaaaagcacctgccgtagagtctgcgctcaataaatacatgctataggagttaaacaacgtgtgggtacatatattttttttaagttcaagtttagattatctgaagaggaacaaacacttctattaagagaaaagcataaattttaacttatggcacagctgttttgtttaagttcatctgcaggcttttgctttccttctggctaaaatgactatcaatggccctgggctggcccacacctaaagactgtaaaacaggagagcaaacaattgacttctccctgacttgctaagtcaacaaaccacatgagtcagcaaacctctttttactgcctgaccttccttaacatctccttatcgtattctgaaattcctattctgctggctggaatcttggcccagacccttttggtgatctttgatgtgtttctcatacaccctgcagcatttgaatcatctttgtcaggagtgtgaggggctcatggtctcttttatgtggcagacacctaaaactgctagctgcttccttaccttcctcgggagcattttgatgatactccagaaagcagaacagcactatcaataaatgtcatggatttttttttttctccttgctggattacctagcctttcagataaggttggataaaccttattctagggtagccctttatttgactactctacccttccaagcaaaaagctgcttttcaaatgaagttatcaaactacagtagtcaggaaagaaagagaaaggttggttatctctcactgtcacttgggagctctgtcctggaacaaggattgacaaacttttctgtaaagcacccaatagtaaatattttgggctgtgctggcagtgctacctctttgtcattgtagcacaaaaacagccacagaaacttcataaatgaataggtatggctatgttccaataaacctttacttatggacactaaaatctgaatttcatttaatccatctcaagatgtaaaaaacattcaggccgggcatggtggctcatgcctaaaatcccagcacttttggaggctgaggcgggcggatcatgaggtcaggagatcgagaccatcctggctaacatggtgaaaccctgtctctactaaaaatgcaaaaaattagctgggcgtggtggcgggcgcctgtagtcccagctactcaggaggctaaggcaggagaatggcgtgaacccgggaggtggagcttgtagtgagccgagattgtgccgcttcactccagcctgggcgacagagcgagagtccgtctcaaaaaacaaaaacaaaaacaaaaaacaacaacaacaacaaaaaattctcagtacaggctgttcaaaaataggtggtgagctgaatttggcaattgagctatagtttcctgacccctgctctacagtgagatgacttcatctttgtggattacttggaccttggaggtctgctgaactccctaatgcttttttttcttggatctgacaaatagctttatttgtgtctcccggccactttgtagattctgaatcctagaagggagaagctaaaatatctgggtgcagtgatgatctgctttgcttcccacttctgagtttctctaattctggaagatagtgtcatttcaactctgatttctggtttagctcagctctcaattctaggtctaatgtgatacaaaaagccttacacctgttgcttggttttgtttcagtcttgctgttggtcttattgttacctaccttctcggttgcccattgactagatttcttgcctcatgataaagctctggataatagctgcctacctcttggtgccttcatctgccaaccaccacacctaggtaacctatgaattttagacttaagctgagactactcaaggcttccctttattcattttccttgggaactgatgatctatttcagattacctttgaatttacacacaagtgctgcttctagaataattttgactcctgacttttgctcttacttttaaacttttgtcccatttatgatataggtcagctttgtcttcatttggcagatttgtaaccatctaagccaagaatctgacaagatattattttttctgtttcttctgattttattgaggtctttttctttttgaacccatctgtttccccatctttctcaaaacaccctgagtataccagggtctgcacgtcttatgaagtcaaagttagaatcacttcagttgtgagcttgcctttcttaattacacaaacttcttctgacaataataggtataaactagaatgacataatttgatgtaatataagaccatttttcagagtacagaaaagcatattgtattcaccttgatttgcaaatatctcatgaagagaattactttattctttgggcctatttttcacttgtaaagctggcctgggtccccataaatactctgtccagtttaatttgagtttaacatgacactgaggagtagtctgatattactcagagagggtgatacaactctgaacttgttggcccttatcagatataatttaaatttcccctggaaagggaaataagcacttggaatcaaggcaaagagccaaatccagcagattatcaagatggtcggtgggaggaaagtctgatggtttccgctgctaagcgtgggagatactgacctactctcattcacttacttttgtacatagatgtagactgtgagctgccaaaatagagaacaattcttactttctgtcagcagcttatcagaattccctgacctccaaaaatgatgaacacagtccggaccctgttcttatgactggtgattgatacagctggcttagctcttgttttttgacttgcttttattgggccctggactatttgttctacacactttaaatttgggtgcatgagcacccaggtatgacttcatagacagccctgtttctgatctgaacctatcatacttgcctctggctttgcccttttatcctcccaactctctacactagtgcttctgcccttgttggactttttttaaaaacttttttatcatgtttgtatcttatatcttggaagacagaattatccctttctattgaaatataatacttttagcatatatttgaatgaatatagattgaagaaatgtaatgtcacttgtcttccaggaaagactttcagttttgtggattaaaacatttggtattttgattgtttaatttctaatcttgatttataggacacagatagtttctgctcttcttttgttacatatctatttgtaaatgatttggtaatactgttcagatgttccctttttctagcttttcattttaaattgtagtatctttcttttattttatagatatagtttagcatggtctctgctatggtttggatgtaacttgaccctgcccaaactcttattgcaaccataatttccagtgcagcaaggtgtagggtagaaactgtatgagagggggcctaatgggaggctttggatcatgaaggctttgcccttgccctggtgggcagttggtgcctttctagcagagcgcgactccatcttgaaaaaaaaaaaagaaaaagaaaaaaagaatgtcccttgttctaaccagcttccacagacagccttatcagaggagaagtatgcttttgccatctctttatggaaaagaaaataagcctttagcctagatggctattgttgcccaaaaaagggaggagggataaatagcttcactccgctgctaagttggtatcagtttgggtttaattcagccttagcatgtccatctgtccacttctgatgacacttgtatgtgtgaggaatgtgggagacagggaatggaggtgagtggacattctggtagtgttcagatatgccttgattttctccaaccctggaagggagtagttctggaatcctcctacctgtccctcaatttttcactttactaagattataacttatagcttccttgagatagaaatgactctgcagagcccatcctgaatggaaatcataataaataattcctatatccagggaagtctgaaaactaatcttgtttcctgtttttggagcacagtaactggcaaaatacatttggggtgagtttgacttttagagggtggttctgaagcattcttatatgttagattcccttgataaaatggcagattcttgagcttcagcattacaaattgatctggagcgggctctaggaatctaccactttttaattttttgtttgcttgttttatttatttattgtttattattttttattatttttaaatttttttagactgagtttcgctcttgttgcccaggctggagtgcagtggcatgatcttgactcaccgcaacctccacctcccgggttcaagtgattctcctgcctcagccttcctgagtagctgggattacaggaatgtgccaccatgcctggctaattttgtatttttggtagagacacggggtttctccatgttggtcaggctggtcttgaactcccgacctcagatgatccacccacctcggcctcctaaagtgctgggattacaggcatgagccaccatgcccggcaacttattattttttaaatcaagcacccaggtgattgtgatacaggttttcaaagccacaatttataaaaaacgttgtgctagtgataatgttttagaaaactaaattcccagtaaagctttgagccaggaactttctattaaactctgtagctctctaggctccctgtcctctttatcactttcgtaacaggtctagagaatgaaatctgcaagaaagaaagatccttagatagtgtcaatctgaaacatattgtatctaaacacttaacataattatcttatttaattttctcaactactctgcagatataaatattatatcaagtgtttttaatttagttcagtaaatatcgagcctttactatgtgctctgtacagtgaaaaagttcagtctcaaatagatatattaatttgactggggttgcttagtttatgaagggtggaaccaggattcaaatacatttgtttgattccaaagttcatgtttctactctacaagccttctgttcttcacttcctcatctgctcaaagctgtgaaagctctctgtgcagctgtattactttttatttaaataaagcactagaaggtgaacaacatgataccaaacactgttgacttgtaaggggctttcttcctgtaagagaagttaggacatttacacatgaaaatactcagcagttcaaagaagcatgtaattaagtgcccaaattagagatataaagagagaggctcatattgtctgtggaatgttttctacagagcattgaacacatttaagaatctgaaaggataagatttagaaaggaaggaacaatgttgtctccaaattatgaaagttaaaatgagtctgtctatggatgatgccaggtaattatccttctaccttataaaagttgtcaacagacaattagctatgtaagtaattttcccctcattcctttcttgttgaacagtttctgaaagagaagcactctattgtcatttccttaatgcacatttattttctaagcgtctgctttcaggcttcttctatgtgttcctaagaaattgctctcatagtgattatcaccacctccttattactaagtccagtggaaccttcttgttctggtcttacttgatgtctctctatagttgaatgctccataccttccccattacaatactgattaggttttgttaggactatttacctaatcatctaacttttctgatagatagtaagctctctgaggatggggattgagtctgtcttgtacgtaaggaaacaatatggcccaggaaaccatatgagttacctcctttggcttttgtaacataagtattttctagatttcttctttatctccaaccattcattcctaatctccttcgtgaattccccttctgcctacctcttaaatctacgcagggcatttcattcatatattagtaactcccaaatctattttagaggttttaacgtttctctccagacacgtttcctactagctagtggaatattcacttggatgctattctggtactttggtaatcatactgtgcataaaatggaacttgttttccacccttgccccactcagctcccacccagacctgcttctctgcttgtgttccctgctataagccttgcccaagctagaaatctggtgtcatcctctctacctctccttcccttgccaacttatataagcacttagcagttctcccttcaactttctcagtggcttttaaatctatcccctccccctaacccacatgctttaataagccttccctcttctgaattcttccctttgctatgaagaatggggttttttaaaaatgcaactcggatctgtcactctcctcaaaatcctcccatggctccctaatttatcaggctaaattctaaaatcctgacattgcaaagtcctttatattttgagttcccctatttgtttgctactctccagccatacagactccctccccaaaactgtaatttcttatttttccatcttctcttggtacttttccacttacattctcttggtgggagacgctcttcttctccctcccactttgtctggctgaactcctcctttctgtttaggcctcatctttggcatcaccccccagccttccctgatgcccctaattggtattctagggtgggtgttgtagtgtacaaaggtgcctggctgaaggagtgagtcagcgctggtgcagggcttcctttttctgatttgcacagtggccctatgcaggctagtagtggctctggtaccacattacttatttacatatccttattccccccacaaaaagccatttggccttagggacctcattcactttttatcttcagggcctagcaaacaaattgtcattagatccagcacagagtatggtataataatcttgcctattcatatccactgctttcacaatttactatgcattttttttctttttccttctttttatttttgtccttaagagacaggatttttctctattgcccaggctggagtgcagtgaagagatcatagctcagtgtagcctcaaattcatgggctcaagcagtcctccctcagcctcctgagaagctggggctacaggtgcacaccaccacaccgggctattttttttttttttttggtagaggcaaagtttcgctatgttgcccaggctggtctcgaattccaggcctcaggtgatcttcccaccttggcctcccaaagtgctgggattacaggcgtgaaccaccgtgccaaacctacatttttatatttattatttttttctgattaacaataaagctaggttattagctgcctgggaagaggaggaagtagatttttacattcacttttaaataaacttttaaattcacatgagaaattccaccttaccacaattgtctccctaacatgtctttggactacctctgtttctctaagtttttgtttttttctggtgtctgaattaagttggtgacagatttgggggatatttgagtagcactttatctagagttgcttgcacaaaagctgagtaggagcatagccctaatgagttcgcattaccgaaacaggtccctgtttgctgagagtgaaattcctctattattttcttaaaccccgctttgctaaggttataaagtggtccaactgcattctacctttaactccaaactgttctcttaaatatgtacctggcagaactgagagcacattgtgttttgcatctcgtaggtatctaacctacccccaagggagatattctctatgggaatcacacctcagaaaagaaaataatatactttctcctacctctctcattgttcgcaggctcatattctccaaacctctatctcatttttcttcttgtgctctgtggttcccactctcaaattttctctctctctgtctctatccttctgtctctgacacacacacacatacacacacacacctgtctttctagtcagagctgtttctgtgttcctgttcaagctccattgtttttaacctcagtcagccttcccttttcttcacttgaattagcttcttcatattatgcatgggtaaatgcacagaattatttgagtgcactgttagctcttagcttcagaaaggattcagaaattagaggagtgatcaggggagccagctctgaagctacaaattggaaggcactaagagatgagtggatgtgtaataccatatttgggagaaggaggatggagagctatatgtttggttaaggatgggcttggacaaggctgctattctttcttgcttttggtccacaaactggtgtcaaatcctggaaactgtataaagatttagtatttattattatttagtatttattattatttcaaaaacatttcaactctggtatgtccaggcagcctatctctgcatggtagaggcctgggaaccaacctatggattaaaaaaaaatgtgtacttttatagtttctaggaaaaaagttcagattatatcttcctaggtagatattttatagaaatttacatccaagtttataccacagtaaatctctaagggacagatttcaaggaaaccccctgaatagttggattactgttttcttgcagctaaaaatttttgattatgtgcccaaaccaaaacaaaagattgcatttagcttcctcgatgagaatttctgaaaccaaatacaaatgaaaccacaggaggaaagataaggactcacaagtttatgaaacttgctaatgggactttaactccctcttagactcactcactcaactttcttattccatttgatatattttattttacattattttgaaaaacaaaatgaaacattgggggatatgttccattttgaatatagaactattttgagaattgtaggaaaatcattgtatatttagaattacacgtgtcctacaaaattgtcctcatacatttattcatccatttagcaaatcttttttaatatctgtcatgttaggtactcttctgtacacctgtgatacatcaataagcaaagctgacaaaattctttgcccttatactgcttctattctgggaacaggggctgtgaataaacaaataaaaaaagcctgtcatattgtggtcagattgtggtcagattatggtaagtgggccaagtgtggaaggaagtcagggagcatgccttgcagatacctgagggaggagcctctaaggggtagtgagatgggggtttatctggcaaggatgggagcagcttgcaggccatgcagcatagtgtggtgtggagtgaggggactggaagtagggcaggggccctaggtcattgtgaagacctttactttccatctgagtgggattgttatggactgaatgtttgtgcccacctccccaattcatatgttgaagttcaaatccccaatgtgatggtatttagagatagggccctttagaggtaattagatttagaggagatcatgaagatgggacctccttgatagcgtgagtgtttttataagaagaggaagtgactagagctctctctccactatttgagttcacagtgacaagggggccatctatctgcaagccaggaagcaggtcttcatctgaaaccaaatttgcctgtaccttgatcttggacttcccagcctccggaactgtgagaaataaatatgttgtgtaagccaccagtctaatggtgttttgttatggcagtccgagtagattattaaggataggagggcttcagcaagttctgaagagaggagtgagctgatctgacttctggttgaagaggatcactctggctgctatgctgcaagaggactgcaagggccaaagcagaggctggaagacctgctaggagacagttggagtaatcggtggcttgaattgaggtagcagcaatggaaatagaacacagtggtcagatgcaggatgtgctttgaaagtagagctgaatgtactggtggattggatatgagttattatggacagagagaggtcaaggataaatccagagaaactgtgaggatagagttgtctcagtggaggtggacacagctgggagtgaggtagaatgttgtgatgggaagatgaaaggatttgttaccggcacattaattttagaatacctattagactcctgagttggagatgccaaagacgtcattggatgtgagtctgaaatctggtagagagttcagggttgggaatataaaatcagaagttgacagcatgcaacaggaatgttatttaaaatatttgataaccagtatgacttgagaaccaaccaatcaaagcagatgcctgctttaaccacaggcatagctgtacagctcctgtcagcaggctatcagtccaatatgcacttgcatttgctaaaacatatcctttctacattggtcattctcaacctttacagataaactacaaattttatcaatataccataaatgcagattacccattaaaaccaaaaaaggcaccaactagaaagcataagcagggaatatttattttctccactattatatttgtccactccctaattcacattatgcccactgtattttcttgtaagggttaagtacaagtatttaacatactaacatatttgtgaaggccagggactagtttgaaagtaccagctttcaagtacaatggacttgtatttgagtcctggatactccattgtactgtttttgcagaaataagctccttttccttcctttttctgaaaataagtctgtaaagctggaaataagactacttcacattgttataaggattagaaattctatatataaaggatctattacagtgcccattaattgcagtacaatttcccacacaaattgtaggattttagagcttgaaaagaccttaacttggcttgtgttcttaataataactggtcaaattattataatatatcacacaatatatgttggatttaggctgtaagctacattcagaaatgcttgggcataaatatgtgcacacttggacaccctgtttaccaggaggaagtataagttcttatcaaaggaaagaatgattttgattatttctttctcataggtcagattgtaaaaacccagcaaaaagtgctttcgcatacagcattagcaatcaattatatctttatataaatatttgcctatgacaccaagtgacttgctaacccctcatttttgttgataacctctcataggacaaaaattacattgccgccttgctctgatatttcagggttgagctggtgtactattttgtgaagataattacaaggctaggtaatgcatattttaggtaaagagagtctggccttctaggcttccaaagatcctataagttcaagtccttggtacctctgtattctagacagatcttgggggaatgccttggctgcattcacagatagatagtaatgtaagttccatgaggttttgtttcatgactgtttatttacttttgattctccaatacctataaagtctcctggcacagaatcaatgcccaagaaatagatgtcaaattaatatgtagaaacaaaaacgctctagtgctaattctacctcaatgtcatatgcaattttgagggaagcagacactgaatgagtatcttatttctgtgaaagcagcttgtaattgatttacaaatgtcattccttggacctgtgactgccagcattggactctgtgtccttttatgctcaataatgctttttccctctcctcattaaattctggatttttcttacctacttttctctccctaccaaagaaatagataaaataccatgctcttcattttattggtgggtcagtattaattgcccaattctgtctttgctttgaaagaattcttgcctaagaggtctctctctccataaagtcgataccttttccagtttcccagacaagcctgaataaatatgtcagaacctagcagtggacagggctatgaatgattcaaaactgtctattccctacaacgtgtaaatgaaaatatagacagctgtacaggatcagaataggggagaaggaacagggaaacctggaaggctgctcttttgtgaacaacagcctggaaggttgggaaatgattttcagtgttttgtgggactgtactacagattggactatgccatctacttgtgctaaaaagcacaaaagtcttttaaaagcaaaggtgacaaaagtcttttaaaagcaagtaaagacattctccagaaatatttttaataaaacatgcacaataatgctgctttttccaactattgtgtggttgtaagtttttgaacctaattcttcaaattataacaactactaaagatttatcaaatgtaaatcctgtgccaggcatgatgctcaaccctctgatggattgtcttgtttagcagacacagctagcacattatattatgtacatttttacaaattgagggaaagaaggcagagatgctaagcactttgcccacagttacccagtaagtggctgagctggtactgcatgccaggtatcctgcttgtggagccaacagtcacttctgtactatctcagtgacagctatggaggcctgggattattttatttatcctattggaaatgacagttgtagcaatgactaaatatactgtgacattaattccccctggaagtgtaatttgattatgtttggtaaactgaatgagtgcctgatctctatgaatgcagcttttaattgatttacaaattacattatttggagcagtgactgctggtattggacttggtgtcctattgcactctttgttgctattgttttctttcctgcattgacgttgttttctgtattaagctgcctgaatcatgtcctttgaaaatattaatacctttttgaagaaaaccaaggaattgtggtaactccatggtgaggtagcctttgagtggaaataaccaaaaattacctgcagtgggaattaccttttggttattgtgcataaaaatggcagagatagataaatggataggtagataatgttttcttaaatttatttgtatacatagataatctcacagcccatgaagactcaacatataggccttttaatgcctacgtttagtttcctcgtattgatttacttgcaaattttctaatatattcttcagtagaatttactttatagctttatgtccagattatcttggcttttgcctttggataacaaaacaactattccttcatttgaagcagatagttaagaaaacaaattaccttttgaaaaccataaggctgactttatgcctaggaatagattatttctcagtcctagggaaatatgcattgaacattattttatgatgctttttagtactttgagattcagttcaagctgacaaggacctaagtattggatctgaaactcctcacattctgttctgtttctccctgaaagcacctgtcagtgtctatagactttgaaaccaagatttaacagggtaacatttactgactatattatgctacattatgtataatagtatgacaggacaatgacttacaggtcatatgaatattattagctctctctgcctcctttgatttttttcttttttttttttaaactgagctactgcactccagcctggcagagtatctctctatggggtatcacccaggctggagtgcaatagcacaatcaaataatacacacacacaggccgggcgtggtggctcacacctgtaatccaagcactttgggaggctgaggcaggtggatcacctgaggtcaggagttcgagaccagcctgaccaacataatgaaaccctgtttctactaaaattacaaaattagctgggagtggtggtgcatgcctgcgattccaactacttgggaggctgaggcaggagaatcgcttaaacccaggagacagaggttgcagtgagccaagattgtgccattgcactccagcctggacaagagcgaaactccatatcaaataataataataataatgataatacacacacatatagaatgagagggaatttatgagaagtttgatatttcattgttttggatttggagaatgtttccacttagatcaggaacctctctattcacatcatataggctttgattgtataataagtgatagcaagtattgttagcctgtaacttcttaagccaaagctcctgagggaggatcataaatacatatgcctatcattttcccaattctacataatactgtttcaactaaccaaagcaggcttgtatctacaatttcatcattggagtccctattctcttacattttccttcaaaactttcaagtgtatgtaaactctataaggacacattattttcaccatcatagtagtaaagcatgctcatcatccagaacacttgtttcttcacttagtgttgacgtgtatctactttctgaattaattttcaggttctgttgctaattgcaagcaggtttatggtgccacatttttaccactgcaccctgtgctcattgatctccctgaagctctagttcagttccaacctaatgaaaagcaaatagatgccaacgacaatagttacccagctaacattttggttttggtctgggtcatccttctgaggcgtatgacttgctgttttgtatgttggtgtgtagagaggagccgatgtgttccagaagccctacatctaatgggcaataactcacaaaatcactagctagcagattctcacagttaaagggcgaatgttcattgaatattggaaatgtcaactgcagcctgtctgggtgatgtttaaaattatcaatgtaccaccttcaacataataattccctacattttctttgctttattttttattttaatttttaaaaaatggagacgaggttttgccatgttgcccaggctggtctcaagctcctgggctcaagtggtcctcctgccttggcctccaaaggtgctaggattacaagcatgagccaccatattcagtctacaatctcagctgaaccattctctgctcacaaatagcactagtgataggagataagaagaggtgatttttgaatggcctaatgtaaaagaccatcacagactttagaataccaatttgtggctctggtttaaatgaatagatagcccctggactccattagtacaactgaggggctggattgtaattgttttctgaagtccctgtcacttctgaaattctgagatttgatttttttaatatgtcgtgatccatgatatgttacataaaatgctaatatgctagacaattggcatatccacagtatttgagtagactttctaaattcatgaaattacaacactctgagttatgtcttagcaacttagaagtcagaagtcaaatttctagtctttcttgcagccagtgtgcaggcatgtcactaggcttgtagacttgtcccatctaacagatgtttgccatacttcatttggggattcatcagtgtcagaaggcagattttgcacagactttccatttttctcagtgaatgtggtggtcgagggctgtggtttgaggagtcagcagtatatttaatttttgatatgaaagtgacattggtcctggtggcattggcagttgacatatattattggtattaattgcagcagatgtagcggcagctgtttttccatcaggctagttctgaagcttagtcttgggactttttttctggaaacttattcctgagccctcccaacaattctggaagctattcaatattggtttaataaatttcttagaattgatggcgtatacccaagtgtttgcagtcaacaatcctaagaaccctgactgaacaaatgtgcaagtgatttttctcaaagaccgcataaccccaggtctaataattcattaattttagtgagaatgaatgaatgaacaaagtagaaaactagccataaacatgcatttgcaaaacctctgatcaggtgtaaggaaacattcattgataatgtttctcaaggcatttttaaaaactattctattttatgctttgtcctccatgcccaaacaattcaactctgtataaacagttctcttcattgaaaataactacgcattcattttttgctacctaacaaatggatattgtagtatagtgatttgaattagatgtgaataggaagaaagataaaagtgaacctaagtaaaatgttgcatttatgtctgaattccctggtctctggattatatgagcctgattcatcatactgctaaattaaattgccattcttaatcaatatcctaaatctccactgaagagagtttttttttttaaacattgtgaattatacatcatttcctgtatgtaagtctgcccaaagttagagttgaaagctatcacaataaaataatagaatggagaatttgtttttcctccctttctattttttttttttttttaccaagaacataatccaattgacaagagtaaatttgtttgatatatattatcatccaaggaacttgagatgaaattttttttcactgctaagtcaattcactactagccatgaggccccaaactgagagaggtataacaaatactgttgtctagatgttttcaaactgtgcattatgaccctttaacgaccactaaatatagtgagataaatttcattaaatgtcagagtatattacatgtagtaagattaagtattgttttctgtaacttatgttttagttatgtatgtatatatattatttgtttatatatgcattgagtcactgtatggaatgtaatatttactgaaagttatttcttattttaaaaagtttaaaaaccagaaatttaccttttgtcagttaatgccatgtttccttaaaaaagtatttaaaaaaatttgagtctatttttgattttcaaaattgactatggcaaaaatggttgctcagaaattgttattaccttagcttcttggagtttctgatacaaatttgtttgttcagatgatttaattacattagtagtttctaaaaggttttccgaggctctgtccaatgggtagttctgttcagcctgatacttagcacagtttcttcctcattattctttgtgtttaatgaattatataattgagggaatatgctgcagataaaaatcattagtcccttaattccagtgcactgctgagttatatatatatatatattttactgcttaggtattttgttcaattctagaaataaatattatttacgttggtggaaatgttcttccaactgagcttggcattgttggtgcagtttggctttgtattactggcaacttgaagcaagaggaccaggtacagcagctctttttcttgttcacagattgttcagccaaaccttcaacttagttcaaaagcatttttgtttaggagatattaaaaatagaaacttttccaaaatgatactgatatcattttattttctatgattttattgtccttaaaagaaggaaaaaaaattacctttaccatcaacagggcattcttttcatttttcattacataatacaagactttcttttatacccgttttatttacgtgcatcatcttcagagagctgtttttgccagggagccccaaatatgtcatgaaatgatgaataattttaatgcccagaggctttgtaccaggaaagataagtcctttgagaggatcagagagtatgatagataacaaaatcacttcaaacttcactgtttcacggcaggaatccagaagaaaggtcacccagacttctgattttactgcgcatttttaaatataattttcacattaatgttaattatagcttatattaatattaaagattgctttttaaaattaacaaggctatatttcttattccttttctatttcttttttatttcctttcctgaatggaagccaatcttctagtaggttataaactgtagtgtaatttgctaatgtagtctctaacacagtgtcataatttgtagatactcttttagtagtgtttataattcatgcaatattaaatatttagaaaggtcgtatctacaaaatgcaaacttataaagtagattgattaggtggtaattgatttattaaaaatttcatgaatggttaaccacatagatttgatttcctcatctacagttaagtgtgtttattaatcaacagttatcttgatagtagttctaaagagcagataaatataattaaagggctaagagccatgatcagttgataagaaataaatacagttgatcttcattatttgtggtttctgtaactgcaagtttgcctgctcttggaaaatttatttgtaatcccatctgtacttgaagccctttggtggtcactcgtggaccttcacagacatgcagagcagcaagatgtttgagtcacattgtgtgcatgtgtgtacccagctaaggtctaataaggccccactttgccttcttgtttaagcttttataaacactaagcaaatgcccttttcaccatctatgtaatgccatgttttggtgcttttccttgctaattttcctgtttaaaatggtccccaaatataaagctgcagtgctgtctagagttcctaagctcaagaaggttgtgatgtgccttatggaaaatatctgtgtgttagataagcttcattcatgcatgagttgtaatgccttttactgtgggttcaatgtcaatgaatcaacaatgtgtatcagttaagatctctttaaacagaaacacacataaaactaggttatatattgattagttgacagaaatgttgtgactaggggcttgcaggaaactaaccctgtatttcccccaggaacagtggtttagtatattgctcattcaatgttcatgatgattttatagaacataactactgcagataataagaatcacctgtattaagaagtccaaaatttattacagtgaaatgtaatggaaaaatgatataaattgaaagaatcaaattaaccttcacttatagaggaacacgtttctatatagagatgcaaccatccattaatggcattaataggataatatcattattttcaaatgtattttttctctgctttttttcacttcaaagagagcatcataggacagtcaatgattaaagggaaataataagaattttacatgtaataatttgctgctttattcatgtataaaacaagcctatttttaaaaaacatttttacaaatctctatgaaaaatcttaattcttcatttgtatagtgaataaaagtgaacctaagtaaaatgttgaatttgtgtctgaattccctggtctctggattatatgagcctgattcatcataccgcgaaattaaattgcccttcttaaccaatatcctaaatctccactgaagagagttttttttaaaacattgtgaattatacatcatcattacgagaaatgttgtttaaagttagatgctggtggattgttccagttgaagaaaacagctgagtcccatctaactgaacccttctatttgcctgcaaggaatggaggtccagatccgctgtctactttgccaagattggagagcaagctattggtagtcagggcctgaaccaacacttcctgatccagtcaagtgcttctattcttccttgggctatccattctctgaaaccctattgtcccacatggtaaaataactgcctagtatgaaaggatttatttcatgtaatatttattcataacaaatgtatcaactttatttaatgcagaatttaaaacaaatgtttaataacaatttcctttaatgtaatttaataataacaatagtacacaacattcatgcagctttagagctcttgctctcaaacacaacatgtaatgttctgatacctagttttaaagtggtatattcaggtaggccaagagtagatttcatccactaaagaatgaatttgtttttcttgatttctccgttagatgatacatttggcatttccaatttacttccatcttttcaacctgttacacctccatcttcatatattccagtataccagttactgaggacattgacatcattcattactcctctcctctcacatcccactctctcagcagttcctgtctgctctactttcaaaatgtattcagaatctgatctcattgtacctttggtgtcaccaccctggtttgaaactctgttatcttttacctgacttttttttttttttgagatgatatctcactctgtcacccaggctggggtgcagtggtgcaatcttggctcactacaacctccacctcctgggttcaagcgattctcccaccttagcctctagagtggctgggattacatcacctgactttttacatgcatgtttctgtgtttctacctttgcttccttacagtgtattttcaacacgtcagtcacggatgtgttcttaaaacaagcagagcatatcaccctctcctcagaactctacagtgaattcccatctagctcagaggaagggccaaagcctttaataatggcatactccaaggctctgtataacccctcatactcacacccccgatactcacacctctgatctcatcttctactgccttctcccctgttcactcttctacagacacactgtttctcaaactggtcaagtaaagtcttgctataggatctttgtatttgcttttgtctatcttccatatggtcttccctgaggcatctccatggcttacactattcatttccttctggtctctccttaaaattcaccttatcagtgatgcttttcccaaataccctttctttcccttcttctggtactcacttccctcttaccctgctttattgtttttcagaacacttatcaatttcctatgtatatatttacatatttgcttaatattgatcagtcttctcatatttgcacataaactttgtgagctcaggcacgttattttgtttcatgctttattcttagtacctataatattttgcccagtgtaggaactcaataaatattcactggaagaataaggaatttatcaccaatgactatttattgagtgcctgctccctgtcttcaacattccatgaattaaagaagtatgtacatgtaactagaagataagtctgatcctgctgctacctcctgtatctgctccattgatcaccagacatctggctgactaggcaggtggtctcttccaactgattccatgtgcttggtcagaaagaagagaagactttgcttctatcaaggacatacacaaaacttcagaacaatgcaaggttggataactattattgtagctaaaaggatgttaaattttgtataaagttgaaagtcagctttctctgcaattcttatggtgcctatttgttgattataggttaccatgtgtctaaagtttggactttccatttattttctaattacaaaattatgggcttatcattcaccagagatgatttggtttaagacactgactcagcctaaaacaacccactgatacaccaatccatttattccttcaacgcagtttcttatgtatgccagaatatactagccacagtaaatacagagaccagaaatacaccaccagattttgcagactacagttccttttagggtactactgtgtttactgctcacgtgttgtctcacttgtatgaaagttcacataagaaggcaagttaagaacagaaagttacttaatatatataaagtcagagcaaaggaatatgcccaccgttcctgccaagtgagcaagaatgttcattgtaactgattaaggcatgtaagtacaacagcaaatacttattttccatttgtctatttttttgccaattagcaaaaatattatcttataccaagcatgttataaggtgattgaaaagattcaagtttgcttgcttattttttgtagaagttatattcaagacatctttccatggtacatcttggctgtggatggaaatttgacatactttttattttctttacctgttacatatcaaatcttaggatgtattacttccaaggcggttaaacttattcaagattgactgagtctcctattttccttaaatttactagaagtgaggctccaagaactacagaaaatagaaggaaagtctccattgagccatgaactgtgagcacctggcatttaagcatgaagagtagggcttctatggtagggactggagtaggcagcattccaggaaaggatctcagaggtcagaaacaatagattatcagttaaatacttctggaccaaagaagaccttgaaatcctggctcggtgatgtatacatatttaatacacaatgagaagctccttgagggtgagtgagagtgatagggctgaagaacaggagacagaagacaattcaaatgtccttacacagaagactgattatatagataatggtacattcatataacatgatatatttactaattaaaacataacacacacacacacacacacacacagtcactgcataacaatgtttagttaacaacagactgcctgcattgatgatggtcagataataccatatttttactgttatcttttctatgctcagataagcagatgctaaccattatgttaacagttgttgcttattcagtacagtaacatactgtgcaggtttgtggcctaggagaaatacactaccatataggctaggtgtgtagtaggctataccatctaggtctgtataagtacactttgatgtttgcacaacagtaccacctaacaacacttctcagcatgtatctctgtagttaagtgacacatgctataagtgtttgtgtctgtgtgggtgtgtgtgtgtgtgtgtgtatatacacatcatgatagatcattgatcatcattaatctgtagtcattattacttatttacaaaatactttatattttattttttataaaatacttatcacagaatactttactaatgagagaactagcaagatgccaaagccagttcaaaaaagtgtaggagtaacagaaatatgcatagtcactgaaaaaaagaatgctaggatgtaattgccataaaactaaactggttattgctttacaggcaacaagggtataacctttgagaatcattttcagcatcatcagttttcttaatccagaagttggcaaactttttttgtaaaggagtaaattttttaggctttgtgggccatgtaagttctctgttacgtatccttatgctcatggactatataaaaacactctcctatcccaagttggcccacagaccatggtttgcagactcctgattaaagcctaatcaatagcaaataaaacaaaataaagatacctattctagagaattagataatcctcaggtgagtcagttaaacagtgtttcatcatgtcattcaatggacatgtgttcttttggccatttgcaggttttgaatatggagatacatatttatatatttttgaggcagggtttcattgtcacccaggttggagcgcagtggtgcaaacatggctcactgtagccttgagctcctgagctcaaacaatcttccttcttcagcctcccatgtagctgaaaccaaaggcatgcaacaccacgtccagcttttaaaaaatgttttgtagagatggggcgtcactttgtggcccgggctggtctcgaactcctgggctcaagcgatacttctgccttagcctcccaaagcattgggatcgcaggcataagccactgtgcccagctatattatttttttcctaacaaagatgcctgctggagggagctggaggggaaacagtgagggagaatgtgaaggaatttgaagaggtagggccttgtgggtgggatagccacactaacctcttttctaggggctgtcctggtttactggtataaaaattaatcactctcttttcactctcagagtgtcccagtttggatgatacatgataaatgggtcacgttaagaagtttgctcctcaacataaaattaataggaagggttgacaaattttaaactagtcaagtgtgatataatcagatttgcattttgaaaggatgactgccttgttggtaatggatttgaggcaaagacacaggggatgttaaatggttgtttaccaggaaatttgtctttcaggttaaacaatttgttaaactttctcaatagcaagttaattttgaaaaaaaagaaaaatcagaaaagtatgttgtttgatttaatgagtttgtcagtggataaagactgttgatttagtagccccatatagatgaagacatttcgtagttcatttagttaaaacctatgacttgttagatttgtttgccacatagttatattgtgttcttgtgcttccctgggcgtggataatgagaagactgtaaaatgaaacatgctttatgggatatgccttagctgcaaagccaataatccagaatgcagaattacaaaattagtgagaggattttgtcttaatgactgtatgagtgctgagatcaccattccttgatttgttcacagttatatccccagcaaatagcattcaagaaaatttgctgagtgactgaaagaatgaaccctcccagaaccttatttcttataatactgtgctctgtcttcttaaaaatcttaggtacaactattcatgaagctactcatttatcccattggcttagaatctctgaatgaagactctagtcaagaatatagacgtaaatatattttccaagaatcttggaacatattttctattaatgtttttttgttcagggttgaaggacagtttgacaaaatagtttgcttaagaatagaggtggcaaaaccaattttcatcagaaaaagaattaatgtcatatgggtgtttttattgagaacatttaaaatgtatcttctttattcattttttacagtatttcatctggcatataagaactaggaagaaaacttaattaaaatgcatattcagaccaagtatgaagatatagtatctttatataatgagtgaataaaatcagagtaactattgattgttctctaaataattcagatgctataaatacaggacatatgcataaacacttaaaatcacaagccaagacaacgtagtgagacctcgtctctacaaaaacaaaaaattatccaggtgtggtggtgtgtgcctctagtaactggaaggctgagatgggaagatgacttgagcccaggagttggagtctgcagtgagccttgaccacaccactgcactccagcctgggtaacagagcaagactctgtctccaaaaaataaaaaatatgtaaaatcacaatcacactttaataagatttagaacctttggaaatataatagtaataaaataccaaaaattatatttcttaaatttggttcttaaaaatataatttacttaaaaatatcgctcatagaagtgtgtggtggcttacgcctgtaatcccagcactttgggaggccagggcaggcagatcacaaggtcaagagatcgagactatcctggctaacatggtgaaatcctgtctctactaaaaatacaaaaattagctgggcatgtaggtgcacgcctgtagtcccagctactcaggaggctgaggcaggagaattgcttgaacctgggaggcggaggttgcagtgagtcaagatcatgccagggcactccagcctggtgacagagtgagactctgtctcaaaaaaaaaaaaaaactcttgtaaaaaaataagaaagtttaccaagtttgaatcttaagcaatttgaataactgtttggttaatgcctagactgtgagaaagttgccaacttttcacacttttcattagttttctttttccctttaattgtacaataataagtctagtatcataatatttgcaaactgccccctgttctctaataatctctgttcatttattgttgtgctgactgcagtctgactctcgagtgagctgctttatctgcagcacctggaggtgttggctgttttcttgggcctctacacaccacagaaccaagggatggacagatgttttctcgctcttcactgcttttataagaccatagttaacacctcctccttcaatatcccctacctccatccttacccaaccctatctttgagaaacacatttttagattataacatcctacattcttagtgcagcagttttctatcattctcttggtgattcccatcatttgttgtattatatagtaactgacttactacgttctctcctttccacttctgccatcattcttcatggctttacttagccacatagattatgcatgccaaactccggcctctcagcacctatattctctctttcagcaatcttaccctctactccagcggtcaacagactttttctgtaaaggggtttgtattttcagttttctggacatgtcttagttgcaattattaaacaatgaaatcctagctttataccaacatggataatacgtaaacaaattgatgtggctatgttccaaaaaaaaatctgtatttacaaaaatgaatactctgaaaagctgcttagggacttaaaacagatgaggccatgagccatgtgaatatcggggaaataattccaggcagaggaaacatcaagtgcaaaggctctgagacaggagcttgcctggagttctccagaagcagcaaggatgccaatgaagttggagtgcaatgggccagggatgagtagtaggagaggttagggggataatgagggtggagcgagggaccttttaggccatgaatggaatttgggctcttactcagagacagtaagtggagagccattggaggattctgaacctaaggacaataatcagatttaagttttaacaggattgttctggctgctgtggtaaagacagtgagagggcagggtagaaacacagaaatgagataggaggctactggacttgccatagatcaggcttgtaacagtagaggagatgaaaagtggtcagattttctatatatgtatgtatattccatctcaccctattatatttagaaggatttgctttcagattagattttgctttcacagaaagggtcaagaattaccttggggtttttatgagcaactggaaagatggaagaccatggatgaagcaggttttagggggacgatcacgagttctttgagcttgtttggtttgagatgtctatgagataagtgaaacaagcaaatgcaccacacgtttgagatgtctgacattcattataacttccttgatttcatgataaatagataattattctttactttagaaacatcattgacctaggctgaactaactgttctctcgaaggcttagataaaaatatattaggtgcctgatagatgcagactggtgcctgcagctatatttactagtattcttcattattcccatggcatctaattcatgagcaagttcataaataactcccatgtttttcccagattgtgagcctaagattacagaatgtatttttcatgtacttcttttgcatgtattatccaggagaaataaactgatattttaagtgctttcatcataaaaatagatatatagaggcaaatgttattggataatataatattatagtacaatatgtctacaagccagttatattgcatttcttaacatgtattaggattttaaactcacagatttcctgcttataggacatatcaactttggaaaaatgcaataaatgaattttcaaaaaaggaattgaaagatgagagcatttgggctaatgagtctctagggaaaatacagttgcaagtgttaagataatatggtagtaagttacaaagagaagatgatctaataagattttccatttactattctccaggggctagtgttataaaagcagctcatctgctcggttaattttttgaagagcatatttttggtttggcaagataaatgttctatgttttctctctagttattcattaaaaacaattccaaaataaaatgaagtatgttttaaactttaactcgagagtgttgaagagagaaaactcttacacttagagaatcatattcagctttgtattggtaattactgtattgtttatttcctatactatttattagccatattcatccaggaatgtagaaatgtaaaaacttagaaaggatcttataggatcttcttaaaggatcatctaatccagtgcttatcaagtattacttactgtgagctagagtataaaaaatgttttatatcatggcccagtgtatattttatatatatatatgtgtgtgtgtctgtgtgttgtgtgagtgtgtgtgtatgacccaagcaaaagtttcacaaagcaatagttacctttaatgtgaaatatacttcaccatgtttgattttattcttgttattttttatctcctttaaaaattgtttcttctagccaggaatggtggtgtttgtgtaatcccagctattctggaggctgaggtaggaggattgcttgaaccaggcattcaagaggccagcctcagcaacatagcaagaccccatttcaaattaagaacaaaaaaaattgttctgtttttccttacagaagtaacaactcttcatcagcaagggatgtgccttctcaggaatacctttgcttttcccatatattgtctgtcttcccttacttctcccataatcatcaaaatttctgataaggttcagagagtacagtaagatagaccacgacagatgtctctcttcttttttgatttttttttttttttaagacagggtatcactctgttgctcagtctggagtacagtggcgatttctcagctcaccacaacctccgctgccctggttcaagcgattctcctgcctcagcctcatgagtagctaggactacaggcatgggtgaccacacccagctaattttttgtaatagagacagggtctcaccatgttgcccaggctggtctcaaactcctgacctcaagtgatctgcctgcctcagcctcccaaaatactgggattacaggcgtaagtcaccgcacccagcccttttttaatattcctaatggctaaggatattgatgagagatcactgactaacttgcaatacatagtggaagatagaataacaaaaacataaggcaagaagaaaggaaagttggaatcaccaatcaaaattcataaaacaaatgatattaatgcaaaatttaaagagggaaggaagatttttctatataaatgactattgtttcaatactcttgaaatgagtatcaacttttccaagaaatgaaattacctttttagaaaacaaaataagcagaatggaattattcaattaaaatatacaacaggataatctcaaattatttttcaaagaaaacaaagaatgtttccagatattactaaatctattatttactttacccttaaatttatgtttttattaaaaatgagcaggacagagtattacatgaattacctatttacttttatattgttttagtcttctctgagcttctatatttagccattgatgacgtttttctttcaagcaaaagaactgattgttctttcatgctgtttgtagtgtcatgtgatagatgtggctgatacccatacagtcaacagttactgatcatatctcccactttctaatttcttcccaggttgaaattctcccaggtaataactattttgacccatcagaaacccagttggattatctaggcttctaattagtgctggcttataaaaggcataatgatttcttctagtcagtactgaatgctattatactaatctgatcctgtagatattgaagataatctaaacttggcttttaatcttgaatcaggagtggggtgaggatttgggaataaggatggagaccatagtcaccagagttgatatgctttgaccttcaggacttatcttgggatccagtaactttctttgtgtacttttagaatagtttttaaagtaatatggatggcattccctatgaagttttcatataataattacatttgattattttaaaaagttaattttcattcctattaagtgtaagcagtcaattgctttgaaatataatttaattttagttgatattaagtttacaaggtagattttttgtcattacaggaagaatatctgaaattttactataatttttcaatttctgatatagaaattaattttaacttttgagtgatgaataattacttatttggcatttataaatggggcatattgctaaatagtttttcaaaaatacatatcccttatgtaactttatgtgttcaaatagctaaaattagaacagattgtggcttctaagcctgaccacttcatttgtttgccttagccagctaatcaaactcccaattttttatgctcaaatgttaaagtttcatgttaaaacaagtaaaaaaagacaaagtataaatgctatgtaggactcttgaccttaataacaacataaaaattaatatgtatctatacctgtctatatttctattcagtgttttaaaaatgaacatctctatttcaaaaaaacagcatatattttttctaatgtactcaagttaatatattttatactgggaaaatgaaaatcaaatggtgtcattttattaactgtattacttgtgttataggaaatactttttaaaaaaccacatagagagatttggcttcacttttctagaagtgttagtttgattttgaacttagttttcagtgcttttgtgttttctatttgaaaagttttctctctagaagtgagcagctttgtcataaataaagccaggagaataatggttgagctgaaatttctctccagagagtgtaatttgactgttaaaatgttctaatactagtgtgtgtgtttttacatttttaatgtaatattgaaaaaagtgtatgtagatataaaattaatacatatatgtatatatttattatttttaatttacaaatgaacttaatgttggcttccctcttttggggtagacttggcgtgttagatggcctaacttggctagtgcttgttttagctatgaattataattaactactgatgggaatataaaaaggatctgacttacaagctgccatttttgcatcccagtatgtgaaccaaatccaactacctcaatctttgaaacacagcaaagctaaaaatgcaaattctgcctcattaataaccaggactattactcagagctgacaaacaatgattatgaggatataatacaatctgttctgtatgaattactctattagtatcatgataatattggcagcattgccctaccatgctcagttttagaatttttactaattctttcttactttctgaggtcagactcattctttttttctgctaaatttgcttatgatattgaaaaacgtatttgaggacaatgtggtcaatcacacatttcagattaagtcttttctgtttatttatctattgttaggtaacaatccccatcccagatttaatggcttaaaataacatcagtttattatttgtgataattctatgagttgactggattcagtcagttgggtgctctactgtagctgaggtcattcatgcagtttcgttcagctatgacctctgctagtaatagaatgtcagaattatctcttatcctcagaggtttctcttcatgtggcctcttgtcttccaatcgaacctgatcttttcttttagcacagcaagtggtttccaagattacagctccaatgtagaaaacatattaaggttttgcttgcatcacacatgctactcactcaaagcaaatcacatagccaagcccagaggtaatgtgggaggggactgcacaaggacatgaataatgatagacatagtccactggggtccaccaatgtaattgactgcctcctctccataataaattttagtgaagaggaacagatagtgagtttgggttgtatggcagagtaagaatcagtataatttgaaccaaataatattttatataaataatttcataaaattataattaacaaccttggttttattttgtgtggggggtactgttaagaaatggaggaggaaagaagtagtactgaaatagaaaacattgactttgtatcctgtcagccttttaggaaagatattaagtctcaataaaataatatattccttttcttttgacagaagtgtttctaacatgtgtcatcaaaatggataaggtgtacctaatcactgttgacacagtttctacttggagtttaattttcctactcttttccctcttctcccttgcccattcatttccacttcctctctctctctctcgctcgctctctctcgcacacacacacatacacacctttttgtccatgttatcataatgtccatgatgtgaaagttaatttttggaaatgaaaatgatttaaatttatgatattttgtatgttgggtaagctttcagattcttcaacttgctagcatttttggtacattaaatgttctatcagataaaatagctgagtcactggcaattctcatattcttaatttgaagtggaaaaataacaattttctggggctttaggaactgtatagagagacaaatgtggctttgtatcctagacatcatctagctacctctgtaccctcaaaattatagcatcacattttaaacctacagtcaaaatggttttctttttctgtggaaattgtctgttacgtacttgttactacttttctttctctagtcaccataataatttttttatttcttctcttttgaattttttttgaatattattttaccctgacaaaccagttcatatcccaccaggtatttggcaagtagtttgttcacagaaaggtttcagggagcccacgtagtattctcagtaagaacaaggtctttggaatcatccaactctacattttggtcctagccaggccaattacttgctgttaacctggaagtttcctccatacctctaagcctgtgaacattcatttgtaaaagcttatggcaaaatgtccttgtggtgcttgcatatattaaataatataactcttgcaaaaattatttgcattgtgcctgacagtaagaacataagttttattatatcttttaaccccttaagtgaaatgaggaattaaatagaaaacttctatcatatttaattaaaatttctcagatcatacaaggaccatggtctatttgaccccttctttatggagctaatatttagctagaaactgcaatggaataatgcaagaacacagaacaggaagagaaagcagcgatcctgcaatcattcaaatgtgataatacatgcaggagagaaaggaaaagaattaggccatgggtcagctaacctttggaactatttttagcctcagaagcacttttatcccccttataaattccatacttaaagttccagaatttaaaatttgatgagaactgttgtgctgtttcaggttgtgaaaattcatttattcatacacgtaattttacctttgagcaaacttcaaaaagaatgactgccaaaatgtattataacctgttttctcaaatgtttttctcattctcttttttaaaatttctctctaaaaacgtcatagggacaactgtaattaggctaattgcgtccactcatatgtgcagcttatggcaataacagagcagtcatagaaagaacgaggtgcagtatgcttcaaaatgcagcatctgcagtgctgtcaaggccagccatgccgtcagtcttgagctaacagctgtgatgaacagaatgttgtgttattcctttggtgtgaaaatgaattgacagttatttatagggaataattaatgtaacattttgtaaaagtaaacatgattttcaatccttgagaaactgttaaaaaggaaaaaaagaataggaaatgaaggatacttttgaccaacagaaaaggcttgaagagaaatagatgatgtctacaactaaaacactatcttccagaccgtttagacataccatcaactctgagaataatagttgaagagttaaacatttttaaaggaaacaaacccatcctcacagtaattgtgaacatgtggaatgtctctgtgaagactatagtatctacttttgttaatatagtaagtaaaaatcatgacaatttcttataattctgttttttcagttcattatttaaaataagagagtggaaggaagtagggtgggacataggaaggaaggaataaaggaaggaaggaaatatgtatatattaatcccaagtaaatatgatgctgaatatgtgatatgaataacacatttattcataatctcgcatggtcaaatggctggttagacatattagagattattttggaattgtgtgatgcaaaagaagtaaacttggctgaatgatttgtctcaaacccttatcacatgttagctggttaagtgcttttgtatcatgtgtttgattatcatgtttccatctgaacagtaactcctgacttgttcaaaaaataattgatttctgaatgatgatatttagtattaattagtattaataagtgaatggaaataattttaagaaaatgttattcccaggatagacagaaattattgctacttctccagttgtacctgaaatattctcctctgttcagctgtatacctcttcgatctggacacctgagatcccacctgcacctaaggcttttaccttcagacagtggaagaaagtaatggtgatttcctcctggtcagattgtagactttacttttcagtttaactttgataacatgggaacccatcttattttccagaataattgttatgagttctttaagaagccatgccattatttaagttcatttgaatacatactgtattatagctgctaagtgagatatctctgaaactgtgtcattcaagaagccagtgagctatcatccatggcccagctttctttattgtactaaatgatcattagaagatgcaccatcaaaccaaactctttatattcttcagcagcataagtttaagcaaggctagcaggcatctctgatattggcaacgtgaagaatacctttcacaccattaaagtgatggaagaattgcttatgtagccatcttcttattttatttatatacattgtgtgtgtgtgtgtgtgtgtgtgtgtgtgttatgtgtatatataacatatatatagctatctttggtgaaaatttccatcccaaaaccttctatagtaaatgctcaaaaacaatttgatgaaagaccatctactatgtgccagatctctgtgtgggatgcaagacttataaaatatggttcctgttgggcagtattggtgacgagactatatactgaagaagggaaaggtattaaaggtagtaaataaagataaaatatgctgcatgaatgacctcaagggtggcactgtgacaagtaagataagcgtggcagggcagcggggactgcagtgtgcttacatttcatgcactcaagagctaagtagagggtctgagactgaactgttggctgcattcccagtcacctacagtataggcctcctcctcatgttaataacaatagaaaattcatattttacaaactataatctatctagagagggattcagaaaatattttaataggaggccaggaatgagatccaaaggggatggaattagatgataaagcacagagattatgttaagtctatgagcctgggcattgaatgagtactacagtctccttgtataaataattttagtttgtgtgataacctgaatgttcttataaattcacattttccatgtggtggtcatcagtgcatgggaaacataacaggttgtagtagaaaatcattattattttgtggtgacttttgtaaaagcagttgtgtcctaaaactttgttgctttccctgccttcttttgctcccagtgaagatcaagccaccacttcaagtgatttggatacacaggaagaattcactggggctaccagaggttggaaggtgggaaaagggagaggagcagaaagaataactattgggtactaggcttggtacctgggggacaaaataatctgtacatcaacccccgtgacatgagtttacttatgtggcagacctgcacatgtacacctgaagctaaaataaaagtaaaaaataaaaataaataagcaaaaaaaaaaagaattcactctctatgaaggataactgggacaaggtgtggggcttatgaacaagtaaatagcagatacagcggtttgtagttctacatgtgtgatttagtttagagttatcagttaaagtctggctcattgaaaattttaaagtggcattaatttgagaaactagtaaattattttagcaaaagttcaagctgtacattttgggctaatgacttggtaaatggatttgggtgacctgagtaaataagtaacataacaaaaactgtgttttgccaggttggccagggagtgccacctagaacttcttggacaaaagggagaacacagggaaaccatttcctagacttggaatcattcctcttactgtctgttgtagtgaccaagcatgagttggtgaagacttggactaaggtgatagcaaagagagtggcaaggaagtgaaagaattgccagaacctggtaactttgagtatatggatatatattataatgatccttaacatttgtttagtattcacctcaaaatttgtggatttttatctcatttaatctcaaccattttataaagcataggtactaatatcattacaagttaagcagtttttttttaagatcacatagttaccagttttcagaaccagtacccaaaccttagttctatctgaactcaagctatgttgtaaaagatacggacgtatcaaaggctaaaataaaatgtaatgccaacatttctagctaggagacatatgtccatgtgaagtggggtttaacgttgatcgttggaataggtataacacaatttttcttctcttatttttttctagtgcgacttcatgatagcatatcagaagagggctttcactacttggtgtttgatttgtaagtatatactctgtattcattatttttgcaatctaattgaggaccgttttgaattaatgatttttctcactgtacagtccaaattactgactgctacaatattttttaatgttcaagtaacattcaactctaattcttttgaaaagaggatactactcagcattgttttatttacaatttaatttaaccttaatttgaattaaccttaacctaagtgaaatagttatttctctttgcattgtccgttgtgatgtcatgagtggttctcaattctaccttgtagcacaaaaatgtttgacataagcaaaattttccatttaatttttaagagtatgtataatttattatcttaaagtaaaaagaagactcaaggaagaaacttggattaccaaaattgatttaaactaatcaagacttttaaagtgaggcgctgtcagcaagaatgaagggaaaataatgactcttggcagggatatagtggcagggatatagtaaaacaggccacacatatggttggtaggagtttaataagaacatactttctggaaatcaatttggtgctactgtgctcatcaaagggaataaaaaatgtttgtatcatttgacttagtaattttactcctcagaacaaagtccatggaaagtataccctaaattcagttaaaattttatgctgaaagatgttcattgcatcatcctttataacgggggagaaaagaaaagaaagaaaccaacttaaggatccaattatagagaaatagctacataattatagtatattcatataatggactactgcctagcattttaatttgatgccacagagttttgggaaagatttaaaaaattatttcacatgatatgagtttgaaggtaggttaatactaggtttggttaattcagtacttcaatgatatcattaagaaaccacgttctttccatctgtctgtttttagtattatgtgggtttgtcttcatgtttgagttcccctatggtctgaaattgactaccacattttcagttatcacagtgacttccaaaggcagaaaaagggtaatccaaattctattgcataagtttttattcatggagaagtctttctcaagagcctctcagaagatatctgttcaagattccttaattagaactgcttctcaagcccacactaaaccaggtatttgttaagggaatgaaattacaactggcattgacaaataataatttagtctgtagatctggtgagggaactggcctcttaatcatgtgatacccagttcagaactaaattgtgattttgttattaagaaagaatgggagttttatctgttgggtagtgtcatgcgcatccatgtgaagagaccaccaaacaggctttgtgtgagcagtaacgctttttagtcacctgggtgcaggtggactgagtccaaaaaaggagtcagcaaagggagataggggtgggacagttttataggatttgggtgggtagtggaaaattacagtcaaaggggatttttctcttgcgggcggggacagggattacagggtgctcggtggggagcttctgatactcattgtccaggagaaggaatgtcacagggtcaattgatcggttacggtggggcaggaacaaatcacaatggtggaatgtcatcagtcaaggcaggacctggctattttcacctctcctgcggttcctcagttgctccagaccatcttaatgcgtacctgcaggcttgggctcagaggcctgacaggtaggcagccaagcatatctgccatatttagaatagagactaaagcgctacttctgcacaatcctactgcacaggctcctctccacagtcccagttcatccatgtcttgctcatgtggccgtagtttcatctggctctatgttgttctagtagtgcttcctcttcagtcctttctcagctcttgtttttactttttccattattttttcttcctttccaatgtttgagtcccttcttttatgatttttttttcttgagctttctttagccattcttttaggataggtatgctagcaacaaattgttagtattcctttttctgagcttgtctcgatttcccctttattcctgaatgatatttttgccagatatagaatccaggttgagagttctttcaatgttgtgccacttccttctggattccttgatttttgatgagacatctttgtcattctaattgtttttcccctaaagataaggtattagttctctctggctgctttaaaattttttggtttttgtttctttttctcgttgtctttggtttttaggtttgtctatgatgtatcttgcttggcttggattttttggagtttacttatttggagctcacttagcctcctgaatgggtccatctttgtttggcaaacctgggaaacttttggacattgtttctttgaatacctttttagccctaccttctttctcccttccttttggaactctgatgacatgagtgttggatcttttgttagagtctaagaggtccctgaggctctgtttgttgtagttttcccgtagtctgttgtctttctgttgtttagtttgggtaatttattattgttctgtcttcaagtctgattgtctaattctttcctctgttgtttttttttttttctgagacagagtctcactctgtcacccaggctggagtgcagtggtgcgattcaggcttgagtgcagtggcgcgatctctgctcactgcaaccgccgcctcctgggttcaagcgattctcctgcatcagcctcctgagtagctgggattacaggcgcgcgccaccatgccggctaatttttttgtatttttagtagagacggggtttcaccatgttggtcaggctggtctccaactcctgacctcgtgatctgcctgcctctgcctccctaagtgctgggattacaggcatgagccactgtgcctggcccatccattgagttttttatgtcagttatatttttcatttctgcagtttccttttcttctttatagcctctatttctttgccaagattcccttttgtttgtttgtttcaagtgtgttcataagtgctctctgaagcatttttttattatggctgattaaaaatccgtatcagataattctgacagcattgttatcttggtgttgctgcctgttgattatcttctcattcaaattgagattttcctggttcttgatatgatgagtgatttttggattatatcctgaacatttgggggtattattttataagactttggatttcactaactgttctttagcaggccttctctcataccagagtaagcaggtgccatcttattactgactgatgggggctgtagtccaggttccccccacagcctccaccgacatgcctgggtggtggttccttatggctaggtgaggttattggaacgcagggatttttattttttctatatttactgggagcaatacacctaccatattttttaagcagcagacatgttatttcttaatacatttaatttgtcagatctttgttttgcagatcaaggtatggtattgtaaactgagatatgtccttcatgctatgatgaatggtggaataaaaaacacttttgtgagttctcattacttaagtaataacattctgaagtgagtttgatcacagcttggtcagggaggaaacacttttttctgtccttttaggttcagtgcctggggcatgagaattaaacaagagagagattaacaagagacaaggcatataatttgtattaatatttatgtgcatgggagttcacagaaaagaagtgaaactcaaagaagcagttaggctcaggcttttatacccttaaaagaatttgggcttcaagagataatggagaattgacttatggaaaagtgactagtaaatatatgaaggagctaatggaagataagggctattttagtaagatctgtttctgcaaactcatctgctgtcgactccctgtcttctgtgatgagtcaatctttctcactggtgttggggaaagagagcatcttccttaaagggaaatttattccctgcttttaggcagataagggagggcagataattctctctatatctgttgattctcacttagctttagctcaaaataatccttatgccaaagtggcatatttgggcgtgatatattttgatctccttctgctgcaagaagcacttcagtgttaggtcaaaaccttctactatgccagttttccacagtcatcaaattatttatatctatattttaaaatttatagcttctgtattccttattaaattaagggcatgatgagaatcacacagtttattttttcttgtatcattttttagaaattcagcataatatttggtgaagaacataaagaaagcagttcacatggaaacagaataagatttttaactaaagtggattatgtctttagcaatggtatttgtttgggttattaatgtctttgaaaccaaagtgaagaaggtaaaagtttacatacaaaccatagtaatttgaaatatgctgcaacaggcaactgaacttctgcctctagaatgaagggctcaaattcttgcaattattctttagtatttaaagtttaagaggagcattatcagcagttatcctgaaaatgatctaccagtaaatgagattaataaactaaacacaatccaataaagcattagaaaaattgaaaaacaatggttaaaagtatgcattttcaatgactgaaaagagagcataacagatataagtgtctaatttctcaaaattacgtgatcattgcagcaataatctatgaaaaggaaaagtaagcagctttagaaaaatgcacattttaaatatagttaagaaatatacattgatatcttaaagatatcaatgaaatactctcatggaaaattagagccacttacccaatgagttccgagataaaataactacttgaattcccaaagaaggaatgttccttgtgttcctccttttgatgatagttttggcagtgtggtgcttgtacatatttcctgtggaatgttagctattcagaatctaatggaagttctatttttataggtgcattgagtcttcttctaatgaaatgatttttactttctaaaaaatcaaaacaaagaacatgagttctatgaaaaaattttcttctttttttttctttttaaattttattttattatagagatggggtcttgctatgttgcccaggctggtctcaaacttccggtctcaagctatcctccctcctcagcctccccaagtgctcaggtgtgagctaccatgcccagcctcttcttactgttttaaatatatatatatatatatatatatatataaaatagcaagaaatatatagaaagatatatataaagaaatataatagcaagaaacatatataataacaagaaatatatatatttcttgctattttaaatttatatatttttattcagttatctagccatttttaacaataaggcattagtagtctcttttgcacatagactcaggaatgaatgggaaaggcttttatgaaagcaaagtcatccccttcctgtatccatgtgttctcattgttcaattcccacctatgagtgagaatatgcggtgtttggttttttgttcttgcgatagtttactgagaatgatgatttccaattttatccatgtccctacaaaggacatgaactcatcaggaaggggaacatcacactctggggactgttgtggggtggggggaggggggaggggggagggatagctttaggagatatacctaatgctaaatgacgagttaatgggtgcagcacaccaacatggcacatgtatacatatgtaactaacctgcacattgtgcacatgtaccctaaaactgaaagtataataataaaataaaataaaataaaataacgcaaagtcatctttacagcaaataatgaactgccctgatttttttcaaataatcctttccagggtttgtgcctagcatggtttctaggcacacctcagcggctctggagaacaaggagggctaagtttatagagatgtgaatttaccgaaagataagagaagtggagctagattgtagtccccaagggagaggccttcaggcagagacttcagccttaagcagataaggcagatcacagatcaagttcatttctagggctaatggtaaataaggctttaacatgggcagtcacctgaacatatgtgttggcttgaaaaattgttttccctctacccgttttaggtttatcggctgggaccccgcaaattagactgacaggagaaagattaaggaaaaaacaaacaaacagacgtttattaaactgtgtataatacgttcacatggaagcactcagagatgagtaactcaaaagggtggttagaacttcagcttatatatcatcttaaaagaacaataaattcttagagaagagacaaaacaaaggaagaggactttgagtctataggaacagcaaattgtatgaaggtaaatagatgaggataattaatggcagataatggctggttgtagtaaagtttcttatgcggattcctctggtgcagtctccaggctcaggctctaggttgtcactaacttctgccttccctggagagagggcaggagagaaaactctacaaatttatgtcatgcttttaggcagacagagggaaagcaaagagctttatctgtatctgcttcttcacaattgccttcagcaaaaaataatttttacaagtggcatactttggagtgacatattttgttacccttcattaatgacatttatttcaggaactgtatgtcagagaaaatccgtattatgtgtttgttgagtgaatacttgttcaagagaccaaaaaaaaaattagtaattacagtacaatacaacgtttgccacgatattgttctgtgtagacagcttcaagcaaaaatggacttagtttagagatagcttagcccagttagaagtcactgaagtaaggtgttgggagaaataaaaaaaaaaagaactaaaatagtgtaatccctttgaaaatactttatagaacatagctgagtctacaaattttgtttcaagatcatcatttgtatttaagaaggaggctgggcacagtggtccacacctctaatcacaagtgctttgggaggctgagacaggagatcgcttaagcccaggagttcgagaccagcctgggcaacatagcaagactctttgtctacaaaaaagttttaaaaatcagtctgtggtgatggcacttgcatgtagtcctagctgctagggtggctgaggcggaaaatcacttgagcccagaagttccaggctgcagtgagctgtgatcacgccactgcactctaggtgacagagcaagaacctgacttaaaaaatgaaaaaaaaaaaaaaaaaaaaaaaaaaagaataaacagttaatctacataaaatgcattatattttaaatagcaaaccctgatgctataactatactaaatttcttgtttgtttttagaaaatggaattttgtttgaatcaaaacatctgggctattttaaaatgaaatttaatgttcattatagtgaaaaccaatgaatctagaattttagtatgtctcatgtgggaaaaatactggttttccagtacgtatactaacaattttagtggttttttttttcctcatgaaagggcatatccggatcgtgttccttttattgaaaaattaataaaacaattaatgattttgttatattttttaaggaagaacactttaaatgctcatgacattctgtccttttaatagaaagggatgctttgtcatatacttttgattctattctgagtggaaggcaaaatacacgattaacttctctctattatggtgctccacagtggcaaattaaatccttctacccacgtatcatgtttcctttatgttcgtgaaaactttcagtttgtgtgggataagatataaacttgtctcctaaagactctttagttacaacctacagaaggaggtaggttcttcgtgataaatactatttgatatcagaatttttttcagggataattgtcataaattccagagggcctatttctattttgtttctttgctttagtaatttttattctttgatgagaataaggatttcttcttaacatatctataccatcacattaattctgtggctcatgcttgtaacctcagcacttcaggaggccggggaaggaggattgcttaagcctaggacttaaagatcagcctgggcaacatagtgagacctcatctctacaaaaacatttttacaaagtagctggtgtggtggtatgcacctgtagtcccagctacttgagaggctgaggtgagaggatcacttgagcccggttcatcaaggctgcagtgagacaagattatgccactgcttcctagttgacagagcgagaccctgtctcaatttaaaataaaaatggtaattattattattattgccctttttaatacagatctggatttcttggtgttatatcacctcccatatttattataattcatcttcatgaagttagataaaatattgtggactataggattttttgaaactttgacaattctttttaaacttctaataaactttatattttagatcagttttaagtttacagcaaaaatgagtggaaatacagaaagtttccatatacccttatctctacaagtttaccacctcctacactatcaaaatccccatacaacattagtacattagttataatagtacattgtactactgtataaacctactttggtacatgattatcacctagagtccataatttatgctagggttcactcttggtgttttacattgtatgggtttttaaaaatgtgtgacgttctgtaaccacaattgtaggatcatacagaatagttgcattgccctaaaaatcttctgtcttctgcctgttctgtcctccttacccccaacttctggcaaccactaatcttttactgtctccatagctttaccttttccagaatatcatatagttagaatcatacagtatataaccttttagattgatttctttcacttagtaataaagtcagccctgggacaacatgggtttgaactgcacaggtccacttatacgtggattttcctccacctttgccattcctgagacagcaagaccaacttctcctcttcctcctcctcctcttcctcctcctcctcttcagtcttctcaatgtgaagatgatgaggataagacctttatgatgacccactttcacttaatgagtgtaaatttattatctcttccttaggattttcttagtaacattttcttctctctaacttactttattttaagaatacagtatataatacacgtaacatacaaaatatgtgttaatcaactctgttatccttcaggcttccagtcaacagtaggctattagtagttaaatttgtggggaatcaaaagttatacaagggttttcaactgttggggggttgatactctacccctcatgttgttcaagaatcaactgtacatatttagatttcttctatttattttttatggccttatagcttatttccttttgtcgttgaataatatttcattgtctggacgtaccagagtttattgacttacccaatgaaagacaccttgactgctttcaaattttggcaattatgaataaagctgctataaacatccatatataggtttttgcatggacataagttttcaactcatttgggtaaatacctaaatgtgctgctgatgaatcatgttgtaagtgtatatttagttttctaaaacactgccagtattcttaagtggctataccattttgcattcacaccagcaatgaatgagagttcctgttgctccatactgtctccatagctttacctttgtaagaattctcaccagcatttggtgttgtcagtgttcttgatattggcctttttaataggtgtgtagtgatattccattgttacaatttgaaatttcctaatgacatacaatgattaacatcatctcatatgctcgcttaccatctgcattcttctatggtgaggtatctcttcaggtttttcatccatttttttattagattgttcattttcatgttaagctttgagggtgatttgtatattcctagcacttcaagaggctgaggcaggcagatcacttgagtcaagaatttgagaccagcctggccaacatgatgaaaccccatctctactaaaaagacaaaaattagctgggcatggtggtgcatgcttgtaatcccagctacttgagaggcttgaacctaggaggcagaggttgcagtgagccaagatactgcaagccattatactccagcctgggtgacagagtgacactccatctcaaaacaaacaaatggacaaaaaagagttatttgtatattttggataacagaagctttatccggtgtgtgttttggatatattttctttcagtctgcagcttttcttatcctctcaacagtgtcatttgcagagtggaagtttttaagtttaagtttttaagcttatcaatttgtttctttcatggattatgtgtttggtcttatatctaaaaagtcatcagcatacccaagatcatctaaatattctcctttgttttctgggaagttttagagttttgtgttttacataaaacataggtgtgtgatctattttgagttagttttggggaaaggtgtaaggtctgtgtctgcattcatttttttttaatgtgagttttcagttgtttcagcaccatttattaaagaatgttttttccagtgtattgcctttgctcttttatcaaagatcagttgattgtacttatgagagtgtatttctatactcaaagatctgttctgtaccgttgatctctttgtttgttcttttgccaatagcacagtgtctgattgctgtagctttatggtaagtctcaatgttgagtagtgtcagtcttctatctttgttcttttccatcaatattctcttggctattctgggtcttttttcttttcatatgaactttaaaattggttagtatatatcaaaaaataacttgctgagattttgattgggatttcattgaatctgtagaaaagttgtgtgtgttctgactgcccccactgactggccattcccccattctttccctttcctcaggccttcctattccctgagacacaaagatattgaaattaaaccaataaataacttttcactggcctctaagtgctcaagtgaaaggaagagtcacacatctctcattttaaatcaaaacctagaaagaattaaggttagtgaggaagggatatcaaaagcagagatatgctgaaagctagacctgtgcgccagttagctgagttgtgaatgcaaaggaaaagttcttgaaggaaattgcaagtgctattccatttagcaaacagatgataagacagcaaaacagccttattgctaatatggagaaagctttattggtccatataggtgatcaaaccagttataacatttccttaagccaaagcctaatccagaacaaagccctaactttcttcaattgtttgaaggctgagaggggtgagaaagctgcagaagaatagaggaaagctagcagaggttgtttcttgaggtttaaggaaggaagccatgtccataacaaaaaagcgcagtgtgaagcagcaagagctgatggagaagctgcagtaacttatccagaagatctagctaagataagtgatgaaggtttgtgcactaaaaacagattttcaatgtagatggaacaatcttctattggaggaagatgccatctgggactttcatagcttgagacaagaagttttaaaggacagctttcaagaacaggttaactttctcatgagggattaatgcatatgatgactttaagaagacatgaatgctcattgaccattccaaaaattttaggacccggccaggcgcggtggctcatgcctgtaatcccagcactttgggaggccgagatgggcagatcaccaggtcaggagatggagaccatcctggctaacacggtgaaaccccgtctctactaaaaatacaacaaattagccagcctggtggtgagcacctgtaatgccagctactcaggaggctgaggcaggagaatggcgtgaacccgggaggctgagattgcagtgagctgagatcatgccactgcactccagcctaggcgacagagcgaggctccatctcaaaaaaaaaaaaaaaaattctaggacccttaagatagatgctaaatctactctgcctgtactcaataaatataacaacaaagccgagacgacagcacatctgtttacatcatggtttactgaatattttaagcctggcattgagatctactgcctgggggggaagaaaaatgatttctttcaaatattactgcacaccgacaattgacctagttgcccaagagctctgacggagatgtacaaagagatgattgttgttttcatgcctacgaacccaacatccattctgcaacctctgggtcaatgagtcatattatcttttaagtattattattaacacattttgtaaggcgatagctgccttagatagtcattcctctgattgatctgagcaaagtaaattgacagccttctggaaaggatttaccattctagatgccatttaagaacattacttattcatggcaggaggtaaaaataacaacattaacaggagtttggaagaagttgattccatctctcatggatgattttgagatgtttgaagcttccagtggaagatataactgcagatgtgaaaatagcatgaagactataactggaagtgtaatctgcagatgtgactgcattgatgtaatctcagcataaaacttccatgaatgaggagttgcttcttatgaatgagcaaataaagtggtatcttgagatggaatctactcctagtgaaaatactgtgaacattgttgaatgacaacaaaggatttagaatattacataaagttaattgataacacagcagcagggtttgagaggattgactccaattttgaaagaagttctcctatgggtaaaatgctatcaaacagcatcacatgctacagagaaacttcctgaaaaaaagtcaatcaatatgcagcaaacttaattgttgccttattttaagaacctacgacagccaccctagctttcagcagccaccaccccatcagtcagcaccatcaacactgaggcgagaacctccaccagtaaaaaggttacagctcactaaagtcttagatgatcattagcgtatttagcagtaaagtattttaaaattatgatatgtcacattgtttttagagataacgctattgcacatttaatagaccatggtatagtgcaaacataacttcatatgcactgtgaaataaagctgtgactcattttattgtaatatttgctttattgtggtggtgtggaactgaacccacaatatctcctatactacttcatgggtagtatcggtatcttataataacaaaatgttagtcttctctcctgtcccttgtatcactgctgttatttatttcacttatacataagtacacacacacacacacacacacacacacacacacaagcatacataattgaataaattgttgctattattactttggacaaactgttacctattagatcaatttagaatatgaaaaatagtttttattgtcttcacttattccttctttgattctctttctggctgtagatctgagtttccaatctttgtaatttttcttctcctgaaaactttgttttaaacatttcttgcaagacaggtctacagtttctttttgtttgtctgagaaagtatttattttctcacatttgaaggataatctcacagaatatagaattctagggttttttggttttgttttcttcttaacactttgtttcattccacactcttcttcttgcctagtttctgagaatctttgtaaagattttttctttgttttttctttttctttgtttttctgatgtttgaatgtggtatgcctagggattgttttttagtatttatcataccttgtgttctctgagtttcctggatctgaggaaactgtcaaactgttattgctgtctcacaataattattcaggaagttatcagtcattattgcttcaaatgttgttactatttctttctctctttcttctccttccactattcccattacacaaattacacatatttacactttttgtcatcgtcccacaatctaagttgtcttggatattctttgctttcttttttatcagtctttttcttcctttgctcttcagttttagaagttttttctattgtcatatcttcaggcttagagattcttttctcagccctgtctagtctactaatgagcctatcaaagacattctccatttttctggtatagtgcttttgatggtcaagctagcatttctattggattctttcttagaatattcatctctctgtttacatcatccacctgttcttgcatggcatcttattttttccattaaagcccttcatatatgattcacagttttaaaaaatgtctggtctgatcattcccacatatttgtcatatttgactctggttctgaaactttttcagtctcttcaaactgtgtttttgccctttagtatgccttgttatttattgaaaggtgggcatgatgtactaggtgatatggtttggatctgtgtccccaccagatctcatgttgaattgtaatccccagtgttggaggtggggcctgctgggaggtgattcgatcatggggttggatttctcacgaatggtttagcaccatcctcttggtactgtcctcgtgataaggagtgagttctcctgagatctgttcatttaaatgtgtgtggccttcctccttctctctcttgttcctgctttcagcatgtgaagtgcctgttgctgctttgctttctgccatgagtaaaagctccctgaggtctccccagaagcaaatgctgccatacttcctgtgcagcctgaagaagagccagttaagcttgctataaattactcagtctcaggtttttctttatagcaatgtgagaatggactaatacactaggttaggaaaaaaaaaagcacaactctggtaaataagccttcaataataatagtggtaagttatggggaaagaggaagcattctgtagtcctatatttagatctcagtcttttcataagcctgtacctctagactgtgatctacactggtgcttaagggtacagctgggtagaattggggatttctatttccctaggtttgttagactctgataaaaccccagcaggttgggctctactaaagtagttgttcctgagggcagaccttgttaagacaaacagcattctctgccatatttcaaagttgtttcttttctcctccttcttccagaagcagaaagagatttttcctctggtattcactgtgaagctctgatacaactcttggaagtaaaactcacagaagtgtgaggatccccttaagattaggtccccctaaagtttttatctttcagacttgtccacactgatccttcagcaattcatcagttaaaagtttatgttttcctacctcatgatggttcagaggaggtttctgctcgtggatttctgctctgataaattgtgacactctatcctaacctgtcttactctccaattttaggggcagcagtttgcactgtaaactcacttctatggcagatctaagaagagtgttaatttgtcagtttgttcagtattttacttgttctaattacagagtgatggacttttaagctccttacacaccataccggaaaccaaaagtcctcataatgctttatttaaaatgttaaatttaggctgggcacagtggcttatacctgtaatcccagcactttgggaggccagggtaggcagatcacttgaggccaggagttggagaccagcctggccaagatggcgaaacccaatctctattaaaaatacaaaaatttgccaggcatggtggcacacacctgtaatcccagctacttgggaggctgaggcaggagaatcactggaacccgggaggcagaggctgcagtaaactgagatcatgccactgcactccagcctgggtagagcaagagactctgtcttaaataaataaataaataaaatgtcaaattttataaaaatccagttataaactactaaatggtttggatttgaaaatacaagcaaggcataataattcattagctggaggtcagaaatcaagactagaaatttacatttttaagacatgtttaagattattagtttgatctgtttcttatatattataggttgccgagacggataataaaagcagtttgatatttctcagaaaaaaaaatctgaaactttaaaaaaaatcatactccattggaatttgatgttgaggcattaaagagatttactacctcttttgtttaactagattttgaaagcacaattttctcaaaaagttaattaaatgtaaaatcatggatgcttattaaattggtgccttcttaagtaaattcttttcagcttctgggtcagatggttctccttgaaagaggctagaattgctgtattcagtattaattgccattttggagacaatatctgtggactgtcagtgacattctgctatgaaagagaatctggaaaagttacaatttaaaacatgttaggctaagtttagcagtcagcttcttcagtatgtgatgatattttctgccatgcactcatccatttcatctcccagcctggactttgcagacaggaagcccaactcccacttaatccctgcttacttttcacttctacttgagacacccaaacttggcaggttctgctgtcggcttgcagttaaccacaaccaccaacccccctcagctttggtactttagacattctctgtaaatagatttgctattataatacattcattcaatgaatacttattaagtactaattatatgcaaagaactttgctaagtactagaggtaaacccatgaataagacatatctgcctacaaagagcttacaacctagtagagacaagaaaccataaactgtggtgagccctaagacaaggtgagctcccagaaggaaatggtgtctaatgagctggggaatgggaagacacagaagactctacattgagtagaatttacttagtcacagattctagctcctccctgcaatgccaagaagaacaacatgtgcaaaggcccagaggggacagacgtggaaaattgtagaaatgtagaggttagtgtggatgagctattacatttaagggtgaaaggagagcacggtaaggctctgagaactgaagaaaccagctgggagcaatttccaaagcaacttccagttttaccatccttgcattaaaatgtgatcctgattttttaaaatagagttaaggggagtgacctgatgagatacacatttagagaaatcattctagctacaagttggagaacattggcatcctagtgagagatgctagtttttggaactgagcaatgcagtgggagcgaataaaagtggaaagtttagagagtaattaaaggggtaaaagtaatagatatgatgattaattggatctgaacctcttctattgaagccttctatttagaacatttcatttctaaataactacaataatctgattagagaaaagaagattttatctctcatgatggtttgactagctgatagctgtgtcattgacaacagttaatgcaatgacattgtgttaatagacatttagcagactcagaaataggtacttattccctttttttttttgaattttgactacgtgaataaaataagtaaaacttctaaaataggaaagataatggcaataggtcccaggaagctatgtgacttgacaaacaagcagattttgagagaagaccttccttccctttactaactaaagcaaggatgtaaacagcactaaaacataccaggcactcaacaaacatctgttgaattgttgacttattagttgtttaatgttgacttattatttcacattttaaataagtcaaaaagtagaagcaattattgagcatacatcagctgaaatttaatatattcattcttgatgtatacatgtattttacctaatatacagtcatattgtgtgatatgtgtcagttctgtgaggtagtgagggcaaagatctaactgagtagagttattctgtcccagttattttaagtaagatgttacttttgttttaaagaatatatgaaagagaaatattaattagatttttcataaatgcttttgaagtttataagttttgaattacaaattagtaatctaaaattaaccagaacttttattggagcctcaaaaaaagctttcaaagtagaactggaagaaaattataatttatgatcttgttcatctttcttctttgctgttctcgtgtagtgatagacgtgttaatgaaaagttttatgcataggaaattgactatcttgaatcatgattatccattgactttcactgtaatttcttatatttcttgttaaaagggaggatggggaatcagattttagaattttctttaaaggagttctgtcattctcctaaataacatacttttttcttctgtgtctgatatatttccatttaattgcctgatgtttctcttagcaagaaattaaaccaatatactatcaagttaacctgtctgtcttccctatcagatagatctctatctatatttgttttctcagtgtcttgctcagtttctggaactagaaaatgctcaataaatattcattgagccaaagtgaatgtttaagattctacattcatttatccattcacttattcattcaacagatacatttagtgtttttttatgtagctggtacagtgctggtccctgaagcccaaaatgagtaggattttgtgcctctcttcaagatattttaagtcttttgaatattcatttaaccttattaacatgcatatattcaaaatatcatagaggtaatttggccataccatagaggtaatttccttccacccttttgtatcttctttgcgggttcttcctcatctcccagacatttaaacgtaggagtacaagggcttggtccttgggcatcatgcattctctgcttatacttgcttcttaagaatctcatccagtatcatggctttaaattattccatctataagctaatgatatccaaatttacaactgctactcagacctctacccaaactccagacttgcgcattctgttgcctactcactatctctacttgcatgtctaattggcatctcaaatttaagatatctaaaacagttctcctcatctctctaaggtcaaagttactcctcttagtggcaactccgtctttttcaggctcacagtccaaaaaccttagagtaattattgactcattgcgcccttctcttacttaccatatttgactcatcagcaactcctattagattcaaaatacattcagaaactgaatatatttcactccgctccagccatactgccttactcatagcctggtgcatgctaggcatatctcaacttcaagacatttgcacttcttgaatctaatatattcagaacttgaatctgtcagaacttgaatatatcttgaatctccacagcacccccttggccaaaaccattatcatcgcttgctggatcactgtaaaagtgtcccaactagttttcctctttctaccctcaccttcatatagtcttctctcaacacagtagccagagagttcctatcaaattccaagagcatgccactcctctgctcaaaacactccattgccacattgcctactgctctccttctgacccactcagccccagccacactgcctacctcacagcctgggacatgctaggcatattgcagctcaaggtatttgcacttcctctttccttggccctgagtgttcctctcccagaaacctgcatggtctccccagctctcctctcagagcttggctcacagaggccttccctgcccaccaatctaaaagttgatctgctttcttcaccaacttttcttaattccttccttggctttttttttttttcttttttgacaccactattaaactaccatgaattaatttatctggttaattttctatattaccaactatgacgtaagctccattagtgcagggacttttttctcttttgatcactattatccccagtgtctagagcacataacagatgttcaataaatacttttgcagaagagcacatgagaaaacttctgggaagaatatagcattgttttgcaaagggtttaaagagttgtaagtgaatgttttaggttttctttcatctacttgctactttggttacataatggtgcctcagtgccaactattgcctaagtaatagttaattagtatgctcagaatcatagaaattgatttttggtcagtactaaaactagagatttggtttagccaagtatctgcttttgagcaaaatgagacatcatgatacgttttaagaaatgaaaatagttatgcctgtatggtctaaatagaggcagtgttgtctcacatggtatttatgatgtacttaaattgaaatatgatttttctttattattatgatgcttaatgatttgaagtatcagtatgtaccatttaccttgtctttttcttagaaacatttggctacttatttttagccagcaagtaaagtaggatattcaattacccggggagcctgatactaatggctataattatttaagcaattgaagtctttcctgtcattttctttctcaaacccacaaggtgccaagactgaaacatgcaacgtatatacatggattaatatattttctcagtggttgcattcttcaatggagtctctggaaagaaagactcttttgtttgcttttttaatctcttattttggaatctgaaaactattcaaccctttccagaaatgttgacccaaatggggcattttcatgggcagaaagaaatattttctgcctgctcttgcttgaacaaagaaacctactgatctggatgacatcatcatcatatttggcttcttttcctagtattattgatgatacagactttttcgaagggtatgcttagctgataattgtgaaacccaaaacacttggggactatgactagcgtgtactgatgatagacagcctcatgccataggaattgcaatatttagacctttaaaatttaggcccagagtttggaaaaactttataactgactgttactaatagtctggagaaggaagaacactttccatatacacttagatttaaagcattgtttctgtaactttgtgtttcaatattaactatttctcaatgaaactatttctcaaagcaacctcaatccttcagttctctttagttgttcagataatctcttcctaaagaaagcaaaaaataattaagaataaagaccctgctcttccttttgagtgttacggtgtgaaagagagttttagagactgggatgttgtctctgctgaaaaacctaactatgtgaataagacctaagagtaaaaagccatagtcacaaatgaaatttgcctcaggcgcatgttactgaattgcctttatcagcatgtgaaattacttgaaagtcattttgattttgtaaaagaatgtctggccttaataagagtgaacatttgttaagcacttaccatgaactcctccttctcaaactgacaagcatatacacattgtctcattgacagtaactccataaggtatatagtattattctaattcttctttacagatgaaattgagggaggagagtttatttgctttacctaaggtcacagagtaagtggctgtgctaggatttaaacttagatttgcctgacactgaaaatagtgctatgaacaactgtaaaatattgctttatatttactctttagcagaacttagatgatggggtattatgtgcttgcatttagttttgaatggtttgtttttatctctttccttaaaacaaaagttaacaagagactttctgaagtcttattttttattcaaactgttttttgtatcccttccttgttccatgaccctgttcttttacctgcatgccctgaacatggagctaacggaccaccaattttgtctctttattactataaccagcgaatattcatagatagaggcttttctgtaagcttctggatgttataagctctcaatcagtagtactggagtgggtttgtttcttaaataaagagataaagcctaggtttgtgagagctggttctatttggaccaaagcatgatcagaaggtgttttagtaacagaattgagctgagcctcacaacctaggttgttctattgagaaaagaagtgtgaacaaaacctttgtagctagaatcacatggattgatttgggggtgttttgctgaaaagtggttgacaataacatgtaaaaattagtgcattcttcaggactctttatattgcaaggggcagcaatccaaaatagctttggccaaaaagttaacttatttcctcaaataattgagaaaaatctgtgagttgacctggtttcaaatgttgctcaatggtggcccaaattcagctggtctcaggtcctcttttctactttattgccaggcacatttatccaatatggtgacctccagcagttccaggcttacatcattcttacagcaacaagtgttattgcaaagatagccttttgccagttaattccaacaactctatgaaaattgagttgtatagttcatccttgaaccaattactctcaccaagggaattacatgctagcttgtggagctggaaacaggtggttgtcaaaccagtacaggacacatggaccaagagtaggagagtagtttactaaagcaaaaaaagtgaaacaaaaaacaaattaaaaaaccgcataggtccactacagtcagacagaaagaagaggcagccaggattcaagccaggagcaaaatttcctttgaaggaaaggaaacaatgtggccaaaagtgggtagtctaggtgaatagcaacaaggcatatacatgccaattaaagctcttttcttaaacacaattacttccagtttaatactggatgcaatacttaagttatctttacaaaactggaactgcatttttaaaaagtgcttttattttttggcacaaagttctatatactaatctatactatactatatactgtactatatactatctatactatatgatatactaatctatatatacactaacctatactatatatatactaatctatactatatactaatctatactatactgtatactaatctacactgtaagattgcatatttaattcagtcattatcagagaaactgagttttcctctgaccatatgcctttctgattcaaaaggttaaaaaggataaagatgtataaagtagcacacacaattttatgaaatcagataacatctgtgaattaccctgtgtatacaaaatacatgtgtatacaaatatgtgtgtgcatatatacacacatgtatatgtgtgtatgtatgtatgtttgtgtccgtgcacacacatgaggctggggaaggacaacgagtgaagtctagggaaaaaaatcactttagaggttcaactgcaaatctgaaattcctcacgttgattatatgaaatattgtcttttttgttaattaattaatcaattactcttgcctgaatttgaaattcaaatgatacctggtcttattttacctatagataatttaatgcacagagataaatatgttaacctgttttgtctcctctcctctagtggaaaaattgtggagactattaattaaggaattgaacacattatgtttctctaccagctactaaaaataagctgagaagtctctagttacatttggcccaaagtgagatgatgagaaaggacagcaagctggtgtgggacccggataaacagcaggggagagtgactcagccctctggttcccagcttcagcagggatctgtgaatatgagtgagcccttcagtttttaatgggtctttaggcagaaatacgtaaagaaccagaaaactttttttttcttaagataaaagataggcatcattaatatcttttatttttgttgcttagctattgtgttcttttggaaaccaccacaatttaactgcaagaccaacatttcctcattatatgtagcctgctgggtctgccccagctatctttttctcccttatctaaggggtgagcataaaacctgaactaagcttgtgaggtacacccccttctctggaatttgtaacctgagccaaataacttacggactgaaaatagaagtgaactgactggtggagagacacatctgttcccaccacctgaaaccaggaagcctctctggttcatgattgctgagcctgcttcctcaggcctaccttttgttttgtgagctaccccaaagccttccaagaaacctctcttcttcctgcataaaccaagaaggcctggctgtcctgtgttttctctcctcatcatcggggtgaagagagaagctcaggaacatctccagctcccatgcttcacattctacaactcacacagccttcgggctttgaaaccgtttggactcacttaattatcccttttttatttttgcttatggtaatcaccccaagagctctcacactttgaggtcaatctccatctcccacattctactccccataggttcttgtacaacctaatcctaatgctgaaaacatgagatcccagaattcacgtccactcagtgcagtgactcttggcccacattctgtagataagaaacaccttttactgacaatggaaagactgctagaaataacttgagatacccaggcatagtcttatattatgttggggttttataatgtaaatgcaagaatcagatttctccataccccagccaatgattaagctttatggaagactggtttaggtttttctgatctgtaaaggcagactaaaggctgcagtacatggtggccttcactcaggcatttcaatctgtctgcactgaacactgagacactagtaccttagtccacaatgggaataaaatgcacatgcaggtgatgttaatctacatgaaagatgctgaattccataacagaaaaaaaaattacatgtgtgtgtaatatgaaagaattaaataacttcagtaagtacattctatctgtacccttgtcttttataagggtaactgtatataagttaaactagaaattttatttttaaggggtcccatttcaaaccataagtgctttaaacagcaattatcagctaaattttcctgctggcagcattactagagatatgttgtttctgggcaaagttatccagaggaatcctgctccctcgtattttggaggagttgagtttcatagcatgtgataattacccatttttaccagttgagtccaagttgcaactcataaggctgctacagtgtatttctaagtattgtttaaattggaactttaaccttttatcctgggaaatgattggttttgtttttaatctcttcttagtggattctgttattgcagagagcggtatcagtagagattgatatttttgtaggttagcttcagtataccacatgaaatacatccaatgctcataaatgaggcttttattcaaattcttaatcaacttgcattttttgtgccctatgaagggtatttgctaaataatgcacattggaattcaaaaccctggaaaattcttgtttaaaaccagtggtacatctcagcaaactgggtggagactgagggcaacactcaagataaaatttagcatggcagcaatttaaaattagaagcccttgatgaaagatgagacctgttttaggccacttggtgagccccaccttttaaaggcaggatttgactccactgaagagctgagcagtcacgggaggacagactgtctctgccccaatagggaatgcctatcttccgatttggtgtgtgacggtgttaaataaagctgtgacctttgtttatctcccaagcatttccacccctccactggcagaatgccatgggagagtgtccatttatcggcaagctgtggtctaaattcagatactgtctaaagcttataacaataagtgtctactgtatatactgtacagagatgcttcacctgagcccttatacattacatgtttcatgaagttctagcttaaagaagtccctttaatatttatttaaataacagcctgaaataggccatgagtaaaaatactcaggtctcagtatcaatatatataatgtttctgttacctcttaaaggcaaattttttaaaaaggaaagttcctcagtaagagcagcttatcagctcgcttctttaaggtaaaaggagggatacttaaggtgtacatttttcagaatttttagatatgagttaatgatagaaacatactttgacttgatcacatgatggttacacgacgatatgtgtttgtcgaaactcagaactatacaccaaaaagagtggattttgctatatgtaaattgtacctcaataaattcaggttaaagagacagctctgctaaatagaaacgtgtgtcctagatttaaatgcttttatttgtcttatggtttatatataaatttccttcctacccctatcctattcatggagaataaatcctacgcacaccctatgtgggtgggccaccctacatgtcacatgattctgacctagacaatttattggatcaaatgtaaacatctaactggtcaacctggatgtgaaaccaagacagaccaaaattctaaagtcttggagatttgcggccagagtcaaaatatgctctccaaaagccatggttaagtgagagttatgaggagctgcaaaaatgagttatgcaaaagaagccaatcagaaggaaggagaattgagcaggcagacagagaatcattgagccagcgtccctttctcgtcatggaaagggagatgagcatagtaccttgatgatattctagtttcccagaggcctagctgaacttataattgaattatctgactttcccctacagatctacttttacttaatatagctggtgtgagttctagttttcatgaaaagacaggaaaattacccaatgacatttaatgttcttaatcccaaatcacaggcaaatatcaatgttttgctagcaccaccactttaattcctaaagtagaaggagtagaaggctgtagtagtgggaaggaagaacataatcttacggaagtctgggttatttctgtgagctcagttttcacctgaaaatttcagaccttttaaagaaaaaaaaaatcaaataccttctaaggactaagttaacacatagcctggtctttttcttttcttttcttttcttttttttttttttttttttatgagaaagttttgctctcattggccaggctggagtgcaatgggaagatcttggctcaccgcaacctccgcctcccgggttcaagtgaatctcctgcctcagcctcccacgtagctgggattagaggcatgtgccaccacacttggctaattttgtatttttagtagagacacgctttctccatgttggtcaggctggtctcgaactcctgacctcaggtgatccacccgcctcggcctcccaaagtgctgggattacaggtgtgagccaccgcacccagccagtctttctttttttcttccttctcagttatttaggtatagaaaaggtcaaatagaataacaattattgattctacctccttatattaataaaattattctgtttgtgagaaaattattttacctctactttcacactgcatttttatttttgtttttatttttagtgctggggcacatgtgcaggatgtgcaagtttgttacataggtggacgtgtaccatagtggtttgctgcacctatcaacccatcacctaggtattaagcccagcatgcattagctattttttctaatattctccctccccccaccctaccccacattccatttctgatgactgatatatttaaaaaaacagaaaggtcacttcttctgaatactatagtatagcttttaaaaataattatagccaacttgaattaagtgcttaaatatgtggtattcattgcactcagagccctgaatacattatttcatttaatcctgataatcttatgaagtagttgccattattatcatgattttacagataataagccttcatgagttaagatagatacctgtagctctatggtagtaagtttttacacctgaatttgataccaaacagacctacttctgagtctgatctcttaatcacaacaaagagtatatgcaacaagaagtatgtatgttttacagctaaggaagtaatcataaggtaattgttggattttagttagttttctgaatatcttttctaactagagagacagttatatctacggttaagaaaatgtggtacatcttactgaatcagtactaaatcaatactaaatgtgtaacattatcattgtgctatatttaaaaggttgatatattgtagcactttaatgaatacaatatgaaaaaccatttctgtttatgttcatgtgagagtataaactatgtatttgagaacactcagcaactgtggcataacagaatatcccaaaagttaatgaaccaactgaggagtgttaagttattcatgcacatcaaacatgtcattttctcttgcctttttaattggttaagtatgtcagagtttgaaagagcttcattaataaggtcatggtatttggttttaaaatagaataaaataaatgagggattacacttttgtttagaaaaaatgagatagtatctttcattgtaaaatctgggacctaggaggaaaggaaaccacatagttatgtaagtagccatgcaggccaaatttggccttacatgtgggtaggacatggaactgttggttgaagaaaaactcttctgtactgtcaactggaagtcttgggatgggaaacctgtatttggaaagctgactttttcaaacagtggctgtattttcagtaaatatttcaagaattctttttctggtttttaataaagttctctgttttaaaatgtcaggctctttcaagcatgctgggttagtctgttttgcattgctgtaaaggaatatctgaggccggataatttataaagaaaaaaggtttattttggctcatagttttgtagactgtacaagaagcatagtgctggcatctgcttctggtgagggattcaggaagcttccaatcatagtggaaggtgaagggagagcaggcagtgtcacatggcaagagagggagcaagagagaggggaagaagtaccagggtcttttaacaatcagctattttatgaactaatagagtgagaactcagtcactgttgtggcagggcagtgggcagagggcaccaagccatttatgagggatccacccccatgacccaaacacctcccactatgccccatctacagcagtaggggtcacatttcaacatgagatttgatgagaacaaatatccaaaccatatcacatgctaaggggaaacatgcttaaggaaaagtaaaaggaagagcatcatgttactttgagaattggtgttgtaattccagagagaaggagcagccaaacctggatgagaagcaacaattttagcaaagactcaactataatatagcacctgtctagccatttctgcttacagaaaaattcctctgcatagcttagtctccaaaaacagtcagtggaatatagtttttaaactggccttttgttatatccgtgttaggagagcagataatgtaagtgattggtacatataactcaggctgtctcctgatttgtacagtttgcctttttccatttattctataaagttaagagatagtctttggtttttgaagaaaggagtttttattttgtagcatattttttaattgtttgtcattcttcagatatactcagttttatggaagaatttgattgtgtagcaatggtagcagacagtagctcaatgctattttctgccaaaggacaggacatgcctctgcaaattgctcttcactgcattagatgtggatttttttactcttaaccttctctgttaaaatcttacgatgacttttaaaatttgcaagtgtttaggggaagaaatgagaagaaagagctttggctacatctatgtattgttaaagttatctctttagctctgtgaaaaactgcttatttacaaacttgagtaaaatttctggtttaagatatcatatttaaactgtaacataaaatccaatggcacactttcccccatacctaccaaacgagcaaaactagctgaaacattttcattttgaactgatatgaacccaatagggaatgagggataacttaaagcaatacacttgaaaaacttgtctccagtataaaaaacaaacaattccgagatggaacagagtgagtggcacagtgtggcttggtcattaacctactctgtaattctagagctatacaactgagttgacccaatcctgacaattctcacaaataaccaaatatgtagagagacattcttagtgagtcctttttctttttctcttctggccaacaagaattagaaacagagtcccaggatacttgaataaagggggaaatgtgaacaaaggggctgactatgacaggattgaatggacatttcattgctgggaaaatgatccgaaatattaagatactgttccttgggaacagaatatctttcttcaatgaagtgggttgaaccctggtacaaagcatctaatttaaacgacttttagagtggagctcaagtattctgacaaaaacacaataccaatactcagccagattctgcaaccatcttcctcctgtcagtctttcaagctatagaaggatggtaggactgtgaaactcctagcattccatatgtggctcatagtggtggaaaagcatatgatgttatttatggaagggaaagacttaaatcaggtgcactctttcatgacaaatacagagtcttgtctgaaatgtccaaacacatggaacatggggaaaaatatgccatggcacaacatttatgcaaataattatacaagcttattagatctaaaaaaaaaaaatagtatacgaagagcccaaaggaaaaaactgtaacacaaatgagccaaagaaaatctcacagttgtgtcacattaaagaaccactcactaaggacacatattcaataaagagtgagctcaaagcctagaaaataaaaggtatatcgtatgtgtgagaaaacaaatcgagggccaagctaacatcattattgaactagtaacagacaaaatacaaggcatttgataaacagtactgattatgtaattagtgacagtgagaagacttatgatcagtatagtgtatgtggatgaaggagggggagaatggagagttttagagaatctaatgtctatggaacagagctaaagctaattcaacataagggtaattggtgttcctgaatagagaacccaaaatatggaacaacatatgtaactcaagagaacttttacaaaatgaagaaagattgaatctgtatatcgaaagaacacaacatattccaggaaattttgaatcagaacatgaatctgagagatgttctagttaagctgataaacttttaagattatggaaagaattctttacgcatccaggcagcaagatgctatctaatgaaaaccacagcagtaaaaattctcaaatgtgaaaaccaaaaccccaaagtaaagaattcattggactcttcctggggggaggggaaggagaactaacaaaaaacaaaatacaaatcaatgaaagtaaataatttattaatgaaaaacctgtggtaaaacgattggctatgagcatttaatcctctttgaaatgaaatgaatactaaacaattctgggaattaggaaaaccaagagaatgtgaatgtataaatctaggcagtttcacaattataattaacaaaaatagggaaatgagggaggggaattagaagggtgcatgagaatgctaatgtcttcatcttttgttgaaggcaggatgtcagttggtaccgtctaaattaaaacatgtagttaacaaattattctagcctcttaattttttttcaaaattctcttttaaaaaaaatttaaagtgatcttctgagaaatacatctgcagttaaaaagtatttttaaggttcactttgttttttctattaattttaaattgagttaaacttaatgctcagtaaattaagattaataatcatacgagtttgtttttttaatgtgtatgtttctatcgtctgtatacccttctgtgtacttgtgtgtgggcacatgcacacacacacactcttctagattactgtctgatttgatcttctaatattgatgattatttctgttttggatttaagatagctttttcttctttttgctttcatttttatactattcttcattgttttaagtctctatactgagaatatcttattttcattaaagtaattctgactgtttaaaaaggtgaggggttggtaaaggagattagaagcaaacgtgccaataagttaatgggactaaacatcggagatctgtgaatgtagattttcagtctattatgtgttttttaatgtcaaaaataaaaaatattttcaggggccaggcgtggcagctcatttctgtagtcccatctattcaggaggctgaggtgagaggattgcttgagacaaggagtttgaggatgcagtgagctatgggatcttgtcactgcactccagcctgggtgacaagagggagaacctctgtctaaatatatatattaaaagagcttaataagtgatgaccgagtattttctaactttagctagaagatacttataaaaaatatgtgaggcttctcttttaaaaaatagcaatatagtttatgcttcaaattcctacttactaggaagtcagtaagcaaaaaaaaactttacataactaaaatatttgccaacaaatatattcactgaggctcatgcactttattccacaaagactctcaggcccttcatcagaacacatcgctttcatgcattttaacaggttttataatctaatgtccaagcatttaggcaattagaaactggaaattaaaggggagaaatacagaccaaaaaagacaaagacatagatacactgattgcaataacaagaagaataaagagctgactgactgagggtttaaatgaagcacagcaaagaaattagagctacaaaaacattgtggtttgacaggacttggtgaggggccaaatatttctactaacctctgtagttcttaagcaccaaaaactgcataacacagaattgtataatcataattatgatccggggtctttaagaaaattatattttgcatatttaagaattcagagaaatttaaagtatattttgttgtagccatcaaaattaattaaataaagttttggagctcaaaggagcttttgttattttgaaaaataatttaagaaaatagccctgtccctaatgataccaagtgaatgaggtgtttctttaattgttttacattttgttgcataaaacactgcaatttatcatacagacacataatattagttcttctattgtctttctatccatggagtggatggtaatcttcaaataaataattacccttctttttaagttccttaagacagcaaatgagtagaataaaccccctcacttctgtagtttaacagcctacattctccagaggggaaaagtgattacatttactacctgagttttgtggagctataaatattactgtagaaagcctaattggctgttaaaacttgaagaagtgagtgcacagatgctgtgttcattttttttcttcaactgatttcaccatatgctgctgacaaaggaagacttaccctggtaaaactgggcttataagacctcctggagttctcaaattcagcagtgacagtgtctgtctgctgcctatgggattaatgttttcatttatgtgttctctagccatttggaacacatatgtaacatttaacagagtctgagagttggcaaatatgcctagcatttttccactgacgtcaacagagaaaaatgttgttctcaataagatctgtccagtgaagcactttagtcaaaatctaactaagagctgaggcttatcttgcttcacagcttccttataatgtagacatatggttgaaaagaacatttaatgattgcatggcattaaaagtgaaaaagaagtatctcagtttgtaaaccaaaactcaaacttggaaataagctttgcctaaatgcagtgaggaatcaggcttttgggttctaatactagcccttttccttcgtgactgatgaccttggaaagattatcccactattctgtgctaaaatagattatttcaacagtcctttctgagctctaaaacctcataatttatttagatgctatttatggaatcaaatatatttttaatcagagaaatgccctgattgcactgcattgaacaataaccatggcagcaatgtgaagaatatatttgtagaaaggagaggtgaattgggagattgattaggaggctgtctagtaatttatgtgagacacggtgaagcactgaactctgtgggatagggaatgaagaagaggggatcaggtccaggagtattttggagacagaatgtggcaaaaggtggtaaaccactggatgccacagtacggaactgaaagtggagctaaggatttagcgtgattggtgcacgggtaggagttgtgatataagaatgtagattaaaatgaatatattttgcgtaccctgaaatgccttcagaatgtccatgagacatctactgaagatagttaaaaggtaagagagtaataggtggagagagaatgagggtagacagggatattgatgagagactctcacttatgggcagatgagaagaagccagtgaagaagtagatagtaaaaacacaggcaaaaggtgggggagtcagggagaactgaagagtaaagctctgaagagcaggaacaaactaagatcggaaatgaagcctttgatcttcaaggaggaagccttctttcttttaggtaggagggaaggaggaaatagtaagtgagaatttacatcagttcaaggtgtgcactggaaaatgtatggaagtagttttataaagcctctttatttgttatctggaggcttctggttgccttattatacaatgcctgaaggttatacttggattcattattcaattaactgttgcacccacgtttttggtatttccttgcctcttcacctgcagattctgtcaacagacctagtgtgctttattggaatatccagagtaggccatgtgggctgagtttagtcgaagaaatggttgatgattttttaaaaactttcatgtcatgttcgttcccaaaaggagagcatcagtactaaaatgctcaggaaaatcaaaacataattgtagcttctgaataagttaatttttaaaagattacctcaaacaacaaacaacccagctcttgatataaaatctggtgacttagagattgtatgtgtgtgtatgtgcatgtatgtgtgtacacacaaaacacatgttttgttgtttggagtttttctttccatttttattttaggtttgggggtacatttgaaggtttgttacatagataaacacgtgtcactgggattcgttgtacacgctattacatcactaatgtattaagtccagtcctcaatagttatttttcttctccgcttcctcctcccaccctccttcctcaagtagaccccagtatctgttgtttccttctttgtgttcataagttcatatcttttagctctcacttataagtgagaatatgtggtgttgagttttctgttcctgtgttagtttgctaaggatggtaacctccagccccatccatgttcccacaaaagacatgatcttgtccttttttatggctgcataatatttcgtggtgtatatgtaccacattttctttatccagtctgtcattgatgggcatttaggttgattccatgtatttgcttttgctgggtcgaatggtagttctgcttttagctctttgagaaaacaccatactgctttccacaatgattgaactaatttacactgccaccaacaacgcataagggtttctctttctccccaatctccccagcatctgttattttttgactttttaataatagccattctgactggtgtgagatggtatctcattgtggttttgatttgcatttctctattgatcagtgatattgagctttttttcatataattgttggctgcatgtatgtcttcttttgagaagtgtctgttcatgtcctttgtgtttggtttttttttttaaataaaaatttcattccagtgtaccaaattaaaattgccaccagtaaatactttaagcatcctttcctgtgtatgagattaggccctttttaccatattttttaaatcttataaatagtctcagagggcttttaatgtaaaataatgattgaaggtcaatcaatccttgtcagctaatgatatgtttctaggtacttttccctttcctcaacatttttatcaacacaattcttatgtaaatgagttctatttaaacagtttagtctggtttagtaaggtatcctgtagaaaggaagaatgtgtcaactctggaagtttagcacaaccctattcttttaaaataacaaatagtgaaacacttcctttttttttttatgaaaactgttttcatgttgcagggttttacccatcttcaagtaaaataatctttcaggaattaggcccaacatgtctctctacataaacaagattgatgttggctcttgaagtttttcgagagtatgttgtttgagttaattgaatttattgtctccaaattggttttcacacttctctagtgcagtctgtattctgttaattaaatttatgaaactcgtgtctcacattgaaagaatataatacagatagataactagactcccagatagacagctagttatagacaaattttttagcctcctcagtagctgggattacaggtgcttaccaccatgcccagctaatttttttattttttagtagagatggggttttgccatgttggccaggctaggcttgaacacctgacctcaggtgatccacccgcctcggcctcccaaagtgctgggattacaggcgtgagccaccgcgcccagccgagtttgacttttttaaactgcacattataagttagatcatgcagtatttatctttctgtgcctggcttttttcttttaacataatatcctctagggccatccatgtttttacaaataacaagattcccttctttttaaaggctgaatagtattccattgtctttatatgccatattatctttatccacacatctgttgatggacacttaggttgatttcttggctattgttaatgctgcagtgagtatgggagtgaagacatctcttcaacgtattgattttatatcctttgaatatataccccatagtggaattactggattatatggtagttctattttttaaattattgaggcactgtcacactattttccataatggctgtagtaatttacattcccaccagtagtgtaccagggttcccttttctccacatcctcaccacttatcttttgtgttttagatagtagttgttctaacaagtgtgaagtgatattttattgtagccttaatttgcattttcctgatgattagttatgttgaacattttttcatacacctgttggccatttgtatgtctgctgttgacaaatgtctattcaggtcctttgtccattttttaatcaggttatttgttttcttactgttgagttgtttgtttcttatatattttgcgtattaacctattatcagatgtatggtttgcaaatatattctctcattctctaggttgtctcttcactctgttgattgtttccttttttgagcagaagcttttaagtttcatgtaatctcatctatttttgcttttgttgtctgatcttttgggtgtcatatttaaaaattcattgctcagacctatgtcaaggagctttctccccgtgttttcttctagtagttttacagttttaaatcttacatttaagtctttaatctattttgagttgatttttatatgtagtgtaatatgaatgtctaatttcattcttctgcatgtgaatatccagtttttctggcaccacttactgaagagactctctttttcctccttatgtattcttggcatctttgttgaaaattagttgaccataaatgtatgtatttgtttctaggctctcagttctcttctattggtctgtgaatctgacaatatgccagtaactctgctgttttgattactatacctttgtaatagaatttgaaatcagatagtgtgatgctttcagctttgttctctttgctcaagattgctctagctgtttgaggttccatacacattttagtatttcatggttgcatacaaattttagtattgttttttctatttctgtgaaaaaaaatactgttagaattttggtagggattgcatagaatcagtagatcactttcattagtatgaacttaattaaacaacattaattcttccaatccatgaacagaggatatatttccatttatttgtgttgtcttcaatttcttttatcaatgttttatagaattcaatgtacatatctttcatctctttgctcaaatttattcctttttgtagttattgtgaattagattgttttctggatttttttcatatactctgttgttagtatattgaaatactactgatttttgtatgctgattttgtatcctgcaactttactaaatttgtttattagcagaactatattcttaatcatctcgattatattcaccataaagagtaaaacaagaataaacttgcttcactgtaaaatacttataatctaaaggaatcgactcatatgtttatatttgctacaaatggatttttctaaattacaacaacataaaagccaatttaatgtttttgtagagatattattcttaagagggtagaattgcatgaattctgacctttggggaagatcttgtatgataatggtttagattaaatattggccaattctctcaaattcttgtgtgagatatttagaagttaattacttaaaaatctggtaacaggtatattgttttgttttatattctctatttaaaagaaactttgaatgcatttttaattaacctctatagatatatacaagttgtacatggtcctttcagccattttcctacattgtaccagaattattagaacaaaactggatatcccatgcaaaatttaaaagttggacccttaccttacaccatatgcaaaacttaaaatggatcaaagacctaaatgtaagagctaaagctatgaaactcttagaagaacatgtaggagaaaaactttcatgacattggatttgccaacaatttttttggatatgacacaaaagcacaagcaacaaaagaaaaaatagatacattgaacctcatcaaaattaaaaaccttttatgcatcaaaggacacaatcaagagagtaaaaatatgggctaggcacagtggctcaggcctctaatcacagcactttgggaggcagaggtgggagaatcacttgaggtcaggagtttgagaccagcctgggaaacatagcaagaccctgtctctacaaaaagaaaaattaatgaaaagataacctatagaataggagaaaatatttgcaaattatacatctagtaaggggttaatatccggaatatataaagaacttctgtaacttaacaacaacaaaaaagcaattaaaaaatgagtaaaaggcttgaataaacatttcttcaaagaagatatacaaatgaccaataagcccatagaaagacactcaacattactcatcattagagaaatacacatcaaaccaccgtgaaatagtacttcacacccactaaagtgactattataaaaacaaaacaaacaaacaaacaaaagatggaaagtaacaagtgttggccaggatatagagaagttggaactcatgtaggttgctggtgggaatgtaaaatggcacagcagctgtgtaaaaaagttttgtgattccttgcacagttaaacatagaattaccgtatgatctagcaatttaacttctcagtatataccaaaaagaattgaaagcagggactcaaacagatacttaacaatgtttatagcagcattattcaaaatagccaaaaggtggaaacaacacaaatgtccatcaacagataaatgcataaacaaattgtagcctgtacatacgatgcaatattacacagcttaaaaatgtaatgaaattctgacacatgccacaacatggatgaaccttgaaaacattaggctaagagaaataagctagacccaaaagcacaaatattgaatggttccacttatatgaaataattagaataggcaaattcatagggaaagacagtagagtgacagttaccaggtgctggaggagagggggaatggatagttttggggtacagagttctgtttggaatgaccaggagttctgaaaatggtcacacaacattatggttaatgccactgaattgtgcccttaagaattttttaaggagtaaatttcatcgtgtgtgtattttgccacaattttaaaaacatcacttttccataaaaaaataactagagacccctgaacatacactgtggacagattttattaataaatcttatggtttaagtatcaagctattgttaattacttctcctaagtaaataaacctaatacctggtaaaatgatgtctagttatgtggttgcagtatattaaccaaggaggactcgttgttttgaagcaataataattataactaatgtttattgggtacctagtgtgtacctgacactgttatgttcttcaactattttagctctttaattttacatcaatactattagatacttgttttagccattttatagattaggacactgaagttcagagaagttaagttattcttctgagtcacacagctaaatagctaagtatcaaagacagttgttctaacataaggtgactaacttccatgcttgtcattttaaccaatttcaaatttcatccatatttgctttgagatacctgaaaaatcagactattttatatagttttataagaattataaagcttagaaatgtaaaattttatgtggggatctaagatttccccctgtataacaggatcatagatgtcagatcaaaagatctcagctggccgggtgcagtggctcacacctgtaatccctgcactttgggaggctgcggcaggcagatcagctgaggtcaggagatcgagagcagcctgggcaacatggtgaaaccccgtctctactgaaaatacaaaaattagccaggcttggtggcgggtgcctgtaatcccagctactgggtaggctgaggcaggagaattgcttgaacccaggaggcagaggttacagtgagccaagattgcaccactgtgctacagcctgggtgacagagcgagactccatctcaaaaaaaaaaaaaaaaaggaaaagaaaagaaaaaaaagatctcagttgttatgtttggggtctgaacatgtataatgttcacggcttgactctagtctgcttttttggttgtttgatctcagtgttagtgcatctgattttttttaagtaattcagtcagtagacgtttattgcatgcctgctatatgcatatactctgccaagtcctggaatacagtaatggacaagacagaactgacattgtagtagttgaaggaggaggggatggataatgagtaaatgaccaaagaaacccagcaaatcattttagttctagtgctatgaagaaaacagggtgatatttggtgcgtaactaggggctgatggctgatttagagggtgatcgggaatggttgctatgatgtttcaggagaagaacctaaatgttgagaagatctgtgagtagatattccactcagtgtgaacaatgggtacagccctgagaaaatgtggcttcaatgaggagcagaacaaaggccagtgtggcatgaaacatcccaagtcctagggtgcaaggatatgaaataatacatgagataggtgtgggccagagctcaaaggccttgtaggccagaaagaggaatttagatattatgctgtgtgttctagaaaggtgttggaagatttaaagatcggaaatatgaaataatccgatttcattatacaaagctctctcttgctgcagtgtggcaagggattataggagggcagaatggaagtggaggaaaatggatattggaggagtcaaagaaaaaaaatgacaatgatttgggcataggtgagagcagtagaggagaaaacttatgtttcatcttcaaaaggtaaattggacttttaaaaatgactgaactctacacatatattgcaaaagtacaaagaattgaacattcagagctttaggaagatacatggtttttaaaagaaggggattcctgctctttgaactggaccagtattactaagctgattcacagtcagaaaacagtctcttttgctactttccattgtgaaaaagggagagacgtttcttctcttcagccttccccctttagcatgaaactctcctattcttagtggcaactgaagataatattgaaaagaaaaaataataacttcacagaataaataatagaaagtaaaacattttacaatgatgaaaatatgtagaaattctgattgttattttagaatatcaaataacaccacaaaatcttccaaaagtgcatctaaactctgaactcattaatagcctctactaattttttttctattctgtaggaaagcagactgttgagttcagaaaaggccaggaaagtgaatttatcctagttttctgtcttttctccatgtttcaacattcccaaaagtgatttaaacctcaaattaaggtgattctgtcatctgggtggcaaagattatgatctatggcatcttatcttgcacacgtgtgttcaattattcgttttttttgtgtgacttcttttttttttttttttgagacagagtctcactgtgtctcccaggctggagtgcagtggcatgatctcggctcactgcaacctctgcctcccggggtcgagcgattctcctacctcaacctcctgagtagctgggattaccggcatgcaccaccacgcccagctgatttttgtatttttggtagagacggggtttcaccatgtgggccaggctgttcttgaactcctggcctcaactgatccacccgccttggcctcccaaagtgctgggattacaggcgtgagccaccatggccagccttttttttgacttctgcgtgaaagtaactcttctaagcatttggcagccaaaatagagaggtattgtacagccctttgaataagccctctttaatttgttgtaatgggtaaatttataggatcatggccacccagcttcacttctaatcaccaaccccctaccttgcctgttctctttcacaaaccaatacactgtggtgctggctgaaaacatttctaatcatagacttatctgcagctggtgactatttgtggtctgacaggagattgaccacatcctgtggttaaatgttattattttttctgaagactctttgaactgacttaactgctttcatttgatgtttcaactgacttatctgtagtaatagccaagcatgtatgctttgaaaatttgaattgatatcctttatgtatcacatggatatctgttatatccgttgatgtcctattacattttgtattttctgagtattttttaaaatttaggggccatcatattcctcatctaatataggctctaatacatggacacttggtatatacttgttaaaagaataaatatgcaaatgactagaagaataggagttttaaatcctccttttaaaggaaaatgttaataataaaaaatacccgtagttccacttcccttttttaactgatttcatattgcatcttccctttcgcatactgttcaattcaattaatgttgattgagctgctaatatgtctcaggcaatgtgttaggctcatgttaggttcaagggataccaaaaataagtaagacatggtccttgcctttccttatcttgaggtttagtaggagatatgggtatataagcagatggtctcggtgtgaaatttaaatcaaacaagcacagtatgctgtgaaagcacagtgggtggatttcagagaagtatttctggaggaaacttgggctctttcttgaagaatgtataagctcatggaaaattaaatcaagattgcctagctaggcgttaccagcaaggaattacattaaaaatgcttggtgaaataggcaactaaccaaagttcaaggtaattggtgtggaattaaaaagggagagagctcagtaagagtgtgccacgttatggaggtccatgcatgtcatggtaaaggcctgaaactatgtactctaggccaatcagtgttagctttccaaggaggaggtcactgataccttgaaactgagctttaagtatgcgtatgcaaatgaacctagtaaaattgcttcagtataaaaactcttaatatagggaacattttataaatggaaaagtagacatttaatagtcacaaatgagagtttaaaagaaactagttatctccatcaagagtctctatttcatagattctctaaggattttttaaattctaggttagcttccttcaacactatcagtctgtaatatttttcactaagttccctcttccccttttctgaagcttcctaccattaaaatttgcttaagtgaaacataaatctcgacatgaagtatatttgggtgggataggatactgtgccgaagttgtttatttgtactgttcttaacacaatagttgagtacagatacactccagacttgaataatgtggctaaatagatagtctccaggtgatcaactaaaaataattgtattctgtcatcacttctcccattgatcccaagaagtgcctccaagaaaattacctttccttctccagtattagaaatctgtgggatagcaccatccaccaaactacccattgaaccactatcttagagttggaaacactgaaacatcctcatttccttcttagggtccagcaaaatggttcagtaccttggcaacacgcccttccctatagaaccagagggagggagtggggaaagaaaatataggaagaaccaaaagtgaggattctatgagagacaaagtgaaagaaagctctcaatgaaagaaaacccacacattaaatggctttcagtacccagatctagagtgcctggtttgcattgtagtaacttaacatttgtcagtaatgatgcctacaaatactgtgtttattatgtgtgtaagaatgcattttattttgtttttttgtttttttgagatggagttttgcttttgtcattcaggctggagtgcaatggcgtgatctcggctcactgcaacctccacctaccaggttcaagcaattgtcctgcctcagcctcctgagcagctgagattacaggcacccaccaccaggcccagctaacttttgtatttttagtagagacagggtttcaccatgttggctagcctggcctcgaactcctgagtgtatctacctgccttggcctcccaaaagagctgggattacaggtgtgagccactgtgcccggccagaatgcattttatttttaagtccacagctaaagattatcttgttgtattgttgaatagtgacaaagctactactaagtgtgaataaagagtttgtaattttgcaggcattcattaaattaaataaagccatatatgcctataaacctaataatcttctttaaaaaacaatttattgaaccaaactattaaaccaagtttcagtaaattagttgcctaacacttgcacataaaaagcaacaaatgttttttgattcaatgaacaattgattattaaaatcaagcacatttgtcttactgaactgttagaattattaaaaatggaagcaatgtaaggctgtatagatctttgtaggctgcagttaagtataaatctgttgctccttctttcgtatgttagcctgaaaaagaaaaaagcatgcacttagaaatcacatggggaaattttataatttagatgatttgacagatgataagctgtctcaaatccctttaagaagatagtgtagtataagtaacacacaaatacatgaataagtgaataatttttaaattgacaataatttgaatgatctagacttacctcaatctctgtattctaaataggcattgtgcttagaaaatgagtataaataagattttagataattacttaacacagtaatttgcatgtggcatgcctctgcttggctgtttcttaatggagctctggcagaatttataatttgtaaaggagtcaaataagactttatcaccttttacttaaaagaaatgtgttttcatttccttagaaaaatattccataatttagaaatatggctattcagactagactcttttcagattaaattgaattatgcagctttacagtgatgctttttcttttaattcattgaacattttatatccagtaaaaagtcagctaaaattactagagcaaatcaggcttttctttaatgcttactaagtgggcgtgtatgcttgtgtttacacgtgtatgcaggcacacatacaataaaccatttggtaatattccagagacccaactatattgccagtaaaaaataagaaatctgttgtctgatgatatgtgtagtacatggcaacagaacacttaagctgaagcatgaagaacttgtgagcatgaatgttaaacctagaaacaattactaagtcacttcttagctactgacaaaatcaaaaggttgggaataaaaccggcaataactcttgatctttttttaaaaaatggtattactatctcagacatcccttcagaaagcatcgtttctgttaagcctgtgtagagattaatctggcattatctttttaaaaatgtctagattgacttaagcctttattcagataaatgggaaaattttatgtaactagaaatgagctactagttttcattgtaaaacacagtcactagagtataccaaaaagaatgttgagcacatttgggaaaaggtagcttttgtaagcctttttatttgtttttaagagacagggtctagccctgtctcccaggctgaagtgcagtggtgtgatcgtagctcactacaacctctaccctctgggctctagcaatccttctccctaagcctcttgagtagctgagattacaggcatgcccaggcatgtccagctaatttttaaattttttatagatacggggtctcactatgttgcccagactgaattcctgggctcaagtgatcctcctgccttggcctcccaaaatgctgaggttacaagcctgagccaccacacctatcttgtaagtccctgtagtaataaaatatatcctgaatattgtgaggaatgagaggaaagttagagatcaaataaggggaaattgagattcctgtttccaactcttttgttccttttttctctcctctttgcagttgaactcctgtttcttcctaggtgttcatgtctcacatttcttcctggccaactcttcctcatttatgtagggtcctccttggatagcacctcctctatgaaagtttctctgacccacagaaggaattcattattctctcctctcttttcccttagcctttatgagactattttttcctcttcattttttgcttatcctttgtatggagtaacttcctgaatctatatagcagtggtgtggagccctctaggaagcataggaaataggggaaatagcaagaattcttcataaactgcaataagtgacaagatgcagcaagactcccagccttcctggctggcatggggcactgattggtgtaatgttccagtgtggatgttactgtgtattcatcagtgagtctacacagatagagtccacatgtgtcccagttgtgctaattcttcttcctttcatcatgctaaaaaggtaagtattgggtgaaacttttttacttacaagtatacatatttcctctgtaaatgggacaattcctgagtctaggatttgctaggtcttaaggattatggctttaaaaatagacctatgctttaaagcatgttccacaggaacataattttttatttatgtttctattttctccacgagactagatgcttgatagagcttacaacttgattctttatattcttgtccattagcatgggcaaagctcacacatattatgaataaagttgagtaatatttgtagaattagtagataaacgacactgcttaatgacaaagtttaactctccatgaagctatttgtattttcaggaaaaaaaaaaaaatgctgtgagaacaaatgagtcgctcactggagaacttggtaggggatgtcctggtatccgcaaaacaagaaggaccatttaaatagctttcagccgactgtagcctgagcccttcctttgtaagcatctacacactcacagggatcaacagtaacagtatctcctctccagcagaggatctgttggtcttctgagtattgaagactgataaatgatagaatctcttcttgtctgacatctttgaaacccccaatgttccagaacctggaaaacctgttgtcgtataggggcgtatcaacaaatcagtggcttcactcatctgtcacctctatttcaggattatttctgaagtattgatgattagaaatatgttagaatctgaactttggggtataaattcacccattatctacagtagctttcctgctttcataacatgatctacacattttgtggctaaataaatgctcatttttctgatgaccaaagctaacttttagatgaattactgatacacagaaacgatttcatcccaattaacgtgtgaaacacaatttaactgtgatgatgttttcagtcaaaggcagttgccttggcattaacagtgaaatcttacatgcacaggaaggttcagcctaaccctggtaggattcctaggctgtttcagtacatgtgacgttaataatatgtagcttatcaggtaatgatgctcagttagtaacattcttcagtgagccaatggcagatatttttaaaagtgattataatttttctctaaggattacccaagcataataaataacaaaatatgagcaaaaaatgtgataatacaagggatttttaaatggcaatgattttaacatatagataaataaaaataatcatgtccatattatagtgtttgaaacttagtctagtgaatgacaagagatagcataggtattgagattttaatttatctgataggcttaccgaattccaatagttaatacataattcctctgtgtattcaaattgtttctaattagatggacttctctattcttttaaaatatattttgtaaatattcttgttatctttagaatgtctgtggtgcttgcaaaaccatatacagcgatttctttcatttgtttttttttaatgcacagtagagtatataggtcagataacgtttgaaatgcatgacatgttagtaatcttccatttacctctttaaattaatattcgattttagtatttatttatttttgagacagggtctcgctctgtcatctaggctggagtgcagtggtacgatcatggctctctgcagcctcagcctcgcaggctcaagcgatcctcccacttcagcttcctgggtagctgggactacaggttcataccaccccacctggcaggctctcactatgttacctaggctgtttttgaactcctaggctcaagcagtcctcccatctcagcctcccaaagtgcagggagtataggcgtgagccaccacacccggcaaaatcagtattttataagtgaaattacatatatatatacacacatgacatagtagtgtatgtgtgtgtatatgtatgtattacagttgttcctcactatccacagaagattgaatcgaggaccctctcagataacaaaatctgcagatactgaagtccctgatataaaatggcataatactgtatttgcctataacctatgcacatcctcctgtatacttatttatttttgaatactatatttttgatcctcagttggttgaatctgccattgtcaaatcctcatatacagagggccaactgcatatataatttaatgatagcaaattactaaaaatatcgaggccataataaaaattattgatagcaaattactaaaaatattggggccaataaaaattaatgacttcaagaattaaaaacagttactatacatatatgaaaattaactcttaaaaatgtgacttggttattcagttagcttggatagatgaagcagaaagttaaatggtgattatgaaaactgaacttttgtatatgtggtttaactacattgtgagttacgtgagtgtgttatttctccttttgtctcactactttaatgggagattattgttgcccaactctgggtctagtatgtaaccaactcttttcagccagattcctcacctccaaaagagtgtcttgcatctttgggtctgggcccaggttcaactccaagaactgtacatctcagggaccaaaggttatgcttggcagggaagcctaatgccccatcagggcactcactaatctatctgagtagactattagtgtttttctatttttaaaatgtgttttatatatgcacaggtactctggtatcagctgttgtgttttccaaagagttgagtgcattattatatcaactcatccatgctcataatatacgtatatgtgcccaggggaattttggggagctaagggtaggactggtgcaaaactatgcagttacaaattataggcttctgaagaggtaatctgactcagtaaaccagcctcaaatcaaaaaagataagtactatggtaagacataagagctaatctgcaaaacacagcttgcacagccctgaattcattattaagatttccataaagacatagaaaggatgctataaatgactgtcacctcacagacactgcagaaagaccacttactttcaaatttgacattctccttctccatgagtgttcttgggaattcccggaagagagacaagcatgtgaaaaggccctagggcaggaaggagcttactatgcttgaggaactggaggaaggccatcacaactagagcaagaaagagagggcctcaattggaagataggtgggatacaaattaagcggagacatgaaggtcatatcaggagttggcctgaaaaatcagtgtacagccattgaagagcttcatgcagacatgtgacaaaattggatgtacatttaaagctattgtgtggagagttgatatgggggctggggggcaagataggaaatggggcccattaggagttattgcagtggtacatgtgagagatagcagagacttaggctggtgacattgtagtggagatagaagtcttgattcaagtcctgttttggagatataatcagcaagatttagttagagatctgtacctacataatagaaaaagtggttgggcctcttcaccctgaggtactagctcaaataacaggtcaaaccagaaaatcatgaagtggtgcttatagtttcattcccccatttaattatttaatcacttattcactcagaaaacatttattaagctcttcctgtgagccaggcattgtgtaaggtgctgaagagacaatgtcccattatcggtcatgtgctctgcctgacagacccttacaccagtggttggcttgatttactttatatcttagaacatggtgctaaggagacccacatttttcattgtatccccatagactttgttcatttagacacatggttcccttcaggggtctttggggagcccctggggtaactagaaatggatggacttggcacactggttggcacgctgacaaggtagttctgccgcacctagaacagggcctggtgctgacagtcttgccttatacaggacatctgcacactcgtaatatagaatcatccagccaagacacccagtaacactcctactaatgagccctgatcagcttcacactgaccagtgactactctcctgccctcaccagtactcaaactgtctgactttaatcaatgattaaagggcacataagtgggaattctttatgtctgtattcttcccagtctttctgcatgatcctttggggtattccgagccccttgtcttacccttctctgctccccaaattgtgtccaaggggcaagctagtagggcagcacagacaagaaaaagctagtccttttcctttcttttgtgtgtgttcttgggaaatgaccttaatctccattactttcatttccttgtctataaaacagaaatagcactagtatctacttcatagggttgctgtgttgcaatctctagagcacttagaacagcacttagtcttggcacattttcttagtcttttgggctgcttaacagaataccatagcttgggtggcttgaacaacagacatttctcacagtcctgaaggctggaagtctgatatcagcgtatcagcgtgccagcgtggtctggttctggcaagggctctttcctggattgcaggctactgactttttcttatatctctacacggagaaaagagaggagagagctctctggagtccctttggtaacgaccccaaatgagggctccaccctcatgacctcattacctcccacaggccccacctcctaatatcagcactttgggagttaggattttaacctattaattggggagggggcacagatatccaggtagttgcacacacaataagcacccaatgaatatttattgttattgttattgttcaacaagtggaagacagtgtgttggatgaccatgcaggtgacgcggatgaatctgtcaccattacaacttctgccttcatcactaaatgaagagataccaattgcttaaatgcaaggcagcaggagatatgtttttttacaaataaaaatctgattgtggtgattcttcgcttaactgcttaatgaacctctgttaccactgctcaaacgcttggatttcaggtctggcaatctcatctcactaggtttgttcttcagctttaagttaatttcccaggggaaattactcctttttccagagttagtcccagtcctaccttagcaagattgcctcctacttgtgcattaactgggtgccgctcttggttcctgtttcccatcagctccaacctgaagttcctggctttcccccaccacctcgagcactgcttttaatctccaagtcagtgctattccttgggttaatgtggcaccattttattttttaaatcccagtctttgactctacttgctgctcagcctcatggtcaaagatctattactgatgaaattttacaaatgttgtattctggatgaaattaattttgaccatttctgatgggaattgcaaattgtacactagaaacagaagaacaatttattatacagggtaataatacagtgtgaatcaacatcactataaataacaacagtaacaaatatttatctttctgatacatatctcattttttcatgttctagagttatctttttttttccttgtgagccctaatgttctggagatttcataaatggtaattaatgcttcaaatttataattgatatccttcatatcatagtagaactctgacatcaatttattcacaaaatctctaattagttaattaacaatttattcatgagactgatttaatttgggcattatatgaaatttcacaaagcacagtaaaaattttcaaaaatatctaataactatggcttaattttgtgttctattaaaaaataatgtgagtataaaaatatgttaaagttagaaaattcagtagcttctcttcaagacattgaattctattataactgatattttttccttttcagacatttatcatacatatagaagaaatgataaaatggtttcatttgtgtaaagatatttttaaataatgggacgaatgaatactaggagagagaatgttgtcagacacagttaactacataatctaaaactcaacatgaaactctacacccctcaaatttgtctaaagctattatgatttattgaaaactaccagaatgctagtccccctgactttttaaatattctcctttaaatacgaaccccttaggaaataaaatctattgccatgtatagctaaactttggtatttgtatgattttttttaagctcatgtaaagttcagatttacagtaaatgaaatggatagcatgattctctaactgggttaattcatttaatcattacttcaagagtcattaattaagcaaatatgtattaatgctaggttagatgctaacataacaaagatcagtaagttgagagcccagtgatccaggatctggtatttttcataggccaaataacatgtttaaggagcctataaatagcagcaattttattaatgtcagtagactttaatcaatgtttattaaacattttaacaatccaaaattgtctgtaatgtatgtaggttttctaggtacttatagtcaaaaacaaggataactacgagtatatattatatctataatacatcagtcacattcaaaggaagaaatctcacaaaattgttatcgtcactatacaggcaacagtagacttgttgaaagtgttttttgtctaactattttgcattgtaatttatgtaaggtacattgtgtgattgccttattatagattctaatcggaataaatagctatgctattaaatggaattacgtacatgtaaccatggtttttagaacatgcctatatgaagatttatatgataatcttaggtaaacattttatatgtgaaaataatagaattggaaataatgacggacgttaaaggactttgaggtatccagaatgcaattaagagaggcagaagttgcataaatgttcagacatgtttataatttttagcatcccatcttttccttttggaaaggagaataagggagagaatactaactggtgatctctaaaacatgctatcctttgatgatgtttcagaacttaataaagcaaaaaagcaaacaagtgaacaaaaagaaaaactaatttagcatccttttatctcactctatagtattcatacatgaagctctatacctttacttgatgcttttccaaatgactcatgccttctaaactggaaagactggcagtgtcattattggaaaatctgcactgtggagtggttgagggcatgagctgtggagtggatggcctgcctgtgtcactaaacgctgtgtgatcttgggcaagttacttaacttctctgggcctccattttctcatcaataaactgggaggggaattgctcggcgggcaattgtgaggatttataagttaatataaagcttagtacactgtgtggtttattgtaagaactcagcaaatgttagctcttacaaggttaaaccccaaagatgaaatgtccttttaaaatcaagccagatcatagcagaggaagaaatggttgataaatgagaaaatgatctacctcgctaataaccaagaaattcatattaacttttccacaattgaataggtgttctgtatttattaataataactattattagtaatgatttgggtctgtgagcaccttcacaattttcagggtgcaaccattttggaaggtgatttgccctgtctgctctacaaaattttaaatgtgggtactctttcacccagtaattttacttgtaagaatttctctttcagagataccctctaatatgcacatacacgtgtgtgcacgcatgtatgtacgcatatgcatatctctattaattgctatgttacgttaaattaggggaaaatgcttctgatatgacatggtgcccataatttcatgtaaaatgacaaatacaattaacttaattatttacatatagcacgtgatcccacttttgtgggaaaagcatctatttttatgtgtgtgttttcaaggggaaaaatacatgtttaaggatgcacacatgcaaaaatagcaaaaggatacatggaaactcatactcaatagctatgatgtgtatcatctccttttgttcagaaagtgtttctaaactgtgccaaaattttgtcagatatcattaatatttgaaaaattgaaatgaaaaccattttctgcgaaagatattgcctactatatttatggcatacagaaaattgtgacctcatgtgtctaatgatagacaaataaaaaagataaaaatgtttagtgtagtatagatttgacttacgaacactgtctcatgttttaaaaagttttgattttttttaaatcatctaagaaaaacagctatatgaacacatttgcaaatctattgatgcttatttttttttgcttctttttaaaagtgattatgttttttatcttcccagagttactggaggtgaactgtttgaagacatagtggcaagagaatactacagtgaagctgatgccaggtaagtgacttgccctgggcaagatacaagactcaacattcaaataatactttttcagcatatttctttacaaatgcatgtttgtacaaacaaatgttttaaggatctccgggatgattcttagagaaaaaaaactccatgaatctggtctatatttttatctagcatctgtagttagattacatattttatcaaaaacaacaaggaaaaacaaaccaaaacaccccacctaattggaatgacttctgctaaagcaatatattttttagtgaaagtcagagatcaaagattgaaatcctctaatccctagatagattctaggttgcccagtggtagccagtagtcacatgtggctattgcaatttcaattaattaaaattaaattaaattaaaaatttatttctcagttggtctaaccatgtagttggtctagccaactgcctagtagccacaagtgtctagtagctaccaattggccagaccagatatagaacattttcatcatcacagaaagttctactgaacaatgaatatctaatcagaaaacagaaacagcctgaaaaaagtctcagtggtctctttaaggaactattattagctaattaactctttggaaatttcattaaaacccttgaacccctgagttgaaatatatttattcaggcatttaagagagttcaagagtaatttttcaatcttgttaattggcaaaatctttacaaaagtttaaaaaaggctaagttttttgtctaatttgcaacttcctaggctatccaaggcaacacttttggagtggagtaacattaaccacttgcttagatgttactggattgcatggtgtaaattttcctgtgtacttttatatattctgtagctgtcatttatttttaaaaatctgatcaagagtgattggctcattattagcaatgtaaatgagatgtttgggagcagagattgactctgctcccattctccaatgccatcagagcttcccaaggcttgctaatcccattgtagcctgaccctcaacagatgtccagctgatattaaggttcccagcccctccttgccctcagaggcacacttctaagtttctaatttttcttcttggtttaatgcactgtttatggcactttgtgaatctatctgtacatgactacgctctaattttttaatggaatttttatggccaaagtcaaatagaaaattctgtgtaatttatactatgatgagtgaatcatcacttgctcagtttaccccaaatccccacattagggtcctgaaaggggccatggggaacctctggaagtagctatttggccacttgccaagaaacagtaatacttttaatcaaggtactaaactagggaatttcattaatgttacccttcaaagttatgttaagcaggctgttacttggtttgaaaaatactggttgaaattaaaatagagactatttttactgctaaagagctctaagatattttttatgaaagctctccgataaaatcaaagagaaggaacattcccttctaaatacataaagaggctatttctcagtcagatgtggtggcccactcctataatcccagaactttgggaggccaaggtgggaggattgcttgagcccaggagttcgagaccagcctgggcaacatggtgaaaccctgtctctgctgaaaatacaaaacttagccaggtgtggcagcatgcacctgtagtcccagataatcaggaggctgaggcaggagaatcacttgaacctgggaggtggaggctgcagagatcatgccactgcactccagcctgggcgacagagtgagaccctgtctcaaaagaggctatttgattgtcaaaaaattgtaaaaattttttactagttctcaaaaatttaagaattgaatccattctcactagtaaaaaaaatggtgaagtccatttagtatgtgttattgtttacttctttatcttctgttattcccaagattcaataatttatgcttgttgtttgagaacaggaagagaaatattcttaaagagtagtgcaaagtgaacattattgtaaaagaaaaaagattcctatggtttaaaaataatgaccaatactcaaataaacaatgtagtcaacagcaatgaatgtgagacgcttttagtggtattgttaataaaagagctagaaaatcatagtcatgatcaatttttaaaatatttacattgtaataaatcagatggtgattacttttttaaattcaagatttttctttagaataatattattttatacattaagtggttgaaaatgtccttattaaaatgtttgcttcatctttcaatgaataaatgtagttcaggatgtacttgcatttgaattgcacagtgaacttatacaaaattcatcagtgtgatgtgttctgcattattatatgtcagatgacagttcacaggaccttataggtgccaaacaaggatttctcctctctaattagcagtcccatttgatatcagtgaacccttaataagaatagcataaaatgtgcattttgatatagtatgaagcaaaagtttttcttcactgaagtgtatggaagtgggtttaataattaccaatgctccaggggattgtaaatttgtatttatttattctttgaaagctccctagctcttccccaaagtattcttacactaaagaggggtttattttattcatgagtttactttaaattctccctttattgttggagacttgcatttgttttcctgttatatactttacaaaaagcaacgcttctaaggcgaaatggtaaatgtgtccctccattttttttgacccttgtttcacctgccacttcatctgtgtttaccctcttgtttcaacacctgtttaattgtgacctcagattttaaacagtttagatgtgtataagaaatacctggaaattttatatctctgaagaattttcccagaacattatgggaattctttataaatttttctttctaaatatggagattttaccttcttatacatattatttaatttgtacacttacaatgaaaacaacacaactcaaattgttttgtctgaacatgtcacaaagtctatgttggatgtcatttttgttagaaccaaaattagctttattcagctttatttgattccaacgtaaagctaaaaaaagtgaagaaatataatttttgtttgtttgtttgtttcattgggactttcattttatttcatattcaatgtgattatgtgcctttaaaatgttctcccttccattctgcccttgtatctttgcagtcattgtatacagcagattctagaaagtgttaatcattgtcacctaaatggcatagttcacagggacctgaaggtcagtatatggagtccataaatctgaatcaaagcagttttatttttttttctggggaaagggcagagggtgggtatttaaaatggttcccttgcctttcccaacttgtttctaaaatgagtaaatgatgaaatgataatgcatgatgcctcttccagtttgctcatctacaggctaaatatacatcatagcaaaaagggaagaatactaaagaatacaacctgctaagtttccaagcagtaaactacctaccaaaagggattgaggagcaggctttcttgaattgcccagcatttgcctggagataaacttggcctgtgatgtatgtccgcctgtagattttaaacaccacttctgttctgagaccatgggttgctgtagcagaacaactggttacgcattgctccatttgagtctgatgaacccttaggcaagagatattaattgccagctaaattaaagcacaagaagttaatgatttatcaaaaattcattaggtatcttaatttaaccttagtggtgccctgactgttaatgtgacagcttttagaacaatactggaaaaatgggagagaaaagggaaacaatttatgtgacggggtggaggcggaacaccacagctataaagattatatttgtgttccactttatttcctggaagaatttataaccaggaaatgatctcttgaatgacataaagtgttttcaaaatggatttttctagaacaaatggacccacattctggctcacatctggtaagatctgattgttctgaggtagtagtcactctacttgagcaatatgtttacatgactgaaggtggtacaatacaaccccagttgtctgctagctctgcactttaacccagtctctctgagggtatacagacagtgagtgtaagcttggaactaacacacgccccctggtgtttgcatgcagtcattgcattcagcagatcctggaggctgtgctacactgccatcagatgggcgtggtccatcgggacctgaaggtgagtaatgcggttgaagaagataaaccaccacacagttcctaatgactgttcagctgcaattatgcctgtaaaggcaaaaatatgagcaataaagttgtgtggacttattccagcacgttactcaggaactttccctcaccacagtctctcttatttcatctctaacacacacttgagacatataaatcttgatttatccagatagaaataacttcccaacattaacaataaataggatgctatatttctttccttgtaaggatggatatagcattaatgtgactttcagtagggtttgatgatcttcactctaaatttgttctgtgtacattgatcaaacattttatattcatgtgatatatacccaatattatgtaaatacttagtaaaattataaagtgtgtagagataaagttattaggtgaagttttagcctaaacgattatgtgctaaagaacctcattttgaattctgacattctctttcccttaacattagtcctaggaattctgaggacactgaggcctcttagttttttatttatttatattcctaaagaccaagataatagtgtcttctaaaactacagatgtaaagaaagcaaaacaaatttaatcatcaaataatatttatgtagcaaatatatatggatatccctatatacatattctcatttgaatgcctactgatacccttaagacttcactcagcttctgatacccttgaggacagagaatttttagatcatttagaaatgaaatagctcacaaggggagtactttttcattaattttccgtctccatttcccagcactctagttttacctgtggaatttcagaaaaatagtgaagcctagaaatcgaaaagaaaaactactggatgagtaaaatagtaaatgtgagcactgtatatagttttgattctttcaaactcagcattttctaggcattaggacaaaggtgacaaaggataatttagaatgtctaaaactatgtgtgtttagtgagaggacctagacttatttctcacgtgcagacttttctggttataaaaaaaattataaatccatatttccagtcacttaatgttctagaagactatatctctaaaccaattacatgaagatgtgatttataagcaaaacattgccttagttttctgcaatcttttgatttcatttaattctgagagttttaaatatcaaaagcaaaggtatggttaagggcattttcttctgaagagccaagatcggactgtatatctgctaacacttaccaaatgtacccattagtataaagcaaaagcagtgtgtttctttgaaaattcatgtattttacagtcacctcaaaaattctttactggccatttacagacagagccccttttgttacctctcagaacccacagcactactttccttttaagtgaacatatatgaacatgcacatcatttgtgcaattttttttcagacacttctataaatttattatttgaaacattttactccatgttatataaccataagtggactttaaaagccaagtattaaaaaatgtgaatcctcttccataactttaaagatattttttgtggaatcgtaatacaggacttctctaaacatctggaatcaggtgagcacttcaaagactggaactttaataggacatgggctgtgaagaaaaatatattctctgacgtatgagctaacgtcactaattaaaaacttaagcagatgatttttagggaggcttactagcaaaagaaataacttgctgcattccccaccagatttctttaaggcagggaaagtacttttgctctccattcttattctgattctgggaaaggacagaaatgagcttttgagagagcttgttataatttttttagttgttgtcttagtttgtgtcaaattgctgacttggatggatttcagttgagtctggttctcagtgcttgcttcagtaggccatttcataaacacactgagagagttcaaaacacgtgcattagaggcagttgatgaacctcttgaacgtgccaaatccctgcctttgttttgtgccttttatacccatgatgtatactctgataaatatattgcttgtgatagcatgtttaccaatatagtaaagttaaaaagatcaagtgctgaaattttttattaccaggccttaaacaaaaacttgcctttactattcctatgctatttatttttgtgtccatatactaattaatatgttaattgatgtgcgatagaaatgtttgatgcacatagtttaatttgtccacatcagtgagaaaaagaaacacaggaaatgtcatgtttatcatgatcaacagcacctataaggatataagtgctgtacaatttgtatataagccctctggaaccatagctgtttaacgtaatgcgatactccacagtacctaacgtaggggcttatacctggccaatacctgcagcatattccttcaatttagaaatgaatgaaggtcaaccaaaagtacatctataatataaaaggcagcattcagtaaaatagcttattaagtgttcattaatatttgaataacataaagaagataagtatatcttcagaataaagatcactatttagttgaataactgctgctcactggggctcattagacagtgggaaattatgaggacctataatcaagactgaggtacaacaggcaatttcaggatgtccctgaaacaagcaataggagaagagtcagggtggtgggatatcagcatcaagaaggtacatccatcggcaccaggcagaacctagtggatacatggaccacagccttttgtctgaggtgtgtccagtggcaggccaattaatgtagatctagataatattaggaggatctagtggtggtgataaacagtacagtacagttcagggataggactgcagtctttgggagcgtttggatcaagtcagggtcttaataagcaaaatggtaaaagatgccatttatcaagcagttaccatgtaccctgtgctgtcttatcatacaaatcttcagaacaactttatgaggaaggtgctctgatcatcctcatagtatgtaaacgaaaatttagcaaccacaaatgaaagaacttaagatcactcaactagtaaaatatgattggtgcctaagaaatttgattccaagtctgcatgcttaataactactacttctcaatttagttggttggatgaattaaaagcctgtaaagagaccaaagaatgagtcaaaacgataggaaaataattttgctagcaacatccacaataatttgtggaaatggttctaagtttagtgaatcaaaaggttaaaatagtcctgcctatgggtcttccagagataaacaaaatctgtgtcattgggaataaagaaaataagatataatgtagagtagggggcagtacaatctggtagtagacaggtgtatgaagtaaaactttttcatttagaaaatcagtaaggtagcattgaccacagcctttggaaaacgagacaaagaagaataaaatgcatttgccacatttaattagtaattgccacatgaagacaattagtattgggtgcttaaggcgggtggatcatgaggtcaggagatcgagaccatcccggctaacatggtgaaaccccgtcactactaaaaatacaaaaaattagcggggcgtggtggcgggcgcctatagtcccagctactcgggaggctgaggcaggagaatggcatgaacccaggaggcggagcttgcagtgagcagagatcgccccactgcattccagcctgggcaacagagcgagactctgtctcaaaaataaataaataaataaataaataaataaataaataaacttgatagatagatagattctttatgaagagctgagtgctgtaactcagtgttggatatttgtgaattggtggtttaaagttcaaatacaaaaagagaagaatgaatattcatcaaacattccttcaggaaccacgaaggcatcattttaaatgtgagcatacattactgagcaaaacaagaacagaccttgtgtgcatgaaaccctgctggccattgaattaaggatcatgtaaaaatatgtatgtaggcccggtgcagtggcttatgcctgtaatccaatcactttgggagactgaggcaagaggattgcttgaggccaggagttcaataccagcctgcgcaacatagcaagaccccccatccctacaaaaaaaaaaaaaaaatcaatatatatacatatgtgaaaagcatattgatgatgttcttcccagaaaggaggaagtacctcagacaagtactgcattcagaaaaatattaggtcaaagtgaggttgcagtaacaaatgacaatttttaatgtcacaagaaataaaggaatgtcagatcagatatattttctcatttaagaacctggagaatacaatttctatgacttagttgacagaataagtaaaggagatagttataaagctatgctttttcaaataactgtgtttgaaacaaggtagtaagatttctgcagttcaaatgtacccgaaatggttactaaactatttcatgaacaacaatctggataggaggctttatacacacaactgaatcttttagcaacaaattaacaccctatgaattgcctcggcagagaatgctgcctttactattagcccctattcagaagaacattacttaatggaaatgtcattggacggatggatagatgaatatgagagagagagaaagagagagattttaatgaagagaatttggagatgtgatgggaactttaaggctgtttcataggaataaattaaatttatgaccaaagtagaaaggaattagttttcagggaaggggggagatgagaagtacttagtaaattttttttttttttttgagacggaatctcgctctgttgcccaggctggagggcagtggcgcgatctcagctcactgcaagctccgcctccctggttcatgccattctcctgcctcagcctcccgagtagctgggactacaggcgcccgccaccatgcccgattaattttttgtatttttagtagaaacagggtttcactgtgttagccaggatggtgttgatctcctgacctcgtgatccgcccgtctcggcctcccaaagtgctgggattacacgcacgagccacagcgcccggccagtaaattcttgttaaccatgggtagtagatatatcaacctgtgaaatttatattttggataattataaaatcacaagtattatacttttctcagagctatgtttagataaaagtttaaggaacacatcatctgtgtatgtatatttagatatttttgaaacaaagtatgtatttgataaatttaataattcatttagccattccagtatttctttgttgagtgcctagtgtttgtcaggcagtggagaagctgtgggtaattggcactctcccactgcagttagttacactctggttctttcagtctacccagcagtgtgtgctgataatgtggaagtaaatgaataaacaggaatggaatacagaaggattcttatgaacttgctcatatatgcatagcaatagaaagagtacttcctaattgcaaacttatagcacatacatctgctagaaactccttgtgctaagtacatgaattcaggcattaattccacacaaaaataaaagctaaaatcccttgtaccatgtatacaaatgagacaagtgagcttgacattcaagcttttcaattcatgcaaaactaaaaaaaaaagaaatagtttatattggggagcttcatttgcaccttctttggcaaaagataagtgacagaaaacatgccaagcagaggatggttttctgttaaaagagtgagattctccaatagaggaaagaaattttaaaagacaaatttttagtccttaaaaaataatatccaaaggaatttaagaattaaataatatgggataataaaattagtaatttgctctttttataatattcaaaaatttaaaaacaagtaaaacacacatgattttacatatatattcctaatggttgagtcttttagatggcacatcttctagatgtgcacaaataaaagcctgatatggttaatgctaaaggctattgcctttgccaaatcaatttattaataaagattatgataattggtaaagcaaggttaaaactatgtttttttcataagttttggatatgggtagtaaatatttttgagtacttcaaattcttctaaaaacatctgctgaatggactaccttttaaaaataactttttatacaattggtggagcttctttagtatcacgtctttaaaaggaaggaattagaaaatctagcttcaggtctcagcttcatctttttgggcctccctacctcatgtagaaacggaaaggtttgagttattttatctcccaagtctcttccagttctgaaagtgattccatcaacctgcctatgtactttgagtcatttgaacagtttcaagaaaactttgaatcatattgaaagaaattgccattgtattcatatgaaagtacagaacaaaacttggaaacagttgctgctcattacagctgatatgctataaatggttgttgacactgagaccagatgtcatggaaaatcctgcatcattaggaagcagtgggggtggggaaggaacctatgtgtaagaatgtctgtgcactctatttaaaaaccaacctagaaagggattgcattataagaatctaaagatcctctcaatatataaagagtaacataatagattgcattaagttggcatcattaaaaaagacattcctcaagttacaaatattaaatgttctgcacattgaaatgaccagctgcactggaatgtagtagctaatcactaatgtgtatgttgtcaccacagaggacagagctcctatgataaaatccagtgtgattttattgtttcatagaaactgttgtgagatataatttagtacccttataatgttcatttgagagattaaggaactaattaattagctccaggcatttgtgagttgcccaagtccatataggtaataacagttagggccaggacatgaacccaggtcttcgcattctttctagatcatcaccctgcctgtttctcttacaatgctgtggtccatagtcagctagctacattagaagacctgggtttctgatctcacctgtctgattcgtgttagaaaatagaaaatcaaaatagtggaatagtagcaaataattgtgtagtggtgctcctgtctaaggaggtaatcattaattaggtgagaaatactaccctttcagcttgggtaaactatatttgcaaattatcttcctttctgtaggcattcagaatttaaccttgtcaacaaaattttgtagtacaatatatttttaacttggaagctatatgagtggtagtaattcaggaaaattagaataaatgtgcttgccctgattaaaatgttgctttagaaagtcttagtgattaagcctcccacacaatcacagaacatgataggaggattattcaaactaatatataccaaacagttatatagaaatcaaacttgtgtgattatttttaatgtttcattggagctgccctttaaagcaatcttgtgatgaaatattaaaaagtgaataatcccttaaactcatcatcctaaattttttagttttcattatataatttcattttagagcctaaattttagtaatcatcctaatttttacattttcgttatataattctgtattttaggtttgcctaaagatatacataaacatgaaatcatgttagtctcttaattgttacatctacacagtcaccttcaaataaccctgccttttcttctacataactgcagctgaacagtcttcatgagtataaggtgcaactctggtccagatggatttactattttctggatgactcacaaaggccctacagtgaggtcttcgttagttatgagtatttgccccagtcattcagaggatatgcatgataaaactctaagatgttccatttcttctgaatcggcagatacttggtgcttgaggcacaatgcacacaagccctgcccaacagctttttcatttagtgataagagtgaaaacacactcaattttttaaaaggttatttaccagttacgctgacagttgctcaacaaacttatcacctgacttcaaacacctaaaatgtgatttctaaagtgattggaactctttttttgaatgagtctgtggttaacaaattaggacagatgtgtattaacagaaatctctgacatgccagtgcttttgaaagtgaagaaagaattagaatcaaccattgcttacagtttgatgagctttttccaagttaattattccatgagttaatagttggaacttaacttcttgatcagattaggaaatgcatgaatgtggtagaccataaattttcattgcaaaaataaaatgtcaaattaaaataatttaacatgtgtagatactatagtatattgataaagttccaaataatttcaagtgttaggttttactaaaagtcatttcagcataaaagtcttttatattcttgagatatctttatcccatactccaaattaaattacgtatttagtgttgaggtggttaaaaatccctatcagccccacaaaattagaaaagttttctcacatttaccggtcgtcataatagcgatgaatctgatggcagtgagcaacaatagcctgaagaagtctggtacttgattaaaacttactcgccaacactctaatttcttgtagatttaacctaatttcttccaagttctggttatgggtctttgctaatttgcatggctggcttaattaataaattagatactggtttaggctgtgtttacacaaggtcaaaactaccaacagaattgacaaattcagtgggaaaaatttagccaatttgatttttaaagcatgacattacttgtttattaacatataaacaaaatgaatttgattgactgaatttttagattttcagacaatcgttttggcatttgtagagtccattgtttcccaacttttttcagtctgagacacacctctaaatttgctgggttttgtccccaaaccactctcccatatacattctaacccaatatatttatcgagtttggggttgtatatccttaactgtatatattaatcagtctccttttcctgatcatcttcatttcttaaaatccacaaaggcgattcatggaaattgaagactgttccctggtgcttattttcaaagtactgatgtgtcttgatgcattggttgggaaacagtggtatagacacagccttattccaagactgagttatcagcccttgcataatgataagtacccaagaaaataaaaatatatctttctcatagtactctgagatggaaaaataaatatataagtaatgctctgaatcacgctttgaagaaatgtaaattatgttttaaaagctggcttataaagaaaaaaaaaagctgactataacatttggcaaatagtagtatactctttctgcctttaagaataaacagattcttaaagacagcaattttaatacataattcagagtaagtctccaaaatttgtaccaaaattgtttggaaacattgaggaatcaaaatcactacatttgggtccaaactcttgaagttaactaggatttaatttgcacagtttcatttgccaaatgtctgtagattggtccaactcttgttattattttgccaagtttccttctgctgaaaatgtctgctctgttaggcttctaagtcaatgtccgtggccaagtctgaatcctgagcagtccttggaaacatgtgagcaggtcaagacaggtgctctcattcatttgatccctccccaagtgtattctctcttctacccagtatctctctaggacagttatgcatctgtctgaagcctgcacacatgataatatttaatcattttctaactgtattttccctgggatttaggaatggcagtctccaggaaagatgacagtgcatgaattttttccccctaatcctgtaaaatgttgttagttttgaatagtcgcttaaaataggttctcacttcagtctctttttttttctttctaaataaagcctgagaatttgcttttagctagcaaatccaagggagcagctgtgaaattggcagactttggcttagccatagaagttcaaggggaccagcaggcgtggtttggtgagtagggccccctccttcatgctacctatagtcttctggcttctgaattctggctcctaatcccacttcctagtgaaaataaaatggaaaacttcatcctaataacaatttgactaatttttagatattgtgcctttataagcatttaattttgttgacataaaaggttatataatctagaaataattcaagggaaaatattaatgggagaacaagaagacatacacttttttcttcaaaggatgattgagaaagtacattatttagtaagcattaattagaggattacaacattcaaagagtactttttttatttgaaagaaagttgattgtttgcatacaacctcatatgatgccaaaaactgctgtgtaaatagtagatgctcaagaaacacaggatatttcacatataatactttatgatttatgatttaaagattgtttaaaaattatgaagcatctatttatgtgtatatttcaccttagttattttgtatgtcttcaacatgccagtttcctctcaaaaattctgataatttagaaatttttatatgatgaaatttctgcttctttacaattaaggaagaaattaactctaaataaatttaaattatagtatttctaaccagacttatgttttgtttcaatattcagtctgaataaattatttactcattaattttcatatgcctctctctgccattttccaatatccaacccacttcccatgtatagttccaaaaatataacctctccccaagcctgtcttgtcttctgactttcggtgtgttgaggttagataattgttttaatgcccttcatttctgatttattttcctctgagcaacaacaacaaatagaggactaaaaacatgctatttctttgttttatatgcaaatacttttctgagtccctaatgtacacatctcccaagatgtacatatggctcccaggattcaccacatctcccttttctgccccagctgttactgggagtggagggtgtgccaagcctccctggcagcctaatgcaggacctcagttcctgctgcctgtcctttttcagtagtacctgacagttattcttggttgaagtctctctcatgtttaatattatcttttacattatctttttaccctccaatcctagatgaatttaatacctccaaacttgtcattctgtttataatattttaactttttaataagcttgtacccattaactgcaaactgaacgaaggtagggcctagattaggtctgtaaattagagattcagatgatctctgtatcctggaaaagagtacaattaacacagaaagaatatattgtaacaggagttaagggttgaacaggaagtagtggggctatcacagagatgggcaaagcaaatactagagatacataaattaagtaggaagtcctgaccctggaggagctaaggcttttgtatctataactatttaccattcagggtggaagtatcttaacataggaatgtatgaggtgctgtgggaacacaagacaggaagtacaaaaacctgcctctggagagaggttcaataattgccttaacacttatggttgcctaaaggatgaatgggactttgctcactgtcatgcaagaagattaaggcattccagacagagggatctgcacatggaaaggctcagaggcatgaaactattttttctattacagtaaaacaagaagtttgataaagctaaagtatactcgagtgagtagtagttaatgaggcaggaaatgattttatgtttttttgaaggatttggatttcaccttagagattttgggatctggtgaaacatttttagaagagagggacataactgggtgtatgttgtttaataatgattccagtagaagtatagaagatgatttaagcatagttaatctgcaagcaaggacccagttagactaaaacaatcgttcaaattatgcatgatgatagcgttgactagggagggtgtaggagcaagcaagttccaaataacatacagatcagacaggaaatatgaactctaagggaatctgtttaggaaacatgaaagtcccagacattgggttcaaagacaggactcgagtcctgtgtagagcaaagcaggaccccacttcatgagagacttggggtatgaggcaggatacaaaaatgggaacttaggcccagggatataattgccagaaattggtaaagatgatgataggatatcaggaataagacaagcctttgttatcaggtctgaggctcaaattagcatcagcagctatgtttgatgattacaagaatgttggaatcaagctccttaaatctcgtctgtttttgagcttaatgttttatctcctctgctatgacacatatagtttgagagcagggctatgtgtagtggaaaaaattttactttatgaatcagaatatatgaatttatatcttggctctgattcttaacagctgtatgatattgagcaagtcactttaaatctgtgaggtcactatcctctttgtaaatgggataataaacacttcttcacaggactgttataagattgagtgaaatagtccatagaaacttgattgagctataaaggatgttcaataagttttcaaaattgtcttggtgtgaaacaatgacataattctttgcatattcagtgagagttgtttagtgaatcagtgagtagaggactgaatatcaggtcagtaaaagcaatagcatccaaataaaagtacatagattttcaaattgttactgatttctaaaaacaagctggtcccaaagaagcagtgacagctcagcaataaaatttccacttcatcagcatggtgctatcagcaattaagttattgttaaggtacctgttagagtaataacttttaaaagaagcaacatcttaagttctaaggcaattcagtatttcagaagtacagaaaaacagagtgtctaaacttgggagaatatacttcttttttctctttctttttcttttctcaagttcaagcgaatcttcatggtaatctgagaaaaaaggagatgtggtgttctacgtttctttcagatgagctgccagatatattttaagtattaggagtaaaggcatgttttaataatgaatgacctgttttgatgtttattcattatgatctgccattatagtcccatatatttttactgattaattttatctttcaaaatgtaatatcagtgtttatggaggaaaagctttgttattttaattttgataaagagcaggactctttcttcattatgtggaataccagagcttcaggcttttacataattttattttaataaatatacgaggtccattacaaataagaaaaaacatagtatgtatacgaaacaacataatagataatacaaagcattatggaagctgtttattgttttttttttaattatcatttttcaagtcccaacttgtttgttttttcccatatttacttttcattttctagtctggtctgttggaatactagccaaaactggtagaagtaaacaccctgtcactatacttgataagatggctagaaaatttaccaaaaagaaatattcaaatatattctgtttctcttatggaactggacatgttatttgcaatacatttctagcattttgttgctgctagaaaaaaaaaagataactaccaagatcttggttcatggaagaattattttgctttgttgctgttatgtctcttttttatgatattaaggttctttttatgccaatgtgttacaatggatacatttccaacagtcagtaattctcttttctctttgtgttatctattttgattttcttattggtttttcaaagtaagaaacatatgctatccctaaaaaaggcaagctctcattactttttctattgatggcatgtagtatgataatcctagattcttgcaagtttaatttcccacagagaaggtcttctctattttaccccccatatgtctgtatttatgaggtcacattgtaccgtacattctttcctaacgtccatgcatttagatatatgcttcaatattcttggggtaaggaccccattgactgctcaaatgatggttgtaactaaataagaatgagcatgctggtattctcttagaattttagtctccagaagaggtttgtaataatttatattttaaatgatcttttcatttcttcctcacatagtaacttacttccctatcttagggaagcttaggagaggtattgttaacatttcgtacttctggccatgtattctaagttattgaaatcatacattattaaagtttactgatttagacagaagagtacagattgtatataaaagagtcattgaaattcagggtgagaagggaccaccgagaactgtaggtaactaaggagagctctaagatggaaataacttagagccactctctgttagaaaagaggtagagaaaaaatattgaggattcaaggaacagaaaaagtagtatcaagggtgacactgagaaggccatttttaaaagaccttaaagagattagtcaggtcaagggctcagaaggagaatgaaatcatgttgaatgaatgaagtgtagccggatgataaaggatctgaaagtgcacactaagaacattggatgtaatctggacattagcatcgatttctcactggagtctcattgcctgtcaactctagagaagttggagaaggatggtgagagtggaggggacagaagtgctggcaaactctttaaaacaattgtgtccatctctaccttggaattcacagagtgcatatcactccttgaggaaatcttcaagctttaggcagtggaaccaccattattgctcagtaattctctgtacctcacaactaccaaccaaatatttatttcaagtcgagtttgaggtacagatggattacccagggtccatttgaagcttaaattgcaacatacaggtcttttcttggaatcccttctcattgtctatccaatcttcccccaaaacaaacagaaaaagaagaatggtaatagaaaagaaaaaagattaagtgcaaagtttttttcctcattttcttttttgttcagagaagtaactgtgttgtatatattgtcttttaatacctctttgcatgttgtttgtacttaataagtataaatttgtcacagaaatggggaaaaagtttctttcttggacactttgcatttcaataagtatacagtgtgtttcatcagtgatctgtggttggagaaattccattatatatacttttaaaaagttttttttagtttatttgtgcttttaaagaaaacttccaaatgaggatagttatttttagtatgtttcaagtaaacatttttatttaaaaaactgttattttcagaaataaatattttactctagattctagctataaattgtttctaagtgtaacttattgaattctataccaatatgtataatatgaagttttctttccccatctagtttttcttaccacatcccttcttaagtcgaatgtctagttgatacttgttcagtagtgattcatctgaatattcctgcatcttctctttagttgccagttacaagtacatactgattatttaacagtacacagtgagctctgtgatatattttcgacttatatcttctcctggtgagttcttctccatatttcttttcaggtgtagttttaactcccatatacataaaggacaataagaattgctaaccaaaagtggccttaagtatacacagtgactttgcagcatagtagattggccttcatatctggaaaaaaagatgtattttttttcaaatgagttacagggcagggcatactagtgttgatatttctataaagagaaagtctacactatttattgctctgagaaccttgttgtgttttgaaaaacatataatcagataaagaagcccccgatatttttctttcttagtttcccatttcatattgttttgtcaaatcaactgtgactcattaacatctcttttccctaggttttgctggcacacctggatatctttctccagaagttttacgtaaagatccttatggaaagccagtggatatgtgggcatgtggtaagcaattatattttgaagcaaattttgtgataagctagtgtcttagtccatttggtctgctataacaatctgtcatagaccaagtgggttaaataacaaaaatgtatttcttatttatttatttattttgatacagtgtcttgctctgtcgcccaggctggagtgcagtggtacaatcccggctcactgcaacctctgcctcccaggtttaagcaattctcctgcctcagcctcctgagttgctgggattacaggcacgtgcaaccatgcatggctaatttctgtatttttagtagagacagggtttcaccatgatggccaggctggtcttgaactcctgcctcaggtgatccacctgcctcagcctctcaaagtgctgggattacaggtgtgagccagcatgcctggccacaaaaatttatttctcacagttgtgaaggctgggaaattcaaaatcaaggtgccaggagattcggtgtctggtgagggcctgcttttagttttatagagagttatcctctctttgtgtcttcacatggcagaaacagagagggggctcccagggtctcttttataagagcattaatcccattcatgaggcctccatcctaccaaagacctcactttccttccttccatcatattaggagttaggattttaacacatgcattttatgagggacacaaatattgtctataacaaccacaatttttataatttaaaatacaagttgaacatccctaatcaaaaaatctgaaatttaaaatgcttccaaaatccaaaacgttttgagtgccaacgttgattgccacatgtggaaaattctgcacctgacctcatgtgatgggttgcagtcagacacagtccaaactttatcttatgctaaaaaatatttaaaatatttcataaaattaccttcaggctatgtgtttagatgtgtataaaacataaatgaatttcatgtttagacatgggtctcatccccaagatatcttattatgtatgtataaatactacaaaatctgaaaaaatccaaaatctgaaacatttctggtccttagcattttggataagggatactcaccctgtaatatcttttaaatttgaagttgatattctctagtgatcgacttacagtagaagttctcaaacctcagtctacagcaagattacatggacagctgtttaaatgacagattgctgtgtttctgattcagtatatccaggatagaaacttttacctttttaacaaactctcaggtgatgctaatgctgccattttctggaacactttgataacagggatgtggagcattgctcctagtggttatgtatttatgctgctatcttctcaatggatccagccagtccttccaataagtattatgtttgcccatgatacttggcagagtttaagagtgaactagtaaatattggaaaataatgaaattgaccatcccgaggggacagaagtctgatttaggcctctatcagccaactcaaatcaaaaacagtatcctatgcaggcccaaagacatataatggggaggattttcacccacagtttttataatggaatttttatgtttcaacatatattttgaatacaggaaagactgaaagaatgctgcaacattaccctactaagattatcaacataatcacctaaattcctgatactatgtcattgctaccagcctacaagtagatacctaactatcatagtttggctttagtgtgctgcagacagatttcagtgcctttggtgtttgtcagcaagcttggaaaagttgatttaaaaaactttacttgattctgaaaataattttttagacttgttttagtttaaaaagttaataaattcatcatcactactttatagtgataggctgttcctcactatatttcttgtcagctttacctctttggtaacaacttgatgtttgatcttaaactgattgaatcttgggctttcagagttacctccatgcctgggaaggcagtggtaaaatagggcactatatttatagtttcaacccctggggttcagtctttacgttttacctactaacccagtctctttaatatatctgagttggtttctttacctgtaaaataggaatatgttaccctcattgaattgtaggagggtcaaatgcagtgcactttaaaggaagacaattgacaattgctacttaattaatgggtaaggtcttaggaatgccccaagctctgtcttcctgctacctacctgagagtatcttctaagcatgaactctaaggcatgaactctaaaatgccttgaattagagcattgtcacaaaatatctttgttcaaatctaaatgttaatggaagatatctcagatattttccttgcaataaatcagctcccagcatacatagatctgtttctgctgatgaatttaaaaagcaacagagtggcctgagactcaggcagacacagacaggttttgtgaaggatacaatcatattttttaaagtatttttaaaacatgataaagctatatttttgtaaagatagggggttgtagctaaaacgctgcatttggaccttgaacactagagggatagtgtggcatacaatagtcagtaaccaagggaagcaggactcagcataagggacatttcatactctttctttgcctgcttcatcaaaggccttttccagcctcttctgcctttgtgtttatctctccttgttttcctagtttccttcctattttctactttttttcttcatccctcctgtctacttcataggtaagaggcagtatgtatagtggttaagagaacacacttagcttctcagttcacttgctgtatgacatggcacaaattctttagtccctgtgtctcagttccctcttagaaatggagatcatcaaagttcttgcctcatgggactgcagagaggattttttaaatacagtaagtgatagttatcattgctattattatacaaagtctttatttataaatgaagtttctagataactgatatatgcattatagtaggcttaaaaaacaaagtgtattatataactcagcattattggcgtgattatcagtagaatgccctcatctgatgacctgaataccaaattctctctctccctctctctgctttctttctttacttttaaattattttcccttgttttattttgtaaaaggtgttattatggacagatttcacagcttctgaatcatattttactctgccaaagaatttaaataaattattcatttgttcttatatcgaaaacattttttcatgtttcaaatgtgtcaccataaaaaatgatagacaagtgaggtgatagataggtgagttagctctatttaattatgccacattgtatatctgtaaatatcaaaacatcatattataccccataaatgtattcaatcataatttgtcaatccaaaaaaattaagaattttttgaaaatttaaaacctttttttataatgtataagttttattggtgttgaagaatatcagatccactaaaaagaaacccaaaaagctaatagtttatgctagggattcttctctggctgtgcagaaaaatcaatgatgaagcatatacaggcaaacctcagagatattatgggtttaatttctggtctcacaatagaacaaatatcaaaataaagtgagtcacacaaattgtttggtttcccagtacatatagaagttatgtttacagtgtactatagtctattaagtatacgatagcattatgtctaaatgcacataccttacctaaaaaatactttaaaatagccaggcccagtgactcatgcctgtaatctttgcattatgggaggccaacccaggaggatcttgagtccaagagtttgagaccagcctgggcaacataggatgacccatctctacaaaaagaaaaaagaaaaaaaaaaactgtattgctaaaatatcatcatcatcatctgagtcttcagcaagttgcaatatttttgctgaagagtcttgcctcagtgttgatggctgttgacttatcaggatagttgttgctaaaggttggggaagctgtgataatttctgaaaataagacaacaatgaagtttgccacatcagttaactcttcctttcatgaaatattgcagtactcaccaaaatgtgacacagagacacaaagtgaacccaagttgttaggaaaatggcaccacagactttctcaatgcagggttatcataaaccttcagtgtgtaaaaaatgcaatatctgcaaagtacagtaaaaaaaaaaaaaaaaaagcacagtaaaaccacatatgcctttctatcaaaatgcccagatcctgcatgggcctctgctttagtggatctgtggtaaacacaggcaactgcatttttaataacctatgatgtattatcagagtttggattcactgtcttagactcacaaaacacactatgttcaattttaatattactttggaatatttgattttatgtggattgtctgagtacatttctgtaatacagttcatatatctaaccttttaaaataatggaatatcttataatagtgagatttcatatctgtgaaatgtgagagaacttataagttagaagctctaactttcttgtctggaagagggaaaaaggataggtagagagtagtttccatctttgttttctaaactatataacattttgttaggtgttaagcaaatattagatagatactacgtacacatgtgcatacatgcatgcacacacacacacacacacacacacacacatcaagaatgactccttagaaacttatagccatagggcatctcatagatttttaaccccaattttgccacctttcaccttgctatattgtatcctttcttcacataatattatgcaaacagccaaattcctttgtgatgagccttgccccagttggagcatgtatgtgccaccaatttccatttctttagagactgtgtggacgctttgtctagaaatgcacttgagatcacacagctatgaaaatgtcttaagtgttctaatatcacatgttgaggggaaatgactcccactagaacattataatgtattcttttgttacatatcttggtcattgttgtgggatttggaattgttttaccattttattatatatcacctcactcgtgtgacatgaaagtgacattaattcactttatttgtaaggtgatgtacccttaaactcatcatcattgtaatcaccaccacagtaatggacacactatttggttgcttttaggttgtggcttatcctgagggaaactcttttttagccattcattagcactgtctcttgccaattaagtagtgacttattttcaagagtagacactgggttgagtggtaaaaaattacactactcagaaaacaaaagaaatgcaaaacaagccatttagcagaaaggcagctagccttctatatgaattaagctctgaaccctcattacagcagagcagagtgaagcagggcattggtataatgactaaaacaagcctgtacattatttttattagaatcatgcaattatctgcacacaggaaatctcgaattccaacattaccttgcttttgtgatcgcacacagagtatggtctgacctgtactctctctttggaagcaactattccattactggaaagcaaataataaacattaatgaagcaagaacatagccttgtgttctgccattaacagcagtaaattgatttttatgacttaattgtatgtataactgcttccataatttcctaatgggatgaggaaatgtttgtggatgtcactggatcacaaatttctaacagagcttcttctacaatttggcctaaaaataaataaataaatgcaagcctataacataggtctctcccgcaccctatgtacatatgtgttgtcttgctacttttctgccttacttaggtatcactctcaacagttatgagtgataataaattagtggctgtcacaaatgtaccttgacttcggacaaaccttgggaattttatggaatatgtttcttcttttcttgtgtggtgaatttaggttcagcaatgatgtgttttctggggtttaaccttttcatatttcagctggtgtaagtcattatcagttactttagtcattttgaaatcccaagcctactggatattctgttgctattaccagttctgaggttaccttacacttggccaatcacagataggcctccagattagaagccttctgccttcatccattcttacccacatctccaacagtcttcagttcatggagccttactcccaatcatagtctttaccaatattctcttactctgaacttacacactgtcttaaatttctctacatttactatgtctggtttccctaacttggtgtttttcaaactctgaaacacaaaccacatggttcattcagagtgacctaaagtgcaccctcctgagatctacctcaggaccattgaatcagattctctggggccacaggatgcagcaatcccacttctggttatatatccaaaagaattgaaagaagcaccttgaagaaatatgtgtacacctatgatcatagtaacactattcacaacaaccaggaggtggaagtaacccaaatgtccattgacagataaatagcttaaacaaaatgtggtttatacgtataattgtatattatacaaccttaaaaaagaaggaaattctgtcccgtgctacaacatggatgaaccccaaggacattatgctaagcaaaataagccagttacaaaagcacaaatattattatgattctactcacatgaagtattaaaacagtcactttcatagaaacagaaaatagaaaggtgattaccaagaactagagagaaaggggaaattagtgtttcatgtatatagagtttcagtgttgaaaaatgaaaacaaactggagatctgtttcatgacagtgtaaatgtacttagtactacaaaactgttcacttaaaaattgtgcatctggctggacatggtggctgatgcctgtaatcccagcactgtgggaggccaaggtgggagaatcacttgagcccagaagtttgagaccagcttaggtaacatatagtgtgaccctacctctacaaaaacagaaaaaattagccgggcatggtagcacacacccgtagtcctagctactctgctcgagaggctgagcccgggaagatcatttgagtcagggaagttgaggctgcagtgagccatgttcatgccactgcacttcagcctgggtgaaaaagagtgagaccctgtctttaaaaaacaaaacaaaacaaaaaaacaacaaaaaaaaagatctgttttatgtactaattatttatttatttgtttgtttgtttatttatttatttatttatttatttcgagacagggtctggctctgttgcccaagctggggtgcagtggcaccatcttagctcactgcaacctccacctcccaggcagaagttatccttctgccttagcctcccctgtagtggggactacaggtgcacaccaccacaccctgctaattttttactttttgtagagacagggttttgccatgttgcccaggctggtctcaaactcctgagctcaagcagtctgcccacttcggcctcccaaagtgctgggattgaaagtgtgtgggacctttttttatgtacaatttaaagtcactgtgcgggaccttttttatgtacaatttaatgtcatgtgtttaaatttaatgttaggtatttttagcataatttaaaaaaaaaaagattcactgaggtgaggctcaggaatttgcactttaacaagcgcaccaggtgatgttgatgcaacaccaaagctaagcaatactaccacagctaatttcagattcctttaggagagcagtttttaggattattacaggatatgtcagaggttgcaaacaggtgaagtcttagttcaggctgctataacaaagtcacatagactgcgtggcttataaacaacgaaatttctttctcatagttctggaagctggaagtctgtgatcagggtgccaccatagtcaggtcaggttttggtgagggccctcttcagggttacagactgccaactttttgttgtatcctcacatggtagttaagagagctagctagctagctgccgtcttcttaaaagggtgctgttcctgttcatgagggacccatcctcatggactaaatatctcccaaaggccccaccacaccaaataccatcacattgggatttggatgtcaacatatgaattttgagagccgtacaaacattctctccattgcaggcagtctgctgtcttagtcagacatgcggacattttattcttatgagtgttgatgttaattatttatctttataatttattagcaagtaatttctataaaaactatcagtttcttgcttctctaaaataatcaaaagaacaggtgatgcaatgcttttgctcttttatagtaattgtacctgtcagacacatgaacacagctgccgccctggtgaccaccccaccccatacacagtacaggtgcaggccttcatccctgcctgctgccaaaaggcctgtcagtttgccactcctactacatggcatagatagtttccatcctctgaaacatgccttcctatcttgctggcattgatcttctagctctttgttctgcccttcattggccatttaggtcagagtgttagttgagcactttctctacttgaaatgtatgatgattttccattaatcatactacaacaaggtaagagagagccatacttatcactcatgtaattaattgtgtacttccaagttccacatgcattttgcttataagtttataatgtacccctttatttacttagaatattcagtaactgtcttagattcttccattaacttcctactatcttctcagagttctccaacattccttcttcatctctccttttgtaagaacagcatttagaatgtttaattattaacaagattataggtttaacaacttttttaacattaacttttattaaaatcaattttgaatgttctcgatgatatagtctttctacctaattgtaatcagtgcttctcaaaagtcttattaaccggacatctctagcatctcccaagcacaaatatatacataagataaggaaaactagttttaatatctacctgtatatggaaccaactctatcaaaaatagttttaactgtttgtcatggaacatgtgaaacataaaatggagagaatactataataaactgatggctaatcttatttcatctatttcctccctttcatttcccactccaatattatcttaaccaaattgaaacattgtatcaatacatctataaatattttaaagtatatctctaaaagaaaaggactctaaatatgacagtaatattagttttaaaattttaataattattgcttagtaacatcaaaatatctagtcattttcctatttatcctctcctgtcataatcttgtttggtctcttaggtctcttagtcattcttaatttgtaatttttgctccattctctcttctgtctccttatttcttgatttatttttcaaagaaaactgtagctccaagacagcacatgtaagtgctcaatcttggtctctagatactatttaccattaaaaggaaccagaactttctgtaatagcagctgatttcaagtttagaacaggaaaaaagcaagatgatccaggagcatcttgtcataccacaaagaaaaactattaaggaccacagagtttatattaacagatgcaggaaccactttgaggaggctggcactagccaaagatggggcaattgagaatcaataagaaaaataacataatagattgaaatacatcaagtaagtttaaatccaggaattgataatgataatcaaaattcaacagaagtcctaacctttgggggatgttggggagccaatgcgttattttaaaaactggctagtaaagaggaaaataaataaataatagcctatctttcctatatgaactgtatcttaggccaaccaagtggataaggagcaagattttcttagtctaaagaaagcatgatataattagagtatcatcattttgtttgtttgtttgtgagtctcactctgttgcccaggctggaatgcagtgatgtgatcatggttcactgtggcctcgaactcctgggctcaagtgatcttcccacctcagcctcccaagtggctgggactagctgtgcattccaccacacctggctaaatttttctatttttggaagagacagggtcttgctatgttggctaggctaatcttgaactcctgggctcaagtgatcctcctacatcagcctcccaaagtgctgggattataggtgtgagccaccatgcccagccatcattattttgcaaccccagtaaaattatgtaggcagtaatcataaaaggctgctagtgtcatgagagatacccaacatttggaggtcacatcatcacccctcaagtggtctcgcaaaaaaaagacttcttcattgacttttaatgattttagtactttaggtatatgggcaaagaaaaagagctagtgattttttcctttcttttttctctgacatagaaaaaaggtaaaatttaggtttattaaaaagataaattgggcttactcatgaggcaagaactcaattagaacaacaaacacttttattttattttattttatttttatttttgaggcagagtcacaagactctgtcacctaggctggtagaattcagtggcacgaccttggctcactgcaacctccacctcctgagttgaagcgattctcctgcctcagcctcccgagtagctgagactaaaggcatgtgccaccatgcccggttaatttttttgtatttttagtagagacagggtttcaccatgttggccaggctggtcgtgatcacctgacctcaggtgatttgcccgttttggcctcccaaagtgcttggattacaggtgtgagccaccacgcccggcctagaacaacaaacacttttaaaataagcatttgtttagaggacctagctaaaggaaaaagtagctgcaaggaacatttaagataggaccaaatggacatctttgctagtatgtcaaggtctctcagttagacaacacaaagttttaaattttatattatcattcctactaaagttcatagataaagaaaaagtggctgcagggaatgtttagagcatcattatgtctgtcctgcttgtggttgaaacagttacttaatctctcagcctgtttcttcatctataatataatgcagataataacaatatctacctcatagcattatacaaggattaaatgagataatgcattaaagcacacataactctgaataaatgttatctacaataaaatttattagtattacattatccttatgccatgagtctcatacttgttctatacattcagaaaatagaactacaaaatagcataactcagaaaggttttagatgcttgtttaataatcaagttgaagtaaacttacaaaacggtgtttatttaaataggcactgacaatttcacatcaggctagtcaatagcacctataatatgttttttttttaagtctttgggcctaaaagtgttttttttaatcttcacatttatgctattattttatttaaagtacatgtttttgtaaacactcctccatcaaacagctaaattgtgggcatctattacatattgcctgcttttctcatggaatgagccctctgtgagcttcctcttcccagagaagcaccacatcaactgtcaactgcagacataattcataaggacaaacagcctatgttgagaatgctaaatgtctcagttgagccactatttcataattctataacagcctaattccagatgtgtattaggaaaatgttcatattcaatggaaactatcactattacaaagcaaattttcttcttaacctcctggaaccttatatagctgagggctaaaactactcaggtacagctttttttctacttgcctcctgagaacacaaagagaaacactcatcatcatcattactatcatcattttcattagatgtatggaaaaattatttttatgtcatgaaggtgaggtaccaatatactgtggttttcttcatggtcttttttttttccttaagaatgttgtttaaaattttttatccttgtattgattcacatgacttaaaaaatctgcttatgaactgtatcttcctgaagcaggctataaaattctaagatgattaaaccattgcttaaaaaccatttcagctgctacagtgtctattgtataaagatgtccagactgctggacaggagcagggatagatctcctaggtacagagaccaagagaccaccttggataagggaaaaaataagtctcagggtacacctggcaaagtgtcacctgtcttactcttcttctcaggtttcctaggcttaaggaaacatagcaagaaaaaagcaaacaggagaggtcagaggaatgactgccttcctccaggataatgagctaggaaagaaaccaaaggccttaagcaaggcaataaaatacgtgaaaagtggcaggagagatatttgatgacagagaagaccactgtatcaaaacaatctcagacatttagactgcagatatgatttcagggaaatttacaaactgtgaatacagaatttttttaattttaaaagtgaaattagattttggttaatttataaataattatgtttgtgaaaaattttagcaaattttattacagccatgtgtttattgttattattactttgaattttctgtggaatttctcccttctctccctttttcctctcccataatatatattcttctgtagtcttgttggtttagttgtttgactgagaaggcttgaagtatttgaagactaagattactgaaaagaaaagggttttgtctctatggggtacccacatttgcagggactatggttatttagaacgtggatttataaccaggacaccatcactcaacaaaatgtcccaatgaccatcaaaacaagtatgaggaaataaaaaacatgcttagtttttaaacttcaacctcacagtgactaaaatcatagtctctatatagataagaatgcagtaagaccctctatagacaagagttcaggggggccaaagaatgttgccctaaatgaatgttgccctgccatgcctctttagaattctttgatgcatgcattgactgacacattgtcagagttctggagcataggaggagaagcattcaccctccagagactgctctagactagatcataacacatctttctgaagttttcctacaatccagttttctctgttttaacaactacggcttaatatcattgtggatcagccacatttaatttactgttgtctatatgacttaaattgtgttaacattatattctcctccaggtgtcattctctatattctacttgtggggtatccacccttctgggatgaagaccaacacagactctatcagcagatcaaggctggagcttatgatgtatgtaataactatttatatcactttagatgaaggtttgtcttttgcctgttgaccaagagccagatcttttcatttttcttttaaccataatttttaccactttctcatattatttccctctctcttaaggaaagggagaaagaaatgcagcatttgtatccagtttacgtttccttttaactcactgtctcctaagattgaaagaaaagccatgtgaagtctctgaggaagaactttgtcaaaatatttggaccttagtgcattttaaaaacataaaaattaaaatatttctgctatagaaatgattattgcctgtttagttgaattatattctcaaatatctatcacataattttatattatataccaacaatattttgctgtgatcacatatcaaatagaacattatcccactataccagtttctgggttttgttttttgtttttgtactgtttgggatactatgcaagctttcatttgaagaatgagtttcacaattgaaaaatttgaaaatcataattctaataatatatttaatttataattagaatatttgaaagtagatatatatatatacattcataaattaagttcagaatctgaagaggaaggctttatctactttctctttatggcttaactttgtgtttatgatataatttgctctcctttgatacatattcttgtaaatatgatttaccactttctcaggtttcccctcatacagccctatggaaatccatgtgcagggtctgggcatgctttccatgtgttattaagtagagtaactacagagtagcaatattgggttcaccttttgtgcacaagttgaaagctcaatgtgaaagtgagaggagaagatataaaatgtctttattatattctataatgtctcgtgaactcttcaatgcatttctgataaaaattttctatttagatggatgtgtgtgtcagcaagaattaaaaatgtatattctttgaatttcaaagcattgcattattcctagactagtaattggaacaaattattatttacatggcaatagctagcacattcaccatctttacagactagaaccagcccctctctgggcagacgtagccctgaaaatgcactgcttggtatacctagaggaatgctttcatgaaaattagagaactgaggaaaatgttcacctttcttcatgctgaacctaccgctcatttgctatcagaagacctgtacaacattaagaaacagcctcgtgtgtttctttaacagctcctaatagttagcaagcttttacaactgccaaagataagcttcaggaattaaaaaatggcaattgtttagctggcaaaaattacagatattagagtcaatatcatttttctcatgctttattatgccagtgagtcacaagttccccattttaaaactactaaaaatggactaatttaattccatgacacagtggcaatggctttatttttcaagattgtccatacaaattcatgaattgggaaaataacctgatattctatcattttgcaactaatgtggtgtaaatttcccttcatcgttgaaggacagtatttctactaaatatgctaatcatataaaagtaagttaagtaattatcactacaaaaaataatgtaaagaaaggagaagtagctttcttatatagtcttaatataaaaaagtattagtaatgggaagttataagatttgattactttcatatactttggtgaaatttgtaattgggcagattaaacttcttgaagggttaaaatgaaatcttgctgaagctcctgtagtctcagattcttctcactacagcactccaagtagccctgattaataggtcagttttggcacaggaattgaagctgttttattacctctgctattactgcttatgagttgtgaaagtatataatacctcattttgaaccttggcataatatcatgatgacattggtacatgtagcaacctgtttgcttttattaagttttgcaaataattatgagaaagattgtataaaatttcattttcagatcaaagcagagatactttgagaagaatagaagattcttaagttctttttttctgaattttaaaatgtatttaccatatgtgatatgcagctcagtacatatgttggtcccttatcagatactctttaatatatatagttgtctacatagagggggagaatagatctaaatggttttatttattttagatacaacttaacttatataaaaagtaaatttatgaagaaattcactacttgagggaatgattcatgtagttgactcttccctgtttgatcgagtgtgtctattttttaaactttttataaatttatatttttgaagtttccatcaccagaatgggacacggtgactcctgaagccaaagacctcatcaataaaatgcttactatcaaccctgccaaacgcatcacagcctcagaggcactgaagcacccatggatctgtgtaagtaaaacttctccaaaacttcaagaactaaaatgaaaaataagctctcctttaatatattgtttatggatttaaaatagctttgcaaaaaaagatgaaactcagaatgaatgaatttttgactcgaggtgtttaagaaaattaattttatgatggtgaaaaaatgcaattttcagtagcaaagtctgaattgcatagattcttaaataaatattgcttgcagtaacaaaaggaatgagtattctccatatcaattattaacaatactcatgaacaaggttaagaaaataacaccaaaattaaatgtgtcccagaagaaaagatttaacaaagttcaattatttatcattaggcaactttagaaacaagtatgaagtttggcagctgacagtagagtttcagtggcgtaaaataatggtcatagtagtctgaatatattttagaaatattaagaagaatagtgtgaaatttgagggggatctggagacttcagtaaatttccaaatgtgtcaaatgctaaggtgataaatgtggcactaagtaaatgaaaggcagctcaatcaaaatgtgattgaagacattaaaataaagataatttgagaaattattaatattcatttctatactttctggtttggttttgttttgttttgagacagagtcttgctcttgtcacccaggctggagtgcaatggcacgatcttggctcactgcaacctccacctcccaggttcaagcaattctcctgtctcagcctcccgagtagctgggattacaggtgcccaccaccacgcccggctaatttttgtatttttagtagagatgcggtttcgccatgttggccaggctggtctcaaactcctgacctcgtgatccacccgccttggccttccaaagtgctggaattacaggcgtgacccaccgcgcccggcccatttctatactttctatacgtcagtgttgcatcttggtcacaagtagtcttggcaaaactaaaattttatttttaggtaactttggcaattgaatacttagaagttgatcctgcaggtgcagcaccattaataaatatttgatgaagtcagggacattattatacttagtgtgttttaaatattctcaattaagttactttttctcctcttcttctagcaacgttctactgttgcttccatgatgcacagacaggagactgtagactgcttgaagaaatttaatgctagaagaaaactaaaggtaagaaattttacatttttatggggaggtagatttgacagactaagaagtgaaatactgtgtgaggaaaataacttctagcaaaggctttcaattatgtagacctcaatactctcattattctttttggggctcttgggaaatggaatatacaccagaatcaaaactatggtgaaaagctggaatcatcctggcaacacatgctgtggatccttccttcagtggaaaacagctgtgcaatttgataatcagaatctggcccgcacactagggccgtcccagcatcatgagagacaaaggcctttgactctcaggaaaccaaaaaacaaaaacaaacaataaaaaatcccctaactgaaagtagggccaggaaaagatttgttatcaaagactctatatttgttaggtccagaatttgcataggcaacactgacttttgtgttctaatttttttcacagggtgccatcttgacaactatgctggctacaaggaatttctcaggtacatgcattgggaactctgcttcttatcccttggtcttctttttaagtagtctctgtttttttgtctctggaattttaaaaatctaataattagaaaaacttcattgttcaggggtggcaaatgtgtggcacagattccttctacacctatggctgccattagcagtctacctgggtgctgtctgctgccgagcctccgtgactgaacccctcacaagactgcttctggcagcagtggccaccagtcagtgctggtgcaggactagcctcatctgtcaagtgctggggtgcgcacgagttgtggaaataaatactccctcatttacgatctcagcgtttcaaacctagaatttattactgatatttcataaagtaataactttgaataagttatttttggtctcattttcatagggaatcctagtatgcaagatttttaaaagaagaccattattggccgggcgtggtggctcacgcctgtaatcccagcactttgggaggccgaggcaggtggatcacaaggtcaagagatcaagatcatcctggccaacatggtgaaaccccgtctctactaaaaatacaaaaattagctgagtgtggtggcgcgtgcctgttgtcccagctacttgggaggctgaggcaggagaatcacttgaaccagggaggtggaggttgtagtgagcagagatcacgccactgcactccagcctggcgacagagcgagactccgtctcaaaaaacaaaaaaaagggaagaccattattgaggaacccagttctcttagacctaagttcattcaaaagtatagtattttcttggtgtactataaaagtgattacaactgtcaaaggtatctaactcaagaatttacagagcaccttgcactcagtactatcagagcataataaatgtccctcaaaatgattccatggtaaaaataagtttgttaaataataggcttaaagaagccaagccatttctttattgtaagcgtcactctctaaaagtggagataaagtatatattactccaagaaattacttgagttttgcaacctccttctttgatagattgtctcaaaggaccaggttcccaaaagtcaaatcttgttcaatgctaagcagtcttatgtagggggaaggactggagcagcaattaagccgcacttggtaacctttggccctttagacttggaacacttgtcagccaaaaatactaccagtttagtttggatacagtttacataacagtgatctgcagcatcaaactgtccagctattttttcaattctttattttgttttctgctacatacttagcctgggtgttatagtgttatcaggtaataatccatcatatcattattaaatgctcttcaaccaatatctagttattatttacaactgcattaagtggtcacctttctccccacctttgcatttcattacaaataatgggaaaccataagaggcctttcaaaggctgttaaaaaatagcaacaacagtagtacaatgaataatgctacgaattgagggactgtgttggccagttgtatgtattttgtccaattcatttagtgtaataataccttgttgctgcctttgtcaagttacctgtttcataaaccattgattaatatagttgacatttatatgggtgagttcaatgccatatcattaaatattaattcatatatatgatattcaaataaatttcactgtggcccagtaattagtgaatcattaaaaggtagagtgatttatatagcataaattgttaatggcaaactaacccaaactttaaaaaatcttcacatttaaaactgtacattttgttaaagaagtgttaaatacactcttgggcataaattgggcctttattaatgtatgtacccatatatagaagctttttgtttacctcacagtttccttttcatcatcatgtaaactaaaaactcatgactaatatgtgaattttatattgtttctgattgtcttagcatgaaaaagcaatttttttaatccatcacttcaaaatcaactgaagaatattagacccagttacaacatcttgtacttgatactgcattttagagtattttattcatcctatttcattgccaaacatgctctttaaagtaatttatccataagtatatggttataaagttgttgtttttattttttcttttctccctttatgtggaatgtatttcttgtgaggtaaggtgaatagtaaccaaaagggacatttttgcatctcccaggccaaatccctgcttaccctgaatcatcatcttctctttgcttgctattgcaatttcaattattctgagtttgctttctaacctattaactgccacaggattgatttaatactgctttttagctccaggcaaacaatataatggctaaggcaactatttcttacaatctcaattaataataaattaatagctgtgttgctaaagattaatgaagttaacatttttgtatcttttaagtaaatttaaaaatataccaatatgatattgaaataatggcccaaatcaatgaatgtcaggaaattacatgttcatgcagttctattctagctaggtatttccactttcgaagccaaattctattctgatatacttaaataagtatatgtaattaatattaaatgaaagcataagtgtgtatcatgtcctgcatatttgtgaatgttctacacttggtgtactaattgtcattgacagttatattatctcttcactgtgtatctacacattccttagtagatttttctgaaagggtgacttcaccttttcatatactcaagaagtttagtaacagaaggaatgttaaaagctcccttccaaaaaaaatgaagtttcatataagacccatatgctttaagatttctctaatttcgttgaagattttattctggttttatgttgtctcaaattttatgatttttactttttcattgtaaaggcttttgtttatgaagcctttgtattctgattttaatgtataaaagaatacataatgccattttttagagatcatgtgctaaacattttaaaaatttgctctaagccaataatatgccattttatttaaatagtaatattttttgtaaaaccaaattgtctgacttcaagaatgtaatgaagatgttatttagccagagcaaattttacaaatgaattttcaacctctggaaagcagggcttaaatggcagaactgacatggtcaccatatgtggtgtgaatgaacatgtaatacaatctgtcagtcagctgatgtccaaagactgaattcaactttctggattacaaaaggatagtccagttaaagttccagtatccttttcacaaccaacagtgaaataaagtccaataaacacaactggcaaagtattcaattgtatgcaacgaactactctttagttctaaatttgctgtggcaaaccaagaaaagtgatactgtatttcaatgtcctgtaagctcgcgttcatcagtgtgactttgataacttgccatatgttggccagaactcagcaaaggtggtagaaggagacaataacctgactgctttgttgtctggctgtgggtttctatggataactcactaaactgattttactctcattttacagcagccaagagtttgttgaagaaaccagatggagtaaaggtaagttaaacagatgcccctaatccatttctgactttcagatgctggataatctttaaatgttatatataattcctaagtctttgcaagttctattttttattgtttctgataaaggttgcaggttgaaatatgaaatgatttaatatacaaagatgactaacatttatatcaagaaaagctgtatttctcctgttggattatatatgaaatagtcatgaaaaaataatgttgttatacaatatagagttcctatagaaataattaaatgtcttaatctctctgatttactacagttccaaactaccatggtgacctaaaagtctgtaaaaaccaaatgcttttccaaataattatgctgcatacgtgaaggccactgaaatatatagcctgaaaaatactcacatttgggtatggaaaatagaatgtcaaatgtctaaattaatctgcttgggcagtttttataaaggtcttaattattccttgtttctgtcataaggtgttgagatatattcaagatgaatgatctgaacaaatattagaaaaatcttgcaagaaaaataacagcaggatatttttactttctggctttctaaacaaaataatacagtttctttcctactgattgtattttgtttcaaggggatttactcttgttggaatgtaatcttatggtacataatgatgtttgttatcttttcagagtaccacctaaatgttttatttctttaatccttttctttctcttccaaggacagatgcatacattcttcatcaacacttcaacgttcttgggaattaattaattttctaacatttgaatttgacccaaagtcaggtggtcagttcatattgaaaacatagaaaatcatttgtcactttaaatgttcatgctcagtcatttctttaccacctgtctgtgtgcaacttggaaatttctggagcactgatgactgtgcatttgtgatttcctttaggatgccatttccatttaccaattgctttcctcagcctgcaattgtgtcttcattctgattagtttattccatttagattttaagaatgatagttgatgactgcctttttcccaatgttacaatagtagaaatgtggtatcttacattttccaaacattttcttctcctgggctttcctgtaccgttcagtgatggagagctcacagttcctattgagatatttattttcattactatccttacatagaacgcatttccagaactttttccttccattcaacttatagctcctctttaaaaacaaaattattctatactccatgctttgatactctaaattcaaccggtcatatttttttttcttttcctttctctttgactggtcaattcagaaaaggaagtccagttcgagtgttcagatgatggtgaggatctatctgccagatttctcctcctgtgaaaattcacacttaggaataaaagtcttatttacctaagatagtgtaagtaagtggagagggtgtaggaccattacaggtcagtgttagtcaactatcaaaacacggtacttctcttacatattacattgttttttctctgaaattgaatttgttatacatgtagatagtatattaagaggtttgctcttttacaaagtcaattttctctttgaaaataaaaagaccatgacagaatgaatgtctgtatagtgatcagtaaaaacaaacaaacaaaaaactatatgttttttttaatgttctttatggttgctaaaataggagtgatttataggacaccataatacattcaccatggagtttataaaggtgtgaaagtgatcttacaatgtaccaatcctagttaagtacctttaaaggaaatgtttattaaccttcaaacaataaatttaacacctgagaaataggaatatcttgcccatgcctcataagagtaattcagtgcatcatacaattatctgatttgattgattcatgattttttaaaaaagaaaaacaccttgcttctattaacataaaataattatatcacacaaaagtgccagagtttttgtatttttaaaagacatctatgggccaggagcggtgtctcacacctgtaatcccagcagtttgagaggttgagacagacggatcacctgagatcaggagttcgagaccagcctggccaacacggtaaaaccccatctctactaaaaaaaaaaacaaacaaacaaaaaacagaaattagccaagtgtggtggccgtacctgtaatcccagctactggggaggctgaggcgggagaatcacttgaacccagaaggcagaggtttcagtgagccgagatcgcgccatggcactccagcctgggcaacaagagcgaaactccatctcaaagaaaaaaaaaaaagacatttgtggttgaacctatacttatatttgactctttgaaaagaacgtcttcttgccttttgcttagaaattatcctattatttttcaataaattaatattataaataactgcaaaagattttccataggaaaaaaatcatttagttagtctttacattaacaaaaaagctttaactgcatattaaacatgaccaaaagtgtggttgaggcacatattcatttaactcatgtttcccatacctaacaataaagaatggctcacccagacagaatggccttcatctggaagagatgatggtgtgtgtatgctgtgtatctgtgtgtgaatgtgtgtaggtgtgtgtgtgtgggggggggaacatgtgcacttgtacagataagtttgtgtgcacaggtgtgcaagtgggacattttcactaaaataaagcagttcttggcaaccacatcctagaaaaaagtcaagtatcatatcccaaaatagaaataaaagtatctcagaatatttctttcatttgcattcactgataaaaactaaatatagcatattaaatacatgtggtgctttaaccataagtgcccctgttcatttgacaggaagccggctatgttttgcctagcatgtttcccgaataggaaattattcgtgtgtgcatccctccccttttctcacgtaccctgtactaacataaatactgaattttgatccctctttaatagactttttacctcttatctctttggctcttgcacaaatatcatgttaaattctgtgcactttgatttaaaggaaaaaaaaggttttaactatctgcagaatatagattgatgacaacatttatagaattttccagtaaaggaaagtttagaagttttctcatccttttctgtgggtcaagcagcacagtgtcacaacttattgtaaaaataacgataccagtaatcagacaaaagggaatgaaaagaaaggaaaaatattacatatttaaattaatttatgttactttctatcttcctctcaatactagttttgacaggatatatagttatcagatatagacttccagaaaacccgaacaattaaactggtgtcaccacttgaaatgctcatttgatactcatttattttatatagtatatgtttctctttacatcattatctatatttatattaaaatcatggaggtatattcctttagaaaataataaataaaatacctagataatatagtataagaaaatgaacgttaccttacatttttgtttgagaaccgtaatgtaagttgtcatgcatgagtttaaaagaatgttgattgattattatttttcagtccttgattcttagtgccccgactcagttgtagtttctgattgccacttgtctacaaagagtcttctctgtggaccgttagaacacttattgaccctctgagttgcttttaccacgcagcttccacagtggtaatgatatattctttaaagtcaaatccagttatgttaaagcaagggaatgatattaccaaatatattctgcagtgatagcagtagcacattgacagaaaatgtagtattttcctcttacacaactgtaaaaattaaagtccttttacattcaacataaaaagtttgatttccccactaataattgaagatgtaatttttagaggagatctacacttgtcatttttaaaagctattgtgacaccagcgttttctcagaagatctaaattttcattggataatttaattgctcctaagcaaagtaatgctggatccccagagaaagatgtatgtgtgtgtgtgacttcaggctcaagaataaaatgagggaagaaagaaatatatttataactgtgaacaattggaagcttggaaacagaatccaacttgaacagtatgagaatggttatattaatttcatactctgaaacctgattggagctccactgaagcagctctttgtttgctaaggtggcatagcaacagcagacacgtctgttttctcattgcaccatcacggacatggtccagcctgtgtgtgaccatcggagactagcgatcatcattcctgtcagtcatcaccatgtctttcacgttcatcttcagtggctctttatcttcatgtctacatctctatgtagacatgctgcatctagagacattggctaccaaggggtttaaggcatctctgtttctattttctgcatacccacagataaacaacaaagccaacgtggtaaccagccccaaagaaaatattcctaccccagcgctggtatacctggactctttgtaacccttcttaagttctttacatttttttttttttgtggtttctctcatttgctttcactatatagatacatatatataaatattttatttcgttgggtgttgggttttgtttttttttttttttgctttctatgatatgaccaagttcatttcttttggttttttttggttaagttagttgtcaagcagtgtgttctaacatgagattatctcatttcgttgttgaacattgtactgatagctgtggtctctgtagttggaattactgcatgctgcattcaaaatacagcgctttggttgctcttagctcttctgatgatgatagttctagattatgcaaacaatggtttcttcttttcatgatgcaaatgcttacatcaaggagagctaatgggattgttgctagacaacatgaaagtagaccttattcagagttctcgtttccctcttattaaaacacaacagggctttgtaagacttcactttctgagataaagaggcactggataatttagagctttctgtttattatgttttaaattaaattttcactgtttcactttaatccaaagaatgaaactgcaaagaatagaggtttgaattatcagtggaaaccagttatgtctatctcaatcaaatccacacaattaacgactaaattagtctaacactttgagatggtattatgttaaaattcagaatttgaatactgtcattcagtgctgagttccataacattttccctaaactgtttcatattttgatttatgattttcagaaatgtttttcaattatttgctcttctcatactgttattttaaataaatttaaaaatgttaaggaatcatttcacttgagttaaccatgaggctccatttaaaaacatttaaaaggaggacacatcaaaataacaggttatctactagtaaaaaacaatgttgatcacagctgtagccaagggaaagggagaatggaagcaggagatatgtctctcaatattacagcagtgtaaactgtagtggtgggggagtgtccatgattgagaactcccagtgggttgcagtacctccccattgccaagatatcacacaatgaaagtgccaagcatgtcactgatgtatgcatattgaatctttttttacatcagttatttgaatgttattctccacttgggaatatttctttgctttctgatagaaaacaatagaaaacccatactttcttcataaaaaagcatgactttatagccagatatcctgtatatatagtccataaagtagaagttttttagatatgaattaatacaggatttaatagcagtatgcctcaaattatagtgattacatgattagttctagattagtagattagttctagttcatgattagtcccttaaactttttaaatgttccttaaaatttttttatggtcttttgaaatggattctttagtatagtctttttttaagtgttgtccaatggctctagattttataagggtattcagttacgtattaattaatgacaccataatcgagtttcaaaccaatataactgaaaaaatatcttctctgagaatttgaaatcatctcagagttttagctccagtgtccttggccagttctctatgggacagacgttcacaggccactcattaaagaagaaaggaaagcataggattaagtgaaacagtgagtgcctcttcagatctctaaatatcaaagccttgtttgaatgctgatcaagaataaggtcttttgcatgctgcttctgggtagggaggttcctatctcatggcctcgccagggagatctttcatcagagatattgtcagctgcaactctgacagcagttaacatcgctttagctcttgtcactatttcattttgtcagctggctcactctgctctgtccttcacactagaaagaatgtacttaccaatgcgaactgtttctttctctattttgttctcactcaggagccccaaactactgtaatccacaaccctgatggaaacaaggtattcagaaagaatcaacatcatcttgctttaacaagactatacatctcatcaaatattcaaaaaaattaattcgttatctaaaaataggaaagaaaattctaaccattttctaccacacttccttttgggcctaatttatctagaactatggacatacttcttgcaaataaaaatgaatgacatcttgaaagagaaactaatgttaccatgagtcaataaaagtcaggctaaacatgaatgaagtctttatgtcaagatgactgtgtgtcttaagcaattccatctggtcatttttttccccatgactttgtgctttgtactgtagatatattgtgcatgatattttagaatttctggcaatattccattgtcttcaaaaatatcaacttgactttataggtttttttttttgtttagtgttacttttgagttttattctattctgttgtcagagtggtgttttttttttttttggtttttggtttcttaattccttgttggtgatgatgttgttattgttgttattgttgttgttgttgttgttgtttggcatgaatttgaggtgaatcaaggagtttcactttttgtgaaatatgtttgttgttgagtaatatatattccagtaacaggggtttaactacttaggttgaaagaagactaaatgtttcctatacattgtaaattatttgtatagcatgttaactaaataacagcactagcatacatgtctataggatgaaagaccttttctgaatgtattccatgtgtccaatttcttacttttcatatattattatatctctaagggaagaaaaaatactaaacttttctcaaatattagatatagtcatgcatcttctccatactcttatcaatgatgtttaagacttagaaagcacattttatcttaagactcagaaaacacatttcctctctggtttaacatttaattgatcaatattaaaaccattaaagtaaaaaacatgaagtgttatgttctttaatatgagatttattttatagtcatgacactgcaaatggtctaggtcccgaaaagccttgaggtagtcaggaccatcacatatgagaacaatttttttaatagcattagccaatgaaacgccaagcataacagctggaatggacacttcagtagttctagctatatcatttgtaagagttgctgcatgatatttcttgctgacatgaattagtttaattttacagtgcatgggtttaccttcattttcagcttacatttgaatactaggtcacattaagaaatgcatgaagattcctttctttggttttgtgtgtatggagactctgggtacacctttaattagtttttcccttggtttaaatattgtatatgatatttatataaattgatcacttttttgaatactgaatctctaaaatgatactggctggtgtttacattattttccagaatctgttttccattactgagctattgattggaagtttgtttccagttatttttggctctagcatttaatcattccaagtagaaaactatgtctttcttatgaatattgcaaaatttatttgctagaaaatattttactcatacattattaatgagcacatttatcacaccattttaagaaatgtatcttaattctggcagttacagtgtacttttaagtgtgcttaacaatcttccacttaatttgtagttttacaaagaaagagctttgtctttttattatggagtaggtttcttatcaataacagccagttgctatttttgaaaagaatgaaaaaagtctaattgtccttgaaagtaaattattcattataattccattgtgctgaggacaaacatgaaaattcttctcaaaagtactttcagcatatctcagcttaacccccttagcttcttcattaaatgatgcggtgaaatgctttctctccctataaaggtgtaaggcatacaggccttaacatagtgcctgacgcaaagaaggtactctttattgattaattaattgggaatagaaattttttctattttaagtatcaaattcattcggctaacatattcaattgcttgtagacacacagaaaaagcaaaccttatagggcactgtaacacaaaacacatccttacacagtttctaaaataaactgcatacttccgctgcttctacaaatcacctggatttatacagcttcggagattaggcaaccagagtactccgtttgaaatgtttgcagcatcagacattttatttctgttaaaaaccacttaatgtgtttgtccatttgcatgtcagcatatgcacatagcctgctgaagaattttgcatgatatgtatgtcactagccaatttttaaggaggaaatcaagctattcattgcgtgcaacctaaaaatgtgttttcttctcatcaggagtcaactgagagttcaaatacaacaattgaggatgaagatgtgaaaggtatgatttaaccagaaatggaaaatcctacctcagagcttcacatatatatatgaaaaaaaaagtgcttcaaataactaataagtttaggaagtaggcctatcctaaagcacaaaaatattttatttatgagtaaaaaatatttttataagtacataattatttcaacaatatgttacttttgtcatttttcctacatattcttttatatattttgaactgtagacatgtagcatattctagcacattgcagtaatgacaactaataatgagttactagttataggaacataacaaattgtaaatttgtcagtcaaaaagtaatataaaatgtatacacattgggtacattcataaaacctatctggaaaacaatttatattcaaggatacagtataaaaataactttttaacttttagtcatctcaaataatatcagtagaattttctatttggccgcctttttatcctagctttttgtgtacattccaaaggtattcttgacctccattcactttggttgccaaggttcttttagctacatgtatgagtcattggtagtgtttctacagacatcttctcagtgcccctgcacacacatactgaacacacatttgcagttaggtcacctcctttggccacatcactgttttagaagtattacttttgtatcaattgcatttgcagttttatgttgtttttgtaattcattatatataactacagtctctatagaccagttgtctagaagatattctgacaaacagcggtaacagtaggatatttgaaacagaaatattaaaggaaaagaaatataaattgggagcaatgatccataaattaattaaacctcatctgaaaagattactgacctaatagtatcaccataagctttaattctaaaggtagtgttaatacaataaagtcttgtaaagttgtattcatattttagaataaaggatttggaaattctcaggtcaaggagacgtggggtcaatttaggaaataaaaatggctgtagatcacaacttggcagtcagctctgctgactttttcctttttgtttgaatagaacagctgatgctgttaaagtgtactctctatttatataactaagcacactgacctaactctgctagaggtagtcagtcattttttacagtggaaaggtagatagctgtgtcaagaattttatttagtaggtctattcatctcactctttgcacttaagctaaaatttgaactgaagtagttttatgaatcattgataccagtcatattagataaaaatattctttttttttagccaaataaatagatatgccatttagctttcccactgattcaggaagcattatctttgtgttttggattcattagctctttaagctaagctaaatgtttcatatgaattttcacattcttcccttgagcaagactaagaaaacttgttcattgtccactggagaaactgaatctttaaataaccaaataaaattaggagaataccagcaccttactatatgcagttcatctgccaaggaacgtaatcatgagaagggttttaataagtggtctttctcacctgaatttggcactcaactgtactaagtattggttcaggatcattgctattaatctatgtaaacattaatgtataaacagagttcctgtcagtgttaccttgtagtttgtaatttatttttgataaaatgaaataataatatcagttcttagaaaacagttctccaattcaaatcataacaatgatatgggtttcatcttgcctctgggatttcataaattgagatagtatttgtatttataattacattgagtctgtatacaagtattagaggaattcagcatcatattgagatcaaaagaaatgtccagttgatcgtttaacccaaagtgcttagctttattaccttaataaatacattatttaagtttctgcttaattttgctggtgtggatctggccaaaaatgtcataaccatagcccattaggactcatttgtgttctctgtaagacccagacagccttctggagactaacccttttaatattgaatgatatcagaaacctttaagactagaagacactttgaaagattgcctaggccccatcatttttactgggacaagtggtagataaaatggtcttaagtgattttaaattatttattatgctgatgatctgtttgtgtgggaatctctccatttatcagtgcatggtcctcaagaaagaccctatatgtgaataattatgctctcttatttttactttagaattgctgtggctctcagtagcttggtagggaatgtgtttattgtccagctctgttgaaaccaaaatttacctatatctaacattctataactaacatccaagaactcacaattactatcagttaaataatctgaccaaaactgtatcccatctacaaaaccatgtcatatctacaaaactgtgtcttccacacacatacttttcaaccttctcttttctgtagacaacattgtgatcagtgagacaccacactttttgacatattcttaaaggcatacccccatacatacttctgcatgcgagcacttgctctacccattgctgctggctgtcccagctatagtgcatctaacaccagcacctagacttacattgttttatggtggtatatgattccttgaataccatgtcacatgcctcccataccaaggcagtgcacattctgccccatccccaaggactaacctggcagggacagcttctgtgtcctctccaatgtaaagaaacatggagttgctggaggaggggattaaacactgtggtaacccggtcaaaggaagaaatgaggtaaactaacaacaaagtttttctttctggcgtctttgaatgggaaaaggcagacaaggccagctgttctcaaagaaagataaaagaaagcaaaagtagtcagagattaatggttcctcagtctggagcaccttagaaagccaagatttaaaggcccattttccttcagctcttctaattagtttccattgagaaatcatgtccccagtctgtgtaatacttttgaattgtgtctaggctgtttcttcattcagcaaatatttattgaatcccttctctttacctgacttccatgtgcttctctttttgaactagccatgttcaagagatttgaatgcaccagagtcaaaatgctgtttcctaccctttatatgaatcttgttatgctataatgtaggcccatttatcttacttaatacaataactatcaagaaaaattagtgaaacccaacatatatgcatgttttacctaaaaaaaaaaaaactcagtgaaacccaggaaaaaagtgagacccaaaataaatacatttttttaaatctaaaagttcttttatttcctttttcttaaaaaccttcaacatttagctctaaccacatttttcttcccaagctcgtaatcatcccaagggactggcattgttttacaactcttctttttaaaaagcttccagagttcattgttttctttctccaaggcaatgtgttgacaccctagtgttgacctcttgagcagctttctaattttgttcagtgtttaaaaccaaatattatctctgatgatgctatgtcaggaaactcagcagcaaactcagtgtcatggagagttactaatagtttaaaagcaaatgggagtctgggagtggtggctcatacctgtaatcccagcactttcggaggctgaggcaggcagatcccttgaggtcaggagtccaagactagcctgaccgacatggtgaaaccctgtctccactaaaaatacaaaaattagctgggcactgtggtacgcgcctgtaatcccagcaactcgggaggctgaggcatgagaatcacttgaacccggtgggtggagattgcagtgagccgagattgtgcctctgcactccagcctgggtgacagagtgagactttgctttaaaaaaaaaaaaaaaaaaaagcaaatgggagtcccaataaagcataattaccatcatggaagcactgtggtaacaactgcccatcctatataagaaaaaaagttttcttcttacaactaactggtgttttcaaaatatacaattctttaggccaaaaattgttgaaatagtcatttccatttttaatcaatttccagtaaaacagctacttccattgatttaaggtgttatccaacagctgtcatcattagctcttaattagcagttaacagtacaaactgcactcctcgccaggggtgtgggtgtgcctagagtcagtgatgtgtagcagtagttctttccacactgtatacatgtgaagaccgtcctttggtttgtggctgtagccacagtttgcaggacctgtcgctgtatgccgcaatgcctctccgcctcataacccatccagcaccattgttcagagtcacccacttcctcctgatgggtacatgtccatatggtccatctgcttatgtttcccagcattcttgtgcagcacctgttgaagttgggctcctgtatgcccttgtgtcatttctgtcaccatcctgtttccagtatctcacttcagctcaccattcaccacgagcttggatctcttgctgcatttcatccttcttacacatctaggaaagtggagccctttacaacaagcagattctatggctatgagactgtgtgtggagacttcatccttcttgaattcctttttacttttcctgattactaggtagtagtaatgaggatgtttgcaaaagtctcaattaaggacaaagttgttggcacccttattacttgaatggtgattcatgtttgatgacctggatatcgtggtctcagctaatttatagaatcacttgattaatgagctctctgtgtgggtcttctataaatatgtacattagtgaatagtatgatgactgattacccagattcaactattcttaagttctgtttgatcactgaaaaccttcttttctgtgtgggatttcctaaggcagatgatctcatggtactgatcttcttggtatctacatgtaatttatatttcaggacttgtcttgcatacatttctcacttccagaaaaatctgcaaattaagaaactcttgggtattttattgagggacttttgataattatgtcattccattaggttaaaaatgtcttagaggaaactgtagtgtagtgtataataacttctttcaggtttctaatccaaaatttgattttacaacaagtttacttagaaaaattactggggggaggagccaagatggccaaataggaacaactctggtctacagctcccagcttgagcgacgcagaagacgggtgatttctgcatttccatctgaggtaccgggttcatctcactagggagtgccacacagtgggcgcaggtcagtgggtgcgcgcaccgtgcgtgagccgaagcagggcaaggcattgcctcacttgggaagcgcaaggggtcagggagttccctttctgagtcaaagaaaggggttacagacgggacctggaaaatcgggtcactcctaccggaatactgcgcttttccgacgggcttaaaaaacggcgcaccaggagattatatcccgcacctggctcggagggtcctacgcccacggagtctccctgattgctagcacagcagtctgagatcaaactgcaaggcggcagcgaggctgggggaggggcgcccgccattgcccaggcttccttaggtaaacaaagcagccgggaagctcgaactgggtggagcccaccacagctcaaggaggcctgcctgcctctgtaggctccacctctgggggcaggacacagacaaacaaaaagacagcagtaatctctgcagacttaaatgtccctgtctgacagctttgaagagagcagtggttctcccagcacgcagctggagatctgagaacaggcagactgcctcctcaagtgggtccctgacccctgacccccgagcagcctaactgggaggcaccccccagcaggggcacactgacacctcacacggcagggtactccaacagacctgcagctgagggtcctctctgttagaaggaaaactaacaaacagaaaggacttccacaccagaagtccatctgtatatcaccatcatcaaagaccaaaagtagataaaaccacaaagttggggaaaaaacagaaaagaaaaactggaaactctaaaaagcagagtgcctctcctcctccaaaggaacgcagttcctcaccagcaacggaacaaagctggatggagaatgactttgacgagctgagagaaggcttcagatgatcaaattactctgagctacgggaggacattcaaaccaaaggcaaagaagttgaaaactttgaaaaaaatttagaagaaggtataactagaataaccaatacagagaagtgcttaaaggagctgatggagctgaaaaccaaggctcaagaactacgtgaagaatgcagaagcctcaggagccgatgcgatcaactggaagaaagggtgtcagtgatggaagatgaaatgaatgaaatgaagcaagaagggaagtttagagaaaaaagaataaaaagaaatgagcaaagcctccaagaaatatgggactatgtgaaaagaccaaatctacgtctgattggtgtacctgaaagtgatggggagaatggaaccaagttggaaaacactctgcaggatattatccaggagaacttccccaatctggcaaggcaggccaacgttcagattcaggaaatacagagaacaccacaaagatactcctcgagaagagcaactccaagacacataattgtcagattcaccaaagttgaaatgaaggaaaaaatgttaagggcagccagagagaaaggtcgggtcaccctcaaagggaagcccatcagactaacagctgatctctcggcagaaaccctacaagccagaagagagtaggggccaatattcaacattcttaaagaaaagaattttcaacccagaatttcatatccagccaaactaagcttcataagtgaaggagaaataaaatactttacagacaagcaaatgctgagagattttgtcaccaccaggcctgccttacaagagttcctgaaggaagcactaaacatggaaaggaacaaccggtaccagccactgcaaaatcatgcctaaatgtaaagaccatcgagactaggaagaaactgcatcaactaacgagcaaaataaccagctaacatcataatgacaggatcaaattcacacataacaatattcactttaaatgtaaatggactaaatgctccaattaaaagacacagactggcaaattggataaagagtcaagacccatcagtgtgctgtattcaggaaacccatctcacgtgcagagacacacataggctcaaaataaaaggatggaggaagatctaccaagcaaatggaaaacaaaaaaaggcaggggttgcaatcctagtctctgataaaacagactttaaaccaacaaagatcaaaagagacaaagaaggccattacataatggtaaagggatcaattcaacaagaagagctaactatcctaaatatatatgcacccaatacaggagcacccagattcataaagcaagtcctgagtgacctacaaagaaacttagactcccacacattaataatgggagactttaacaccccactctcaacattagacagatcaacgagacagaaagtcaacaaggataaccaggaattgaactcagctctgcaccaagtggacctaatagacatctacagaactctccaccccaaatcaacagaatatacatttttttcagcaccacaccacacctattccaaaattgaccacatagttggaagtgaagctctcctcagcaaatgtaaaagaacagaaattataacaaactatctctcagaccacagtgcaatcaaactcgatctcaggattaagaatctcactcaaaaccgctcaactacatggaaactgaacaacctgctcctgaatgactactgggtacatagtgaaatgaaggcagaaataaagatgttctttgaaaccaacgagaacaaagacacaacataccagaatctctgggacacattcaaagcagtgtgtagagggaaatttatagcactaaatgccaaaaagagaaagcaggaaagatccaaaattgacaccctaacatcacaattaaaagaactagaaaagcaagagcaaacacattcaaaagctagcagaaggcaagaaataactaaaatcagagcagaactgaaggaaatagagacacaaaaaaccctttaaaaaattaatgaatccaggagctggttttttgaaaggatcaacaaaattgatagaccgctaggaagactaataaagaaaaaaagagagaagaatcaaatagacgcaataaaaaatgataaaggggatatcaccaccgatcccacagaaatagaaactaccatcagagaatactacaaacagctctacgcaaataaactagaaaatctagaagaaatggataaattcctggacacatacaccctcccaagactaaaccaggaagaagttgaatctctgaatagaccaataacaggctctgaaattgtggcaataatcaatagtttaccaaccaaaaagagtccaggaccagatggattcacagccgaattctaccagaggtacgaggaggaactggtaccattccttctgaaactattccaatcaatagaaaaagagggaatcctccctaactcattttgaggccaacatcattctgataccaaagccaggcagagacacaacaaaaaaagagaattttagaccaatatccttgatgaacattgatgcaaaaatcctcaataaaatactggcaaaacgaatccagcagcacgtcaaaaagcttatccaccatgatcaagtgggcttcatccctgggatgcaaggctggttcaatatacgcaaatcaataaatgtaatccagcatatacacagagccaaagacaaaaaccacatgattatctcaatagatgcagaaaaagcctttgacaaaattcaacaacccttcatgctaaaaactctcaataaattaggtattgatgggacgtatttcaaaataataagagctatctatgacaaacccacagccaatatcatactgaatgggcaaaaactggaagcattccctttgaaacctggcacaagacagggatgccctctctcaccactcctattcaacatagtgttggaagttctggccagggcaatcaggcaggagaaggaaataaagggtattcaattaggaaaagaggaagtcaaattgtccctgtttgcagacgacatgattgtatatctagaaaaccccattgtctcagcccaaaatctccttaagctgataagcaacttcagcaaagtctcaggatacaaaatcaatgtacaaaaatcacaagcattcttatacaccaacaacagacaaacagagagccaaatcctgagtgaactcccattcacaattgcttcaaagagaataaaatacctaggaatccaacttacaagggatgtgaaggacctcttcaaggagaactacaaaccactgctcaaggaaataaaagaggatacaaacaaatggaagaacattccatgctcatgggtaggaagaatcaatatcgtgaaaatgaccatactgcccaaggtaatttacagattcaatgccatcctcatgaagctaccaatgcctttcttcacagaattggaaaaaactactttaaagttcatatgaaccaaaacagagcccgcatcgccaagtcagtcctaagccaagagaacaaagctggaggcatcacactacctgacttcaaactatactacaaggctacagtaaccaaaacagcgtggtactggtaccaaaacagagatatagatcaatggaacagaacagagccctcagaaataacgccgcatatctacaactatctgatctttgacaaacctgagaaaaacaagcaatggggaaaggattccctattgaataaatggtgctgggaaaactggctagccatatgtagaaagctgaaactggatcccttccttacaccttgtacaaaaatcaattcaagatggattaaagacttaaacgttagacctaaaaccataaaacccctagaagaaaacctaggcattaccattcacgacataagcatgggcaaggacttcatgtctaaaacaccaaaagcaatggcaacaaaagccaaaattgacaaatgggatctaattaaactaaagagcttctgcacagcaaaagaaactaccatcagagtgaacaggcaacctacaaaatgggagaaaattttcgcaaccttctcatctgacaaagggctaatatccagaatctacaatgaactcaaacacatttacaagaaaaaaacaaacaaccccatcaaaaagtgggcaaaggatatgaacagacacttctcaaaagaagacatttatgcagccaaaaaacacatgaaaaaatgctcatcatcactggccatcagagaaatgcaaatcaaaaccacaatgagataccatctcacaccagttagaatggcaatcattaaaaagtcaggaaacaacaggtgctggagaggatgtggagaaataggaacacttttacactgttggtgggactgtaaactagttcaaccattgtggaagtcagtgtggcgattcctcagggatctagaactggaaataccatttgacccagccatcccattactgggtgtatacccaaaggactataaatcatgctgctataaagacacatgcacacgtatgtttattgcggcattattcacaatagcaaagacttggaaccaacccaaatgtccaacaatgatagactggattaagaaaatgtggcacatatacaccatggaattctttgcagccataaaaaaatgatgagttcatgtcctttgtagggacatggatgaaattggaaatcatcattctcagtaaactatcgcaagaacaaaaaaaccaaacaccgcatattctcactcataggtgggaattgaactatgagatcacatagacacaggaaggggactatcacactctggggactgttgtggggtggggggaggggggagggatagcatcgggagatatacctaatgctagatgacgagttagtgggtgcagcgcaccagcatggcacatgtatacatatgtaactaacctgcacgatgtgcacatgtaccctaaaacttaaagtataataaaaaaaaaagaaaaattactgtccgcatatactacctgctgattttttaagtgttgtatcagaattagtaacttatatgactgatgcagaatttattctattccaccactaatgtaacacagtttcattttctctatttttatatatttcttctattttacctctatactcaatttttctctttattgcttgagtcctgccaagttatcctaagttttcagtgataacctcaagcttgtttagctctgctaacaaaatacagggtcaaactgttgccaaccccattttaaaacaaggtccaaaatcaagacaaatggaaccaacaaacaaaaacatgtaacttctcattttaacattaggaaaacatcagctcactctatagtaataaagtttttctgctcaaaatttctataaatagcttttcttgtgagtttgtgaaaccctgtaatgagttttagaactatccacagcaaaaataatgtagcattgttttataaaaaactacataaactctaaaggcatatatatgttgtaagatttcttccatcagattctaaactttgattgagctatcaatcagtttttaaactgtgaattcactttaagaattaactttaagaattcagagtttaaaaacctgacatttacccacttatacctactgttccattatcgaaacgctaagcatgtgagagttatttatatcctactgctcaaggtcatcgctaaggtctgattttccactcacgcaaaaattcaaaaaattgcaacctccagcataaatgggttaactattcatagatattactttatgtgggagttaaaaatacaagaggtaatcagactcacactttgtgtaatcaaaaatttcatagttatccaaatataatttactttataatatagttacataaatgttgattataaaactttctcatttttgttcatgtatctatttttttcccattacctaacaaaaattgtccaatttaataagctactaaatctaaggtttgtgtaaattttaaaatattattccttctatcttctttattttttcagattatggctttatcactttttttaagtgatgtaaaatataaaatgtcagcaaggatctgatttgaatctgaaatctatatttgagcaagttacataatttacctgtggctcaggtttcctcataacagcagaatgtagatattgaaatcaataatacagacttttaagctctttttctactctactgtgatgcaatactattaatagattattgtaagatctctttatataaaatgatacattctaatacatattattataaaacaattagatgttaataatataaactattcaagcagtcacagaaagacatttaactcaaagtttaaagaaacaatacactgctacagttttaggaaatcttattaaaactgggaaaaaatggtgttcaccaacctgaatatccaaaatgttatcaatagcactataggactataaagttactactttaaacacattccagtgagaattattatgaggtcaaattttatgtttctaaagtttccatacaaaatttctttaatatctaaaattaaattaatatttgagctcattcatttctatatagaagttaaatcctaattatttgctatgtttttcttaactatgaattttatgtaattctgaaattatttattagagtaaaataattgcttgagtgaaataatgtctcctttgctgagtttgtattattttataccaataaatatatctataaattatgtaaagttatatgtctatatcatgattctttttgtgagtaagtggagtggccctaattttattttctgctatggatttctgctataacccccttgatttggtcaggaggaattaggtctaaagtatttaagaaattaatctcaatcctgtgcaattttaatatcccaccaggttacaggtgattttatctcaagctaatatgatagatgataaagtaaggaaaagcaagatattagcaagtgaaagcagagaagacattattcagtgaggagcttaatgaaagagcttgtgtagaaataaagaatttttatttttcacatccgaaacagtggtattttcacttttcaatttagtgcaacaaatattttatgaacacctgtaatgtatagtcttctaactagactctagaagatttagaaaagaaagatgattctacaagataatgttgcaggcaaagacacaaatgattgagagagtttcaaacggactgggctaattctgagtggattatagggactgtattctagtataaatcaatagagagtgaatcgtgatcaatagcacttaactaaactacaatagttgtgttcagtccagggagggaaactcaacaaggcagctttcctaaacatttccaagctttgttgttatattaaaaaataatttaacagcattggctatcatgtaagtatagcatcaggaagcagagattgggtataagaaaaacataaacatgccaaggattcaggcttaatattcttgtacttggaggtatttttggccataaagtaaaaatgcaatcaatgtattggatagatgtaatggcacacattttctgtctgtgtctttgctgtgagttttcctttccaaagttctgcaatatattaaaactgaaatattgagttttcttaatagttctgaggtaagaaaagattataatcacccaagcccagtggctcatacccgtaatcccaacattttgggatgctgaggccagaggatcttttgaggccaggagtttgagaccagcctcggcaatataacaagaccccatctctacaaaaaaagaatttataaaaattaggcatggtggcacacacctgtagtcccacctactcgagaggctgaggcaagaggaggccaggagttcaataccacagcgagctatgactgcactactgcactcactccagcctggatgacagagctagactctgtctcttaaaaaaaaaaaaatcaaaggaggaactacttaatctcttttttgtgactttcttctgaaaattgagtttatagaaagctggtctaatctgagagagttcattcactcttcatatctcttcaccaatggtcattctgaaaggactcctcaaagataaaactcctgaacttagctttaaaggggaaggtactattaaccaggtgaagaaggtgcgagaggagaaacattaccaatagaaggcacagaaacaaagcatggtatgtctgaggtattgcaggcagtcaggatattactgaagaatgaaatgcaagttggagagtggtagcagatcaagcttgagaggagggaaggtgctagttatgggagcattgagccatatgaaggagcttgagctgatctaatattaagagatgagaggcatacatcatagacaaggatgattctgcaagataatgtaccaagcacctgaggaatatcagaaagttttaagcagaggaaagatgtggtaagatgtccataggtagaacactctggtgattctgtggcatatgtatttgaaggctataagaccaaagatggttagaccagttttaagactatgtctaaagggagatacatggtcaagggagggttgagttttgttttgtttatgttttaggatgaatgagtctagatcaagtttgtaggctaatgataaaggacaagtaggcatgaagaaatttgctgatcatttttacatttatttagtaagttactctttcagcaaatatttagtgagggactattgagtgccaagccctgttaaaagcgctggatattcagaggcaacaacatagataggatttcaactttcatgaaagttagattttagtgggcagaaatagctaataaacaaggctcatagtttctaccaaagacttacccttgggataaaaatgatcacagagtagctaaagactttaccttacattatcctgattaaaaactccatttgttaagtaggtcttattaacccagtctttcaaaagaacaatctgaagcttagagaggttaaatcatataaccactaagtgctttaacaggagctgggatcatgctttgaaccactgcactgaaccacgtggggatttatggaatccctcagccctcacattactccaatattatatcgtatgcatttaataatatgtaaaagtattccagaaaggttagtggcaaagacacttgccagggaggttttctatcaaacatgaagacttccaagttaggtagcacagtctaatcttacatctgcaggaatcatcttttgctcctgggatcaggtatgaggtcctaaataatgaggaaagatgaaacataattcaggataatagcttatcttttgtaaagagcccccaaagaaccttaaaaccatttctgcttataaagtttagctctaaggctataaaggaatgtgttgacttgattgataacagcatgttatttgtcagtttttgtgaagttaattctactgaatagaaccaattggtgtcttgcatctatatataaaatgctgtaccattgtatttgtaaaacattttaccactatgttttagggcttttttaaaaaatctcatttaatctgtacagcaagcttgtaaaatcaagaaatacaataaagaagggactcaggacattgcaactatgtttgcaatgtcctgagatctggaatcatataagcagagatctggaatcatactagccctaatggcctcctttcagagaagatcaagcactttgacaggaattagggatctagactcattcttagagagagatagagacattttaaagctattcctggactagtcatctataagagaagtggaaaaaggactataaattgctctttaggaattagacattgggttactaaattccatggctgggtagaagggatgaggcttgtgaatatcacaatggaaccaggacccaggatgggagtgggtaagaaagggaagtttggatagaatgggtatatagggaaaggtcttagcttgttgtgtaaaatgtgtaattttcaacaagtctgtaattaaattctttgtttcagaatgccccacagatttcatgagtctctcggtatcttccctacctaacacaaaattcagattcttagtaaaatatccataaagtgactctgtttacttgacttaaccaattattgcttatatggaaacagacattctcatagatgcacccctttttcatttaaataaaaattgggcattttctttacaccttccacattagttcccttatgtatttctgcttctgattttgaccttttactgttttctcatttttttattttttagagacagggtctctctctgtcatccaggctggagtgcagtggctaaaacaagaaataatatgtgcattaaaaaaataaatacggccaggcacggtggctcacacctataatcccagcactttgggaggctgaggcgggtggatcacctggggtccggagtttgagaccaacctggccaatgtggtgaaaacccatctctactcaaaacacgaaaattagccgggtgtggtggtgcatgcttgtaatcccagctactcaggaggctgaggcaagagaatcgcttgaacccgggaggcggaggttgaagtgagccgagattgtgccactgcactccagcctgcgcgacaaaagcaaaactctgtctcaaaaaaaaaaaaagaagcataaggatatagctgctatcatatgtgaacaaacacagaatgcttcagatgaatgtaacacatgatgtaatgcctaacaaagagacctctatttgaaatacttggattcattcatttaaaaacaagaaaaaaagattgagcaccttctgtgtgctgaatatagtaaaatagactgaggctgaaaaggcttagctttttcctaagggagtttttagttttatagtatcctcttcaatgaaattatatctgctagtgcatttcccattccagtgaatagctattttttgcattaaaattttattacatgttaaagtttcttccagagtacatgagtggataaactatcttgcctttgaaactcagtgaattaggtagtctgtctttatttcttttaaaatggaatagcgtaacatttttcccttggccaacgttgttgagcagagtttgccaatccattatatgaaagtgagcaacatgtttagtacaaaaagactgatttaagtattggcattgctatgatttattttactgtggtgaaactaacttctctgccaaagctatattatcccactgattacatatatgtgactacttcagtatccaaaggaaattctttgcaatatgcaaatacctttggatgtttgatttcgtctctttagattagaacaaaatttaaaatctgtgatgagttctgaacatttccaaactactcaattgtgttttctttaaaaacaaatataaaacctctctatacaactattttatttaatataagttatagattaagttatatttttaaatgtcacctccaaagaacatttctctttcatttctcctcacttccatagtactatcagtgcagtctgcactactgcattactcattgcaatactcctgtatagtatgtctcaaccatttttaatatgtttgtgttcaaatgcatctaagaaaactgaattgatatgactatgttatattctagtgcttttaacacaccttcatcatcatccttagtctttctttgtctcctcagtttcttttaatttctttgtctccttagttttgcttataccccacatgcggtctcagaaaatcctactagttcttcaaaatgcacacttttttttggaattgactgctgctcaccaactccattgccatcactctaacttaagatataatcatcttttgctgatattattgacatagcttcttagccattgacctgcttctgcttacagtctattctcaacagagaatagagttacactttcaaaaatacattagatcatgtgctgctcttgctctgtattctccagtggctgccaaagacatcagaatctattaaaaggcctaccatgaccagggctccttcagacatgccttgccttgccatctgacttaatgtcctattattatatgtgcatcaggaacactgtttctgaaatgtatcaagcaggttcctgccacagggccttgcacttactattccatgtctggtatgtcctgatacacatttccatgtggcttactgccctttctctttttaagtctctgaccaaatgttatcaaaagttaccctctctgtgagatcttttactaccttattttaaattacatccctccagactgggcatggtggttcatgcctgtaatcccagcactttgggaggcaggcagatcacttgaggccaggagtttttgagaccagcctggccaacatgacaaaaccccatctctactaaaaatacaacaaaattagccaggtgtggtggtgcatgcctgtaatctcagctacttgggaggctgaggcacaagaatcactggaacttgggaggcagaggttgcagtgaactgagatggcaccactgcactccagcctgggcagcagagtgagactctgtctcaaaaaataaaataaaatgaaaatttacatccctccaaatccagcactccccattctcctgttttacttttctctttatatttattatctgaaatatctattttacttgtttcctgttcctcttccccctactaaaatgtaagtttctgtagagcagagatttttgtctgttttgtttatagccatattcatagtatctagaatagtgttgggcaatagtgggaataataaatatttaattggtagaggaaggaagcatagtggataccaaccatgacatgtcctagcagccactaaaatgatcggaattctcctgaaattgtgatcagtttacaactttttctgtgtaggtttttgtacatataattacctcgctccataatttaggagttaaaaacaccgaaaatgcatgttttaaaagtgtcttagtccatttgtgatgctataacaaaatatcacagactgggtaatttataaatagtagaaatttatttttcacagttttggaggctggaaagtctaagatcaaggtgccagcagacttgatgtctggtgaacgcttgctctctgctttaaaaatggcacctcttgctgtgtcttcacatggcagaaggaatggaagggactagccaatccctcaagccctttttttgtttttgaagaggagtctcaccctgtcacccaggttggagtgcagtggcacaatctcagctcactgcaacctccgcctgctaggttcaagcaattatcctgcctcagactcccgagtagctgggattacaggcacccgccaccgtgcagagctaatttttgtatttttagtagagacaaggtttcaccatgtttgccaagctagtttcgaactcctgacctcaagtgatccgcccaccttggtctcccaaagtgctgggattacagatgtgagccactgcacccggccctcaagcccttttataagggcactagtccccttctaataaccactcaagggccccacctgttaataccatcaatgtttggtattaaggtgcaacatggactttgtagggacgcatacattcatatcatagcattaagtcataggatgttttttcctattggaatggaggacgcgctttggtgtcaaatatactagatttgaatcccagcccagctctccattgaatatgcattctgactgctcatgtaaaccattctgagtcatatgtacaatagggataataatatgtcaatgctggccgggtgcggtagttcacgcctgtaattctagcactttgggaggccgaggcgggcggattacctgaactcaggagttcgagacaagcctgggcaacacagtgaaaccctgtctctactaaaatacaaaagaaattagccggtgtggcggcatgcacctgtagtcccagctactcaggaggctgaggcaggagaattgctggaacccgggaggcagaggttgcagtgagccaagatcccgccactgcaccccaacctgggcgacagagttagactccatctctaaaacaaaaataataataatatgtcaatacctaaccattttttacctacaaaagtaatttcatatggctcaacctgaaaataataataacaataagagagcatactcatgttgaatagtgatacaatctattaaatgcctagtataattcctggcccatgatttaaaacagtccataaatccagagagaactgtgtgtgtgtttttaaacatcgtttctattttctgaaacatttattttagataagtaggtataaatgttaagacccacatccagccaacctatgtgcataaatacccaaactacataaagctgcccaagtgcagaaaacaagttcatttttgctttaaaatcgaaactgatggtttttttaaagtgtttgtgaagatgacggtgttcttttaactcattatgaattttaaacaattaaagtattttagttcactacttttggcctccatagtaccatataataggcacttaatagattaatgaattaattatgaggtttctacattaattctgagttgagacatattttgtacttattaaacatgttttaagtaataactcaaagtcatccctcatttgaagtagtccttttatctctggatatgttcaactgttttgaaaaattggctcaattttgcctgtgtcttgattatcactgctgagaggaaaagaaaaatatgtagactgattgttttccacaaaagtaaaatgtgaatttaaaaaggagcatatctatgcaaaattacttaaacacttctcaagcaaaatatctcaagaacgataacatataatgtcccttttagaaattgtgattacccggttcagtgtttcctcaaaagaaactaactatcttgatagaagttaacagattaaatgtgaaagacctatgatttgtttttgaattgactgtgtacaggatcattggtttctttattaacatcactgcatgtggttatttacagcatgtctgtctggcaaaacacagatggtaaatgttatggagagaatttggatttcaggaaaagttgggataatagacaaaaacttataccattatgtgttttcaaatttaaaaagaaagaaaaaaaaatcctgctccaaatgtcattttttttacaattgtacaatttgaattaggaaatgttttccactggagaaaataatgttttggggccgtgagtattttaagtagagtatttttactccatgcctaggccacttcacacagaattatagcattctgattaaacattgtaccacattacacaaagttaagctacacaaaaatgtaaacatattactaaacagtaaagaaatacctctggaaaggttaatggtccgtaatgacagaaaaaataacttacttccaaaagagtgttgtgattttttaagtggtattttgaccaatgtaggaagagtgtgagcatatgagattgtatatttaagtctctcttcaagaaatagaagctcttcactcataatctttataagaagagagaagcctaagaaggaacttagggctatttaaatatatgaagagttaataaacatgaaatgtgtttacctgtcactgagaataaaactaacaaaaacacatttgtttgagatgtgtgtaaacatctgtacctgagttggtattctttaaatctgtactacaattttgtaacaggagcagtgttgtaagttattgaggaatttcatcatctgggttagttaaattaacctcacttcggtaagtgctgtgtggttgtaatctgactatgcaagtgccagcgataacctttgtagtcattctcagtagtcatcctctctgaaacctccaagtcaatattttcatgttatctccagtttttttttaatgtaaaattcttactattgtcttaatctcagttcatataatataaatgcagatttcctaagtgtggaatattaattacttattaagtaacttgaatggtgtctttgaagactgttcatcttttgaaggagtcatactcacaaatatgtatctactatacattaaattttgaaataaattcataatttatggtaatttacatttataatacatgttggaataaatgagaatacataatatgttgttggttctgaaatatatggctcataaatttaatttttactgcagttgcattggttaaactaagaacacctttactggacctgtaaaactgggccccaatattcttttttttttttttttgagacagagtctcactctgttgcccaggctggagtgcagtggcacaatctcggctcacttcaacctccaccacccacgttcaagcaattctcctgcctcagcctcccgagtagctgggactacaggcacccaccaccacacctggctaatttttgtatttttagtagagatagggctttaccatggtggccaggctggtctcgaactcctgacctcaagtgatccattcacctcagcctcccaaagtgctgggattacaggcatgggccactgcacctggccaactgggccccaatatttcaacaagaatttttaaattaattatctaagctgaatttagaggcaaatatcccagagctaaactgattatacagtaccaatgtgaggtatcctttattaaaaagcatgtgttactgtgaatcatttagtaatttctggtatgataggatatttttaacttcccaaagtaagctttaaccaatgtagtaactaagcacggaaatggctcttgggcctacgagtcttatcattgctttcaaatgcatgacgacattggaagagttataggcattcacatgggtacagcccaatggattcttctcatctgctgtacagataaggccaatacactgagacagtgatgttgcagtagagaaacagtttagttattgcagggcatccaagcaggaagacaggacatgtttctgaaatctgcctctctgagaacttggaggcttgggttgttaaggataatttggcaggcagggggctagggaaagggtgctgctgattggttgggaatgaaatcataggtgtgtcagaactgtcttcatgtgctgagttagtttctgggtgggggttgcaggaccggttgagtcagttcctttgtatgagtcacatacaaagggtggcatcagttggttcaccagaatgcaaaagtctgaaaaatatctcaaagaccaatcttaggttttacattagtaatgttatctattaggggtaattgaagaagttatatatcttgtgacctccaggtacatgactcctgatcagtaagcaaactagggaacaatagctggttattgcttaactattcatagatcttagcaaattcaagactctaccataattctaaccttgtggccttttattagttttatgaaggtagtttcagtcctgaacaaggagggggcataattttgggaaaggcctgtaatcatccttgctttaaagttaaaccgtaaagtaaatttctcccatagttggcttggtttacacccaggaatgagcaagggcagttagcttgtgaggttaaaagcaagataaagtcagttatgtcacatttatctcgttgtcgtaatttttgcaaatgcagtttcagcatcactatgtgaatgtgtgtgtggtaaaaatgggaagtataaataattttcctccaaacctaaataagtcttgcaagttgtgacagaccattgtaaatttacacagatttacaatgctgtgccttttcagtccaatggtctgacatctgagaaagctacagtaatcatcaaagttgggcatataggcacacatattacgttgagccctggcctttggatctacaatgccatagatgaatgcaacatactcctgacatatcaagaggttctatcattttttcataattttccaaattggaaaaattctccttaattattttatttgtattataaacttttttccactagttccccacttactgttgactacagatgctttagtagttttaaacaatgaatgggaggagactgattttcccatatgttttgtaaattggcctttcttcttcccacttcactgaagataatctgcccttgcagattatcttttattgattcagggagctatggactggatagtgatggactttgtaatgaaagcacaagctactatttttgcagctgctgaagataagaataagctagaaaacatgaaagtacaatgatcggagatgctgctgcatattcctgtgtagtaaaagatctgctttgttatctggacagtctcttccagaagaagagacttcttgagtcaaaataagataagaagtatgcaacacaaagaagtgaaatgacattcttacagttgaaatattcatactatgttagttggtaaaactgcttagcttctacctcattgaggcaacattggtgtgagaaacactgaaatatgactgagagcctacactagcaagaagatggggggaagatacctttaaaaagatcacttggagttcaataattatggatgcataataacattttgagtactcttaatatagtcagcctagttctttctcaaaaaataaattcaaggacataacagttcagttgatactatggaattttgtttgtttgtttgtttgttagttattcaaaaccagcaaagggatatgatgcttatttggtagagaggacatgctcttcagctctttctgccttcttgatccaagaaagcattcacaaatttaccagtttatttactcaggaaaatgtggctataaatgaatttacccaggaataaactaaattctattatttactaagttcaaatagtatacttttcataaagggatgaaatcagttattgaaaagaagctaaattaattgtaagctaaacaacagcaactgaaatcactgaaagaaattaaaacctactatcatgactgtaaaggattttaaccattctcactttttatatttctagctattaatactgaagggaggacagaatattaacactttgaaattaactctccgccaggcacggtggctcacgcctgtaatcccagcactttgggaggtcgaggcgggcagatcacctgaggtcaggagttcaagaccagcatggccaacatggtgaaaccctgtctctactaaaaatacaaaaattagctgggtgtggtggcaggcacctgtaatcccagctactctggaggctgagacaggagaatcgcttgaacccgggaggtggaggttgcagtgagccgagatcacacctttgcactccagcctgggggacaagagcaaaacttcttctcaaaaaataaacaaataaataaataaataaactcttgacctgaaagatatatgctccgttttgactaatataaaattgattagcagagttagttgaaatcattacagcacccaggggcagctggattgctttcatgaccaaaaaaaaaaaaaaaaaaaaaaaaaaaggccaaaaaggactttccaaatattttaaaactttatgactaattggtctcattgtctcttttccacgtctgaatttttttctttcaagaaaataactgtggccatcaccttggttacacagtggagagaagagatacccttagagaatgcttagaacatctctgatcatgcaaatgtgtaaacttgaatgccaagagactttataatcttaaatctgagcagaggatgtgagtctttgaccagtttcttaaaatctttttcttccatgtcatcaactcttaactggaaatggtaccacacctatgtgattcatggaacatcttaatacttgaaatactcaatggtattcacaatgctgtgctatttctagcttctgcaagtcagctgggggtggcagaatagttacccaattactttaatgtggctagagtgaattctttcacataagcaaatgttctgtgtaatcatagtttctttagactctaaaacatttatttaagtcattttttaatgaaaatctttataaatactttatacctcctttaatttaatagtaaatattttatttccatttccggtcaaaggtaattttaggaataacatgaccatattttactgtaacccgtgatatccttgcaaactaaaaaaaacataaacctatttgtacttattctaaatgatcccaatgctagatctttctgatcttaaagatttgttaattatttattattaggctatagcaatttaacagggctaagactgatattacttcttccccagttaactatcattttgtactatgaaactactctgcattatatagcaaagttcaaagatggtttgaataatttatttattttttttaatcctgaaagcctctagtaattaaagggtgaaaagttgatgttattcaacaggtgacttctggataaaagaggtttacagtaaacattcgtgaatagaaatttagtaattgccatgtcttatatttgaataaaatattaaatcactcaactttagaatctgtgataagtttgattttaaaagccaaaattatgaaaattcctctccccaacattaactgctacatcagtctagtgaagtaaaaataaagtcacagagaaacaagccgctaattgcacagagaatgccaaatataactgaattgataggcacctttttctgtaaaactaccaagagcataatttgtatagttgcctaaaatagtaactattcccaagggttaattttgttaatggcagcatggaaaaagacaataaaaccacggggcacccagttgtgtgaaattgatgtaataattaattacacccttagcctagtaattaagtagtcagtcaccttgccagagtaagttcaaaggcatttaggtggttcatttaagtttatgatttcaaaatattgaagtaaagcactgtgggctggaaaggaacatagatcagtgaattgaacagcagaggggaaccttagccaaataaagctctaaccctggcacagcctctgaatttgctagatgacttgagcaagtcacttaacctccttgtccttcaagtctctgacagccaagtacccaataacctgtaagaaatgtagaaagaaggatttaaattaaatagaactagacatattaagaaagtaaataaatagaattgctaacttaagatgatacaaaaattgttgctatataacaattttaattgcacagcttttgatcattgaataagtgctttttaggcacaattcactaaaagatttcaacatatgacactctgcaaacatcccagtgaagacacatttgcaggtataaattcagtttattttgtggtccaagtttcattgtagtcagctagacctctcaatagggcttatcatcaagtagtttcacttcaatgaactgattaatccaaaatctaaacaactgaaaagctcaagctcaaatactagaatttctttgcactcaaccctcttgaaaagaaatattaaatgtaaacattgactagaagtatctggtttatcttactaaacttttaagattaaatctgctgctattccggcatctgaaatactgcagcctcataaactttggtcctgatgcagactctgaagtatccaaggtgccttctcagcaccgccacatccaaactgctatcatacatgataattgtctacatacttgcatttatctagtgatttaaaatgtacacagtattttatatatattgtctaaccatatactgatatttattcatacatgcatgcatttatggacgttgactcagtactaggtgttcagactataaactggtcaagttctagttagatatatgaacatcccgtgataatgcagtaagatcaaagtaacgtaaagtagctgggtctgaagcacgcaggaagagcaatacagacaaagtgacacttgagcaaggtattgaaaaagattttcaggcagaagagggagagcttctggcagaaggaaaaatggcaggaaaagtacagttatcaaagagccaggactagctgaggaaaggtgagccccttggtgtggctggagaatatataaaagccctagaggacaaaaagtgtcaagagataaagcaggaaaagtaagaagatctttaaaacagagaactttgggcttcagcttctagaccatgagaggagggggactagaaaccttaaaggggtgggggacaatggcagctctgttctatagagtgatgattctgcaacagtgaggagtgagagaggccggtgtgggagacctgggagcaggaagggtcaggaacttccgagagcctgaatcagagtagtggcagtgagcctagagaggaagaaatggctctgagaaagagttggaagaatgtagaatggctaaagatctatgaggaataaaaagaaaggagatagcaaggcttccagtttgggcagctgagtagattatgatgccactatccaagatgagaaattccagagaggcatcagactttgtgagaaaaatactgaggttcattttgggcaccctgggtctgaaatgccaggacaaattcagatgtttagaatgcagttagaaatatgagcatggagcctagaaagatttaaggtctccgagatagagaattggcagtcttcagcatgcggtcagagccagaggagtgaatgagattgccaagagtaaccaaatgaaataattaagaggctaaggatgtatcctgggaaacatcatcagaagtgctaaggaaaaagaatgatccatggaggattggatatggaaacaaagaaagaattgaatccagaagaaaccccaggttttgagctgggagactggcaaaattgtggtttcattagcaaaaatgagtaagtcaggaaaacaaaggagttcgatgatcagttttagacaagtcaaaaagtgttttctgtcattgtcaataaacgataagacatactactttatacttaaattatttccatttgtcaattttatatttcttaaaggctgtctggttatcaccaaataatgtaccatcatatattttaaaaaggtcattggattgggaatcgaaaccaattgagtttgttctggacctactattcattcaaatacttattaaacatttcctatatgccatgcactgtgttatctgctagagatgcaatggtgcagtaccacccttctagagtaatagagaaaactgattaatcggttacatgcaaataaatatgtaaatacaagtgtactaagtgcttttaaaaatcaggtgccagctatgtatgaattcataacatcgcggggacctgacctaacatgaggctcagggaagacttttttttttttttcttttttttgagacaaagtctcgctctgtcaccaggctggagtgcaatggtgcaatctcagctcactgcaacctccacctaccgggttcaagtgattctcctgcctcagtctcccgagtagctgggactacatgtgcgtgccaccacacctagctaaggtttgtacttttagcagagacggggtttcaccatgttggccaggatggtctcttgacctcgtgatccacccgcctcggcctctccaagtgctgagattacaggcatgagccaccgcgcctggcccagggaaggcatttttgaagaaataatagttgaattgagatctgataaaagaagtaggagcaaaatggggggggtgcagttttccaagaagagaagacagtacatataaagggctggtaataggaggcagaatgtccattttgaattggtaaaacaaaggagcaagagtggattggagaagataaagtcaaagagtctgaatgagtctaatgagatgggcagagtccagattacgcaaggttttgtagtctctcttcaggtacctatcctgagagcagtgagaaggttttagaagagttcaaatagaaggttatctgaagagataggcatttaaaaaaaagaaagagagagagagaggtggttgcattgtagagaacagaatagtgaagagcaaaattggttgcagaaacactaaatcagagggctgttacagagcctggacaagaaatgatgggtgcttatacccagagagagtgggggtgaagaggaaaaaaagtcaaaaagaagaggaaggcaaattcaacagaacttaatggattggcttgaggtgctggatttagggagtcaaatatgatcctcaggtttctttctggcttatgcaactgagagatgatcttgccattcaccaaaatggggatccatggaagagcaagcaggcttgtagtggtggaagttcttaagctcagttcagtatatgttgggtttgaggtccatttgagatacccaaatggaggctcaaaaatagccttgacacatagatctgaaggaagagtctagaaaggaggttaacaatttgggagtcattggaatatagatgactatttaaaacactggtgtacacaggactttagggatgcagcatgagataaggagagggactcaaattgagtctttagaaggaattgaagcatttaatatccaggtagagaaggataacatggcaaatgagaatgagaacatgtagaaaagcaagagagttaagtaaaaggagagtgttccaagacaagaaggtgggaaggagtgatcagcaaactccatacctttgggcaatgcgcataatccctttatttatctgttaaaccaagaaataatcactgcattcctgagtattgttatagtaaccaaatctaatgtttgaggaaatgttgaaatctgtaagttgttttattatgtagttactctcagttcttgggttttattttgttttcaaacactgggatcattcacacccttatcttactcttccaggcctcttagaacaagagccaaaaatatatgaatttgaaagggaaaatgttcccaattctttgtgcataattgcatggaaagtaattccactcagaacctggaacatctctcccacttggttttctctttttccttttcctaagaatctagaaatcgccagaaagtactttgtgtcctatgagtataggcttgagcacttcagttctagaaataaacctagtaggtaaacagcttcctgcgattaaatggctagctctggagtggaagaagcttctggtattcagggaacaccttactggtacattctgcattcatcgtggtataattagggacacatcacaagctctccactttgacttttggagtggttatttattacttggtgttcaggaagagggaaggccagatgagaatggaccccctccccacacaacttgtctgtccaagccactgacacagtaactgttcctcaacctcactgctgattgagagtagagctagctaacaccaaaccctcgctcttcctctaggtcagatgctgggcttgtggcaacagttccaacaacaagctgactactatatacaaatgattcatttccagccttctgctttcctttaaagagtcagctgtcatgtgccgcctgtgactcactcaagctcctttgccccagtgaaataagcactctaaagattcctgagttccaggcccctcctaagccaaacgagtcacattgtttttatggtgatacagcacagaagcatcctggctaattcccatttgttgtcctgccagcaaaagcaccatcgtttctaagcataagaagtgagagaaggcaatttgtgttgctttgtttatgcaggacaacccttaagccagttgtggcatgcaaaatacttaagagtgaatgcgtatttccacagtggttcagaaagtaaaagatggccatatacacccgatgattctaattccatattatgcttgtgaggcagtgcagagactttcagaaactttaggaagtgatcctaaactcttcacactctataaactgaagcctaccctaatgaagctccacgaaggacgttgatcttatgctcatttcaaattggccatgttttctaaactgtagtttttcctatcagctgtatatcagaccaaaaaaaaaaatctgttagtttgaaatgaggatttcatgtgagagagaagttttggtggccacatttttataatctcattttctgagatcctcctcacccgtatcccttatattccagaatcgggtcagctgtcattagcttttgccaaatgttcatactgttgagggcacagacagatgaatcacctattgcctaactgaattaagctaaaatgtgtcactggcaggatccttattacaaaatcatgccctgataccacttctgtcactatgttttgctgttgaatgtattattgatattcatcaatcaaatgagcaagggcaagaaatgttttggacttctgtaggagctgtgttatattactttatataaatgaaaagtaattatgtaactaaatatgaattctaacccatatagtgattttttaatattatagaccttgacattgttagcaaccatattatggactaacttaatcacattttataggatagtttattacttgtatttgttatgatatagtctcatatagtctcgatgaagtaaaatgtggtttatagaaaatttatttttaaataatgtcatcacctaggtaacctgaagtttcagagtgaaagtaagcatttaagcttgtggttaaaatctgcttgatgaagatcagattcataaaaaatgcaaactggtttctttagtcaataaagaataaaacctgaggtcagctttcttcgtgatcaatagcctcactacctcagtaagataagatgggaagtaacattttgtgattcccagtctatgttcagtgattttaagggaatatcgcaatattcttaaaatccagtaaaatttgatttctaaaatatttcatgcagtaattttataaataagagaacagtgttctgaaatcaagaaaagtttattagtctcaattgattaaattcacaaacattgagcatctattccataaaagacactgaacaaagctttttaggctatacaagaaaataaaatgttctttgccctcgggaagcttttaagttaacaaggaagacacattacacagtacagaaagtttaataacaatttaaaacaagtaataatgtgttttaaactaaagaaggtatcaagagatagcatatgcataattgccgagtgatacagatgctgcaggctttcaaaaaagagaaagaacacttgaggcagatgtcagtagaaacaaattcactgaatagataggatttgagccaaaccactattaataatttcaccaattatgggctaggaatagaaacaaatcatgattggtgttgggtttgacagctatacctggaggctttcatcttattatctgcctacatctacagtattgattcatatgtcacttcttcaatttgtagagtttactaaaggccatttgtctaaaaacaaaggccagtcacagtgtcggcatccttttgtagagtttgtcaagcagaaaagtgagaaaatgcaaataattatataaagttcaatatctcaatgcaagatatcatctttactctgaagatagacatattattagaatgatactttttaagattgtttttaataacacttgttaactatgaagagaaatatgtttactaatccaatcaagttaaggtagtaaaaactaattttattttattttattttatatttatttatttatttatttatttatttttgagacggagttttgctcttgttgcccaggctggagtgcagtggcgtgatctcggctcactgcaacctccacctcccaggttcaagcaattctcttgccacagccttcccaagtagctgggattataggcatgcgccaccaagcccggctaattttgtatttttttttcagtagagatgaagtttctccgtgtgggtcaggctggtcttgaactcctgacctcaggtgatccgcccacctcggcctcccaaagtgctgggattacaggcatgagccactttgcccagccttagtaaaaactaattttaaaaaacatagccttgaccgacctttcaggtgactgttgttttcaaacaaatggaaaatagcagtgctttccaaacatgaatgtactcagaggtcacctgagagtcatgttaaaatgcagattctggcagggcacagatcacacctgtaatcccagcactttgggaggcagaggtgggaggatcacttgagcccaggaggtcaaggctgtagggagctgtgattgcgctactgtactccagcatgggtgacagagtgagaccctatctcaaaaattaaaaatgaaaaagaatatttaatatgacttttgtcttttattcttacccaactccatatttttgcctttagcacgaaagcaagagattatcaaagtcactgaacaactgatcgaagctatcaacaatggggactttgaagcctacacgtgagtagcggacgtttactttgctttcatgcatatggtaaatatattttttatatgaatgcattattcaacatgtctgaattcacatatatttaattcaaggtttgatatgttaacaatagttttatttcataaatgactaagtgcccctaggagagaaaaatttcagagaaaatttcagagaaaagatttcagaggccaggcacagtggctcacacctgtaatccttgcactttggaaggccaaggtgggaagactgcttgaggccaagagttcaagaccaacctgggtgacaaaacaagaccccgtttctacaaaaagtttaaaaattagtcaggcatagtggtgcacacctgtagtcccacatacttgggaggctgaggcaggaggatcacctaagcccaggaggtcgaggctgcatggagccatggtcacatcactgcactccagcctgggtgacagagtgagaccctgtctcaaaaaagaaaagaaaaaagatttcacagagagaaggcttgacttctgatccaacgattggagatttctttgtaaatatacagatgtataaccactcccacatcacacatacagaagtccagatgagaaaaggtcagtccaggcagagcaattcatgtgagcaaacacacaaaaaaatatgaaagtacataaaatgtgcatttcagcttaagaaatgttttcccttgcagttctgcagaggttctggggcagagaaagagattaggaggtgacatgaggcagccttctctcttcagccagtacagctcaactttatctgcatctcttttatatgtttgtatcttaaggaaaactttacttgaagaatgggttttaatgcttatttaaagtttataaactcctggatcataggaactatgaaggaaattactttgctgaagttaaaataaagcattcaatttaaatagggccttctccttacaccatgcaactaatgagttccaccccagtgaaagacttaaaatgcaaaacggagattgaatctgatctctggctagaaagatccaaaagctgaagatataatcataaatgagaacataatatgattatacctaaatagataaaacgtgtatactttaattaaaaaaccaagaataaaagagacaaacttagaaaaacatttgcaaaacatatatcaaaatttaattttttatattgcgtgaatatgattgaaaagtagaaaaataggtaaagaacatgaactgactattatcagaggaggaaatataaatgacaagtaaactagtaaaggcatattcatgtttactaattaagtatacacaaacttgaatgcaagagcctcttctccctataaagtcagcagagatgtaaattctgctgatagccagcaaggtgcagatactgcaggacaatggtgactttcctccaccatggaataaaacacaattgggtgcaaactttcagggtggtggtggtggcagatatggggggattagtaatatattttgttgtataatctgttattatatacctgaaagcttttataaagtctcactttactgtaatactataattctacttataagaatttaacaagtataaattttttatgtaaaacatgaacaaaaatttgtgaacaaagatatatactgaagcaaaattcataatagtgaaaaattggaaacaatgtatatgcccaacagtaccattcccattaaatcatctttggtacaatggttatgttgagtttctagcgacctggaaaaatatttatgatgtttttactgaaaattaagcaggacttaaaagactatgtacataattattacaactaaaaaagtaaaaggtattaaaagtgccaggtgcgatgtctcacgcctgtaatcctagcgctttgggaggccaaggcaggcagatcacctgaggttggaagttcaagaccagcctgaccagcatggagaaaccccatctctactaaaagtacaaaattagccaggtgtggtggtccatgcctgtaatcccagctacttgggaggctgaggcaggagaatcacttgaacccaggaggcagaggttgcggtgagctgagatcgcaccattgcactccagcctgggcaacaagagtgaaactctttctcaaaaaataaacaaataaataaataaaaagtattaaaagtggaatgaaacatgccaaattagattttaaaaagaaaaaaagaagttgcctctgagaggtaaaattatgtgtgaatttttttcctgcttttttattcttcccaaattttacataagcaagtattacttttatcattagttataaataaacacaaaatataaaatatggacgagattagctaaatgtaagacaaactatatcaggagcttcttcttataacttaaatatgtgtgcatatatgtataaacacatgcatatacttatgtatgagtgtatccattctttatcatgacctaataagacatacttggaataaaagaaatagtaaaaattggagttaagaagaagtctgttttcagagacaaccgttccctattaaacaattgtttatagctgtgccatagaacctgctttttaaaaattcttgttgctgttatatccttgttagatacatatgattatccaaagaataagattattctcttttttaaaaaatcttttttttttgcaatagcatttccttgtggaatgataaaaagttgtgtttgttattgttaaaaagaagttgcctctgagaggtaaaattgtgtatgaatttttttcctgcttcttttatattctttctaaatttataaacagatactactgttatatagggagcaattgtagccaggcaaaagtgtatgtttcctatattctcagtttaaaatagggtattttaaataatgctaaaccttgggatcataccagttcactaatatctttgcctatggagacttataatctggcctgattttgtactttccagccagagctaatccaacagggcttccattcgagagcttttgggatggtagaatgtactggtggatccctgtcagctggtccttagaacacctgttcagatcacacacacccacatgtcaaatggcagctttgtggatctttcattaatacaaagccttttatggggtagatggatgattagatagatagatagatagatagatagatagacagacagacagacagacagacagacagacagacagacagacagacacacacacacacacacacacacacacatttccaaatatactgactctttttcatggctgggtaagaagatccatcatggcacagtgattcccagattatgttagtactgatgtaaggcagtaagaaattttggttcactgataatgacaaccaaaaaccatatttatagaggaagtaatagcccctggcagaataaattcttgttaccataggaacgctgttcttcccattttgcttcttagaaagagactatatatatttgattttaagcttaaaaatgcctgcccagcaggcaatctgaagtgaaggttactgtaatccttgcccccatcatctttaaggcacaaaggatatccactgtgatttctactttttaaaggtattctttaaataacaccggttccacgttctataaacagtactgcactttgaggaactacagtgagttagacttttgaaatttgtatttctgttgaacatttaaaaaattttgctccccctccacccaaatggggaatttctctatgaaattagatgtggccccatccactgtattaccctttggggcaaattaataaacagtccaaaatcctttgatttgtactccatttgatctaccttgtgaactcccattcattcttcaaatccaggtcttgtcaccttctctgagaagcctaccctgatcaccataggcccaaaggaaatattttcttctctgcatttccaggggccttacacacataacacagtgaccctgctttccatatcaagcaaccagtcatcattccccaagcatactctgcattttcacagcagcagaccattgcacttgctgtcctccccctgcccaccacctcccacacacctggaaaactcttactcattcttcaaagcccagctcaaattttcttcctctcttaaacctttcctgttcatctattctagtattgattattgtataattgcttgttttgaagaatatctgccacatagtaagtgttcagcaattctttactgaataaataaatttctccaaagaaagctcattggttttttccaaatatttaaaattgtgcacccctttattgaatcatatttctaggattaagaaagaaaaccaatatgagcatttgaaccttctgttgatttcattttaaaaataaaataaacttaaacacaataataagatgtaagtcttgtggacattgccaggaagtgtagggtgtgatactttctttcaagtcaattgtaatatacatgtttgacatgaatgtaggatatgtggtccatcaaaaattattccaaggctaagcatggtggatcacccctgtaatcccatactttgggaggtcaggtgggaggatcacttgtgcctagagtccgagacgagcctgggcaacataaggaaaccccatctctactagaaataaaaatttaaaaattaacccagcatggtactgtacgccaatactcccagctactagggaggctaagccgggaggattgcttgagtctggaaggttgaggctgcagtgagccatgattgcaccaatacactccagcctgggcaatggagcaagaccctgtctcaaaaataataataattattattattattattgcagaagtatttaatttcagaatcaaagatagttttataggatttggagagtgtcttacacttggacaataggacttggagagcatttttaaaaaatagtaaacctcaatcaagagttagaaaaactggaaaattcaccttaaaaataaaaaagtagaaattataaaaaggggcctcctaaaatattgtgtattatcatctgcttgaactggataaattagtttgttcctatcagagttctctgcaaaatgtctttttaagagtctgctcctcaacccaccttgccaaggtttatgatagaacttttgtatgtaagtgtttttagaggctctttccttcagtgactggtaaatcagaatgtttacacatgaaacaacaaaacacattaaagcacctattaattggttgttttcattatttttcttttacagaaaaatctgtgacccaggccttactgcttttgaacctgaagctttgggtaatttagtggaagggatggattttcaccgattctactttgaaaatggtacatttattcctaatttaataacatgccctttttaaacctctctgaattttcccaaatttgcagattattttgctcttttctacaatgagagtttttaccttcatccagcatttgaaaccatacaatggttttgtattcaaaattgaaaaaaaaatatgtcaggcttggcttacagttttggtgtgttttaaaaaatatctttgtaaaaaaattaatgttgactgggcactgtggctcatgcctgtaatcccagtgctttgggggccgaggcgggtggatcacttgaggtcaggagtttgagaccagcctgaccaacatggtaaaggctcatctctactaaaaatacaaaattagctgggcatggtggcgcacacctgtaatcccagctacttgggaggctgaggtatgagaattgcttgaacccgtgaggtggaagttgcagtgagccaagatcgcaagcctgggcaacaagagtgaaactccatctcaaaaaaaaaaaaaaaaagtaatgttgattgaatacacttcaagcaagttgcagttaatgtataatataagctataaagcagttacaaaaaatgttatttcacattttcataaaactatatataaaaaaattaggcaggcacgctggctcatgccagtaatcccaacactttaggaagctgaggtggcaggatagcgatagtttaaggccagaaattcaagaccagtatgagcaacatagtgagaccccatctctacaaagaatataaaaattaaccagtcatgatgacaagcacctatagtcccagctacttgggaagctgagatgagagatcactttgagcccaggagattgaggctgcagtgagctataatcatgccactggactcctgcctgggtgacagaacgagaccctgtctcaaattttaaaaataagaaaaagaaaaaataggaggaaaaaatttttaaaaaccacaccatgccaaaatatttaacatagaagagtgctttcaagcatatgtgatgcttattttcaaagtaaaatgaaaatgaaggtgagtaatcagataaatctttcaattcaaattttaagacttgtggtagtttcagaggaaacagccacttttcaaagaaggtgacaaaagaagttcatcctgcagaaatccttcaggtcatcaagaaaaatgtaaaccaggaattccctttatccttctctttttccttacacctaatgacattagacattatgctgtgtttgcatcttgcattaagggaatttactatttttgcagagatcttattgaattaaaaaagaaatgtattataggaatgattaggataatcacatcactttcagtaattataagctttgataagaatgtctgccttggcatggattttcgaattaagatgtgttggatgagttactttttcttatatgcattagacatttacaaacaaataaacaaaaagaactatttgataaattctctttaacaaaatttcagtaaatgttatcatattccctatattccagtgttctgatagcatctcatgtttcctccaactaactctctatcgacaccatctgatccctaatgaaagaattaactcattaatattttaacctatttcagtataacactatatatcatgttccataaatataattccttcataatggggtatttaggtgactataataatattttatataatttgaatagatgttttctgagaatggaaagcatgtttggataatagccaaaaacaattcaaccttttctagtgatctaagaaagaaacagcatcaataagtgatgtgcactaaatcctcctcgtatctcttggtgactgaataattagaattggtaactactgtcaaaaccagaggctggagcatagtgagggctactcagtcaagggaaagagctggaagaccagaatcaggctatgtgccaacaccacattttgaatgtttatcagatgatcacagtggactatcatggaatggactctagtatgtggaggagtcagagaatgagatgagaaacaagttcataggcttgttcaaaggctaccaccagccttattttgaagacagtgatgtctatacctgaaacttgatatatttcccttctcccacatacttcaccaactaacaaaaacaaccaccaccacaagatccctggtcagctgtcccagcagttcattcctggaaaagacaggggcagtgcttggcacacctgggccaggccttcttcacttctattcatgttgtgatttctgtttctaaccactttccattgtaaataaatatatctctccagctttttcacccaatcaaaatttccagagagcatataaatgcctgtaaaggaaaccagataaaataaagactgtatccactttcattctttttttgctttgtacagtgcccagtacccaattagtacaaatagtagattaattaactaattaattagtgagtgaataaatgtcatttcattcattggtcctaactgaagttattactggttttagtttcctttacatagaaactaaattttgcttttcatgtttttctctttcagctttgtccaaaagcaataaaccaatccacactattattctaaaccctcatgtacatctggtaggggatgatgccgcctgcatagcatatattaggctcacacagtacatggatggcagtggaatgccaaagacaatgcagtcagaagagactcgtgtgtggcaccgccgggatggaaagtggcagaatgttcattttcatcgctcggggtcaccaacagtacccatcaagtaaatatttccaggctgtcagcttctttgttaatacacccatggtcagctccttctacttattccattgttaatagcatggtatatgttatttaacgctagtagttggttacactgatgaaaataaatgccttcacgggaaaggtttatgattctctggaaagatcaatcagatcagccatttgtgggttgaaacttgctatagagcagtatatgataggtttagacaggacgagagactacgtgatcaaaatctcacagggttaaatctagaggacttgtataataaggcaaaatatttgtgacttcatcttctcaattgacagaagaaggggatatcagaggaaaacatagggaggagtttctaaaatggccaatatattatcaggagtttcatttcatagatgatcccctaaagctcagttagagagacagcatttaaaaggccattgtcaggtagtgcaatgtcattctcacctcaccactctacctcagatatcatttgcttttccagtcagcgattaggcacatatttattgtgaatcacctaggtgcttaatctgtgccagattcaacacaaagtacaagatattgctttcaagaaacatgtattctcatttagccaatcattgattctaaagaaaaaaatgatataataaagtttatcatcaacttcagaatacagtagagttaatgaacagtgtagtaaactgtttataacagtttggaagtacactttgtatataagatagaattttggacaaaatcttaaatgatgagtagaatttagagacatagactgaaaaagcaaaggaggatggatagtccaagctaaatgagcatcatgaagaaaagtacaatatcaggatttagtttaatatgatagaacattattggtaaggaaggccggttacaactaaagaggaataattgaaaataggcttattggtaaagtggagtgagatgaaaacaagaagagtttaaactcagtgtagaagttgggtccactgttgatctctttccaaattctctcaccaggatcacctgttaatatttgagatttggaatgggggttcatacaaacagccattcaactcactccagagaatccatcatgatttcttagtttggtagcataccacagtggttttcagaggccttctgtatagccttaataattatatatcactgttagatttgtaaaaagtgggtcaacagggacaaaaatcaaaccaaaccaaacaataggctgaaatttattcccaaaaccatagctatgtaattaagagaaaaacacaagaggaatatgaagataatgaagacacccgtttttgtgtgtttttcaccccaaagaggtacagcacaaatcgccagttaatatagaaggggttacattcatacagtaccaggggtttaggtttttttgcagttccctgaagtgtttatgggatgaagcctattcaagaaaacttcattttatgccaggtggcttaaatggggcttctcttaataggccaccctgtattccaaatgggaaagaaaacttctcaggaggcacctctttgtggcaaaacatctaaggcctgaaaaccattcacatatgggtcttgtaagtaacatcctgctccgtgatactttgtgactggagctgaatgaaaagctgcatggctgttttccttccttttgaggatattttttattgcataatattcaatgaaaaacgcacaaggtctttgaaaattcatagcaattttgcatgagcttttgaatctaacattcagccctatttggtagcataatccttattttaaaggtaataaacactgaaaagaattttttccaacatgtggattgtgtcatgttagaatcctgaagttttcacatcaaaagtaaattatgtctgggtcagttcagataactctcaattatccggacttaatttatattaagctttagaatcctttggtgtcttaaccattctttcaagaggttgcagttctgtaagcagctggctatggcgaatgtgtaaatcaatttgctgtgcctgactgagtataatggtacttgaccatgaggacaggccacaggaggaagtcaagctgaaatttaaaactcacaaaatgggtaattccagaggataattgaaagttgactgtaattaacttcatgcttttgttgttgtttttaattaattgtttcttagacttgggttacaagcattcagatatgtatggtgctgttgtgaatatttgcctcattcagagaactaaaccttatcagagcttttaacaaatagtgctcccagctgttgctttcagcaaaggagatctccaattaaagagagtaatcatgttctctctactttcgagactatattccttgttaaattgacttctaggtttcatttcccaaggaatctaacaataataacagaagctaaggatgaacttgaattttaagtctatttcaacaaaaggattatattcatttactaatttgtccagtaaacaggaatgcttaagatgtatacttagatttaataatgtgactgaagactgtgtctctgtctctttatttttagcttagctttgtgtgaaaaaataattaatactgatcttctaatttaatactctctttgtgtaacattgtatgtttcttcttgtaatgatcacaagcaaacatctcttatacatagtgttttcaatctatttgttagccaagttataaaactgtagcctagtcaaatctatggcaaagcaatttgatgatattttgtaaaacaatataatttatttcttcctccccctttctcctttcagctaaatttcaacagtgccacttctgcattctctgttctcaaggcacctggatggtgaccctgggccgtcctctcctcctcttcatgcatgtttctgagtgcatgaagttgtgaaggtcctacatgtaatgcatatgtgatgcatcatcttatcatatattccttcctatacattgtttacacttcaactacggggatgttccacacaaacttaaattactgttggcaaaacaatagggggagattagacaaaaaaaaaaatccacaatattccaagtacaactcttcatcaagtttctctgttaatgccaagatttaacagacttaagaactattgttctctgaatgacagttgtaagagaaatgtaaattttttagaactctttgctgttaatctgttttggtttgtttggtttttttttttttttttaaggtaaaaaaaaaatacaccttcagtttcctggtgtgatcctggttaaaatggatgatttttcattgaaagttttgctgattaacaattaaagtgggatgatatgtgggcaaaatcacttatgaaagtagaagcaagaatcagttggtttgctaccacataaagccatgctgtttttggtcaaactgtgtaaactggaaaaattcacatcatttctgagtttaatcactttaggatatattcacattgttttggtgaatttgctgaattgaattgtttttctttctcaaatctgtgatctcttttctttatcctgtttctttgttcctttcgtttgctttcttatttttcttttgttccattcttttcttacttttttcccttttccttttttggggaggctggctagtagtgtgtgagaaaagaatagaagtgaaatttgcataatgaatgtaaaagggaaataaaagtcttttgaaggtagctatactagcacttttgatcatcttcagggcccacaaaaatgttgtcaagattttaaaggtttataattctgcttaagctctagtttggacttaggtatcctaactatgttggaggtatttgcattgtttaaagttaggataaaagcaagttcctcctgtgactgcaacgtcttactgattgggacagttgccaggaggataccaacttgatagcagagggggttttatgcaaacgcactcacctccgccttggggaatgaaagggtcacttctgcatcatcactagctagttttctagtgttagagaggcttacaaatgtttgccattctcataagtgttttgaacttgatctttgtgacttgtgcttttttagcttctctcttgaatcagagtatcattgtcttcctccaaggagttagaatttcccagtttaaaacaaaaagggaaatgtcctaggttttctttgtgcttctcatttttcctttgttgattcaattcctgtgatttttgttctcttccctgaagtgctttacagtgcatggaatctccatcattgttattttaacgatagtaattcacagtcctcagaagcctatttttaaagcagaagcaaaaaagaaaaacaaaataacaaaaacaacccttcctcttttctctcatctcacctctctgtgttgattactaatcatcttagatattattgctagtggatgtatggtagatgggttgaagcttttctgataattattacacaatttaaaacaacatatatatttaaaataaatatatacagtaaatatattgagccatgttaacctgccaatgagatctgtgaaaaaataatggcctcatttttctctttttaatttcttttacccttttgtgaagcagctatacgtggcatacatgtatttaaagaaaaaaaaatagatgtagagtgttttttttacacttttaacttagcatgtggtgttgaagtattactgtagatcaagtttgtcttccgcactaagatgtgaggaaattgtgatttgttctctccaccacaaatgaattacacatttattatcttctatcattttgaaacactgcagtttaccatgggacactgtatatatttcttgccataatggtaaaggactgattgatatatttaagagttaataaatttgtgatttctgctgacagtgcgtccatctttatttcttcagaagaggtactgtatgtatgcctgcatagtgctggccagtgtcaagggcagtgtgtcctactctggtctcatttagtacataacaatttgcacttggtgagaatggcaagttaattgttctctgtgagcaaaacaatggtctcttctgggaaaatgttgctgagaacaatatagttaacaactaagactcctaaaagcttctctaaactgtaccctccaatccagccttcacatggctgctttttttttttttttttaatacgaacctgtccttgtaacactttgatgttatcatttctgggatacaggcaagcaccccagctcctgctactccccagcttgaacttgagcatacatggatgctcagcttcttttgatttgctaaaaacatcacacttgctcacatgcctgtttatgctgttcatgttgtttatgtttcttacctagaataaatagtctcttcccctacttcttttcccgacttcttactttttcctaagattcagtgtacagcatcatgctccacagcaaaccttcctaggccctattctgggcttgccttccctctcaaaacctacataatagattgtatttacctctcctgtcaaccacattgttttgaaaatatatttctatttgtgtctcctctactgcagtataatgtctccatgggcaagaactgtgtattcatcattgcattcctaaacccaaaccaaggccaggaatggagatatcattgataaatagttgttgaattgaggccaagcccttttgataacagaagcctcaaggggtacccagatagtccttgttttaatgatgggttctctcaccactgtcttgatgctctgagcaagttacctcttccctctgaccctcagtttccatatttgtaaaatgagaataaacataccaacttaataaagatattgtgaggattaatgggtacagagtgactagaatgatatttgatagaaattaaatggtagcagtataactattctgatcactgacattaatattcctattgttattattctttgctcacgagggtatacaactcttgttttgctgttgggctgccctctttatgtaggtttactgttaatgctgaggatatactcggactcaaatgtctcagcagaaggctgagagacaccaaatgaagtggtcatctagctgaatgtaggaaaaatgaaatgtagtagcaaatcagtatattctaaggaaattttcaaggaatattaatcttcacccaaattttgaatttttatgtaaaaaattataatttaagggtaaacatagatgacacagctttcgagtgatttcattgaataaaattctactgacttctatgaacctttcatggctctgtggtctttttatcagattttttaaaggtgagaatgtacaaaaagattacaatgaagatcagcgtactagaccatgtgtccatgaactgaacaacagctgtcataaaccaccctaacctgagaaagcagcaggaagcatttacagcattcctgcttttctctcagacaaaaccaattctcagaagagagctagaatgttctcctgcagactggagtaggaaaagttgataacagattaagcagtaattgtactccagaaggatttgcatttaggcttttgctgctttacaacagaaaaaaaaaattcttgtttgtccgtaaaaagtgtttttatgtttttttaaatgtcaccaacatttaaaaattggatatgtcatgtaaaagtcaagatttctggcttaattaatttgaaaaagtgtaaggtctgccccactggttctgtgttcactacagcagcagtcagagaagctgctgcctgtttcagaagggagcaggcactcccctatccccaccaggcacacacatacttcacatctgccccatgagtttgctgctggctcctgtggacactgaagactttgatctctttctttttttcttttcttttttttttttttttttttttgacagtctcactctgtcaccaggctggagtgcagtggcacgaacttggctcagtgcagcctcatcccgggttcaagcctcatgcctcagcctcctgagtagctgggattacaggtgcatgccaccacacccagctaatttttgtatttttattagagacatggccaggctggtctcgaactcctgagctcaagtgatccacctgcttgacctcccaagtgctgggattacaggcgtgagccattgcgcccagccagctttgacccctttcttaaagccaaagggcacctctgttggcacctcaggccccagtgaacaggtatgggcattggtttgtagagggattgttctcagcatccctaaaaccatgctacttaggcagctgtcttctgctgggcccctgctactaaaatgcttgtcattatttttactttgttttaagaagaaaatcaaggtctacaaaaaaaaaaaaaaagcacaaagtgtttctatggtactatttaatttcttaaaggaagatctgcagctattttacagtaaaatgagtttattttgtcctagtttcaaagtcttcaatggccaagaactgttgggtaatttttattgctgagtctctaggcaggaccaggacaaattgtgaaatacttatacaaattatagtaactttctatctataaccagatgtttagaaactgctttgggatataatggtttgcactatggcctaactcaattgctagcacataatgtagtctgggcttaatctaagttagctctttacaaggctagtagaacctaactcacttgctccttggactttctcacactcttggaaactcacaaccatggatacatcctcttatctgcttgggccatgctcataatcctaaggctgaatgtagctggaaaaacgtgcacctatgctgacaggtcttgttatatattcatggccattgacctgcctcaggtaagccccagaggctgcccaaaaatcatatgtccctaatccattctctcttccagtcttctgtcaactatttcagacttcatttacttttcccacctccaatatttcttcccctattctcactcaggtgaggaccttgctgcttatttcactgcaagaaatgaagtaatctctgcatctctgtgtatgcaccctgctatctcttttattactgtttgtaaataggtcatgcacctaacaaaggccaccacctctgctcacaagtattgctctagcaactctcttcaccttgccttgtcattataaataatttcctccatactagttgtatccaccagtgccccatttctttatagccagattccttgagagccttgcctaaactgctgtctgaaatttctctcctcccattctctcttaaacccactccagttacctttaccactccacagaacagttctctaagtcaccaatgactaccatgttgttaaatcaaggatccattttctgtcctcatttttacttcatctctcagcagcatttgacagagttgttcattgtctcaatctttaaacattcttcttttgtcattcaaacaatacatttgcctgattttcctcccagctttatagatgctccttcccagtctctgactggtcctttttcatcaacctgacttttacatttggaagactttttgttttcattatttttttttctgtctgtttttgagacaaggtcttgctgtgttgcttaggctagccttgaactgggctccagtgacctttctacctcagcttcctgagtagctgggactatagcacatgccaccatgcccagcttgacttttaaatttggaactcatcttcattctctcccagggtaattgcatctaatctcaatggcttcaaattatattaatgattcttaaacatatctctccagcttagatcactcccctaaactccaaacatatatattcagctgcctattggaaatctacattatacatctactaggcatgccaaattaacatgtcataaactgaacacctgatagtctgtaccaaaaccctttcttataactctttccatatctcaaggatggataactcaattcttccactgatcagaccagaaatcttggtatcattcttaattcctctctttctatttgaaattccttcaaaacataatcagaatgtgaccacttctcacaatactgtctgctacctctcttgaatcaaatcatcatcctgttatctatattactgaaatatcctcctaacagtttcttggcttctgctctttgtctattctcaatgcagcagccagaataaacttgttaaaatatgtcaaagcatgtcacttctctgctaaaaatcatctgatagtttctgctttcactcaaagagacaaagtgagtt

SEQ ID NO: 2 - RNA, 5974 nt, Homo sapiens
  source 1..5974: mol_type = mRNA
aaaggagggagtgcgagagatccacgaagggacaggcttggagtcgctagagggaggtgtgggaccagcgaggagggggcttcgccagggagggggtgctggcaggcggagggagcggcgggaggaggcgccggaggaggagacggaggcctggggacggcagaagaggcttcgcctgagccgagcgctctttctctcgccgcgccgtcttgaagccgcgcgggctcgtgagcagcgcgaggccgccaaggtgcctcgcttcgccggagccgctgccgcccgccggagggaagccggcctcgggcgcgcacgctcgtcggagccccggcgcgccccgcgcctgagcctgctgacagcggccgctgggctcaggctgtccgctctgggctccgcggcctcggccccgctgcactccacctccgccccctcggactccctcccctctgcttctactcctcctgctccagtgcggatcgtttcgcaactgcttgccactcgtcccgtgcctggctgtttttccatttcccggccccctcttcttgagtactttaccccctgcatttggggacagggactggaaaaggggcgggtggagcgtccagtggagaagaaggaagcgaggcccgcaggaggaggaggatcggcggactgtggggaggagaccccacgccaccctttctggtcatctcccctcccgccccgcccctgcgcacactccctcgcgggcgagctactttcggaccaggaaagtaagagcggccctgggtgacagcgccgcggggccagtcccggggttagccgcgcgtctgctcgcttctggtccgtcgcgctcccagccagggcacagcccggaccgaggatggcttcgaccacaacctgcaccaggttcacggacgagtatcagcttttcgaggagcttggaaagggggcattctcagtggtgagaagatgtatgaaaattcctactggacaagaatatgctgccaaaattatcaacaccaaaaagctttctgctagggatcatcagaaactagaaagagaagctagaatctgccgtcttttgaagcaccctaatattgtgcgacttcatgatagcatatcagaagagggctttcactacttggtgtttgatttagttactggaggtgaactgtttgaagacatagtggcaagagaatactacagtgaagctgatgccagtcattgcattcagcagatcctggaggctgtgctacactgccatcagatgggcgtggtccatcgggacctgaagcctgagaatttgcttttagctagcaaatccaagggagcagctgtgaaattggcagactttggcttagccatagaagttcaaggggaccagcaggcgtggtttggttttgctggcacacctggatatctttctccagaagttttacgtaaagatccttatggaaagccagtggatatgtgggcatgtggtgtcattctctatattctacttgtggggtatccacccttctgggatgaagaccaacacagactctatcagcagatcaaggctggagcttatgattttccatcaccagaatgggacacggtgactcctgaagccaaagacctcatcaataaaatgcttactatcaaccctgccaaacgcatcacagcctcagaggcactgaagcacccatggatctgtcaacgttctactgttgcttccatgatgcacagacaggagactgtagactgcttgaagaaatttaatgctagaagaaaactaaagggtgccatcttgacaactatgctggctacaaggaatttctcagcagccaagagtttgttgaagaaaccagatggagtaaagataaacaacaaagccaacgtggtaaccagccccaaagaaaatattcctaccccagcgctggagccccaaactactgtaatccacaaccctgatggaaacaaggagtcaactgagagttcaaatacaacaattgaggatgaagatgtgaaagcacgaaagcaagagattatcaaagtcactgaacaactgatcgaagctatcaacaatggggactttgaagcctacacaaaaatctgtgacccaggccttactgcttttgaacctgaagctttgggtaatttagtggaagggatggattttcaccgattctactttgaaaatgctttgtccaaaagcaataaaccaatccacactattattctaaaccctcatgtacatctggtaggggatgatgccgcctgcatagcatatattaggctcacacagtacatggatggcagtggaatgccaaagacaatgcagtcagaagagactcgtgtgtggcaccgccgggatggaaagtggcagaatgttcattttcatcgctcggggtcaccaacagtacccatcaagccaccctgtattccaaatgggaaagaaaacttctcaggaggcacctctttgtggcaaaacatctaaggcctgaaaaccattcacatatgggtcttctaaatttcaacagtgccacttctgcattctctgttctcaaggcacctggatggtgaccctgggccgtcctctcctcctcttcatgcatgtttctgagtgcatgaagttgtgaaggtcctacatgtaatgcatatgtgatgcatcatcttatcatatattccttcctatacattgtttacacttcaactacggggatgttccacacaaacttaaattactgttggcaaaacaatagggggagattagacaaaaaaaaaaatccacaatattccaagtacaactcttcatcaagtttctctgttaatgccaagatttaacagacttaagaactattgttctctgaatgacagttgtaagagaaatgtaaattttttagaactctttgctgttaatctgttttggtttgtttggtttttttttttttttttaaggtaaaaaaaaaatacaccttcagtttcctggtgtgatcctggttaaaatggatgatttttcattgaaagttttgctgattaacaattaaagtgggatgatatgtgggcaaaatcacttatgaaagtagaagcaagaatcagttggtttgctaccacataaagccatgctgtttttggtcaaactgtgtaaactggaaaaattcacatcatttctgagtttaatcactttaggatatattcacattgttttggtgaatttgctgaattgaattgtttttctttctcaaatctgtgatctcttttctttatcctgtttctttgttcctttcgtttgctttcttatttttcttttgttccattcttttcttacttttttcccttttccttttttggggaggctggctagtagtgtgtgagaaaagaatagaagtgaaatttgcataatgaatgtaaaagggaaataaaagtcttttgaaggtagctatactagcacttttgatcatcttcagggcccacaaaaatgttgtcaagattttaaaggtttataattctgcttaagctctagtttggacttaggtatcctaactatgttggaggtatttgcattgtttaaagttaggataaaagcaagttcctcctgtgactgcaacgtcttactgattgggacagttgccaggaggataccaacttgatagcagagggggttttatgcaaacgcactcacctccgccttggggaatgaaagggtcacttctgcatcatcactagctagttttctagtgttagagaggcttacaaatgtttgccattctcataagtgttttgaacttgatctttgtgacttgtgcttttttagcttctctcttgaatcagagtatcattgtcttcctccaaggagttagaatttcccagtttaaaacaaaaagggaaatgtcctaggttttctttgtgcttctcatttttcctttgttgattcaattcctgtgatttttgttctcttccctgaagtgctttacagtgcatggaatctccatcattgttattttaacgatagtaattcacagtcctcagaagcctatttttaaagcagaagcaaaaaagaaaaacaaaataacaaaaacaacccttcctcttttctctcatctcacctctctgtgttgattactaatcatcttagatattattgctagtggatgtatggtagatgggttgaagcttttctgataattattacacaatttaaaacaacatatatatttaaaataaatatatacagtaaatatattgagccatgttaacctgccaatgagatctgtgaaaaaataatggcctcatttttctctttttaatttcttttacccttttgtgaagcagctatacgtggcatacatgtatttaaagaaaaaaaaatagatgtagagtgttttttttacacttttaacttagcatgtggtgttgaagtattactgtagatcaagtttgtcttccgcactaagatgtgaggaaattgtgatttgttctctccaccacaaatgaattacacatttattatcttctatcattttgaaacactgcagtttaccatgggacactgtatatatttcttgccataatggtaaaggactgattgatatatttaagagttaataaatttgtgatttctgctgacagtgcgtccatctttatttcttcagaagaggtactgtatgtatgcctgcatagtgctggccagtgtcaagggcagtgtgtcctactctggtctcatttagtacataacaatttgcacttggtgagaatggcaagttaattgttctctgtgagcaaaacaatggtctcttctgggaaaatgttgctgagaacaatatagttaacaactaagactcctaaaagcttctctaaactgtaccctccaatccagccttcacatggctgctttttttttttttttttaatacgaacctgtccttgtaacactttgatgttatcatttctgggatacaggcaagcaccccagctcctgctactccccagcttgaacttgagcatacatggatgctcagcttcttttgatttgctaaaaacatcacacttgctcacatgcctgtttatgctgttcatgttgtttatgtttcttacctagaataaatagtctcttcccctacttcttttcccgacttcttactttttcctaagattcagtgtacagcatcatgctccacagcaaaccttcctaggccctattctgggcttgccttccctctcaaaacctacataatagattgtatttacctctcctgtcaaccacattgttttgaaaatatatttctatttgtgtctcctctactgcagtataatgtctccatgggcaagaactgtgtattcatcattgcattcctaaacccaaaccaaggccaggaatggagatatcattgataaatagttgttgaattgaggccaagcccttttgataacagaagcctcaaggggtacccagatagtccttgttttaatgatgggttctctcaccactgtcttgatgctctgagcaagttacctcttccctctgaccctcagtttccatatttgtaaaatgagaataaacataccaacttaataaagatattgtgaggattaatgggtacagagtgactagaatgatatttgatagaaattaaatggtagcagtataactattctgatcactgacattaatattcctattgttattattctttgctcacgagggtatacaactcttgttttgctgttgggctgccctctttatgtaggtttactgttaatgctgaggatatactcggactcaaatgtctcagcagaaggctgagagacaccaaatgaagtggtcatctagctgaatgtaggaaaaatgaaatgtagtagcaaatcagtatattctaaggaaattttcaaggaatattaatcttcacccaaattttgaatttttatgtaaaaaattataatttaagggtaaacatagatgacacagctttcgagtgatttcattgaataaaattctactgacttctatgaa

SEQ ID NO: 3 - DNA, 39000 bp, Homo sapiens
  source 1..39000: mol_type = genomic DNA
gattgtattgtgtatatatgccccaaactctttatttattcatctgtcaatagacacttgggttgtttgcctatctggaccatggtgaataatgctgctatgaacatgagtgcacagatgtctttgtgaggtggtgattttatttcctttggatacacactcagaagaaggattgctgggtcatacggtagttctatttttaatttctttaggaacctccatattgttttctgcaatggctgcaccaatctgcattcccagcagcaatgtgcaagggttccctgttcttcacgccctagccaatgtttgtctcttgtcattttgctaatagccatcctaacaggtttgaggtggtacctcattgtgggtttggtttgcatttccctgatgattagtgatgttgagcacttttttgtatacatgttgaccatttttgtttcttttttagagaaatgtctattcagttcctttcttcattttaaaaatcagattatttgttttatgctttgagttgtgtgaattccttacatattttgcatattaactacttatctgatatatggcttaaaactattttcttccaatttgttggctaccttttcactctgttgattgtttcttttgctatacaggagctttttactttgatgtattcccacttatttatctttacttttgttcctttgcttttgttgagacattaaaaatatccatgccaaggctaatatcaagaagttttctcctctgttttctattttttatatttagttttttatctgtttagagattgggtctcattctgttacccaggctggaatgcagtagtgtcattatagctcactgtaacctcaaattcctgggctcaagtgatcttcttgcctcggcctcctgagtagctgggctacaggtgcacagcaccatgcctggctaatttttttttttttaattttgtagacacaaagtctcactatgttgcccaggctgactgtgaacttctggcctcaggtgatcctcctgcctcagcctcccagagtgctgggattacaggcatgagccaccatgcctggcttcttctctattttcttctaggagttttacagttttagatcttatgtttagatctttaatccattttgagttggtttttgtgtgtgccaagttttattcttttgcgtgtggaaatccagtttcaccaaaagcttaatttttcaaaatcttatatttttcttgatttttttttcacacttctatagccaacatctttattgaagagattgtcctttctccattgtgtcttcttggtgaccttgtcaaagaattagttgactgcatatacttgagtttatttctgttccactggtctatgggtctgtttttataaaggcatggatttttactgcatatgaattatacctaaatttgtcttttttttttcctttttctggagaatggggtctcactatattgcccaggcaggtctcgaactcctgggctcaagctatcctcccgcctcttgcctccctgagagctgggattacaggcgtgagccactgcgcccggctgaattatacctaaattaacttgactaaacaaacaaaaacaaaaagatcccaggttcagccaatgagctcctttttttttttttgaaatggagtcttgctcttgtcacccaggctggagtgcagtggcacaatctcagctcactgcagcctccacctcccaggttcaagtgattctcttgcctcagcttcctgagtagctgggattacaggtgcccgccaccacacccagctatttttttttatatttttagtagagatggggtttcgtcatgttggccaggctggtctcaaactcctgaccttgtgatctgcctgccttggcctctcaaagtgctgggattacaggcatgagccactgcacccaggctgagctcctttcttttggagcatatttggtctgctttctctctagcttcagcacctgaagtttttgctgctcctgcctcagctccagccccgaatgacacctttcacctggttcatggagactcaggtctgctgtcatgcccctaagcaggactagatgcctctctcatgttgtagagcattctctctgcagttctgtagaaaggtggtagtcatcggaaccaactgcttattctagcttctctgtgccaggctctgttttaaaggcctcacgtttagccattcactcagtgttttctgacagccttctaggataggtaccgttatttgggttgatgtagtgcttggtcaaatgcagtataatgaagggatcaaggagggggcaattccaagcaaaaccacttgttcatccatcctgagtctaggagatttggaagatctaaagaagtagcaggcaattattgtcacccttttacaggtatgaggcacagacagacccagtcatttgctgacatccctccactgaactgggtgctcgtccttttcactcacccagaggctgagcgagtgcctctcacccaccaagctctgttgaacttgtgcctttgccggtctgtggtcctgcggccgtctcatgagctgcagagtaggtctgtgtgtgtctctcctcaagctactcaagctgaggctttgtgtgcatgcctgccacataccagccattccgtgagtgttagtggaacaggtgagtcaatgagtcagggagtaaaatttgtgctttaaaagtagaacatgtcggagagaacctgtactgccttccagccatcttgctgtgagaggacagggcatggactctggagtttgaaggctgggtcaggtcatgctctggattctttactcactcgcatggcatgtccttagtttcacttccctcactctcagtggagccgttgcagcgggcagtgtcagaggcaacatccatttagcactgccgatttgacccccagccccatctcatactggcctcccaccctgcttctgtggggtgcctcagaggagagcaaggtgaaccccagtatggaaccgagacacggttttgacaacactgttgatcccatttggaaaatccagctatgtgattaaccattagtctctctgcctctgctctgatgtaagtggagaccacatccttcctgccccttctggggctgcgactgctataaattcattgcatttcctctctagctgttcctgaggctggcatctgggtaagtccagctccgcggggcagtgtgggcgacaggaccgggagagcagtgggggagattgtgttcagagggcagaacttgtcctggttaatgcactaggaatttcttctggcgtctccaaggttgtgcttcaacaacatttctggaatgttcttttatcattatttgggctctacgtgtgcaagttcgtgtgtgtgtatgtggcggggggaagcggggaggacagcggcagcaaccatagtttacacccacgacttcagcagatttgcccagtatccctcccaggggagaagatggatgggatatacagaaggaaacaaacctccttaaagaccaaagggcagcagatttttgtgctggtgttagggtggaaggagcacagaagaaaggcagaatcctgatgcagatggaaggactgatggggcaggagctgggagggtatgcggagctaatagggctgtctggagagcagtcacctcaggatgggcaggagctgggagggtatgcggagctaatagggctgtctggagagcagtcacctcaggatgcacagggctgggtttgcagggctcaggaggcgaggagtagataggcaggaatggagatgggacgggagagatgagtgagtctgaggcatcttgacattgaactgcagtcacagaaattccaatttggagagctccaccgttttccaggctctctgcctcccttgagtgttatttatggctttaggttgaggtgctttgccaaatagagtataatcaagggatcaaggagggaacaattccaaacaaagccaacttgttcatccatccggactctaggagatatggaagatctaaagatacagcaggtgattgctagtttttgtggaactcacagtctagttgggaagactatgttggtgaatgctgcagtgatacacctgtgataaatgctggggaagtgtgtcttttagtcatctattttgttgtctttgtctttgtctgactgaaacaagtgatggaagacatggtctcatatctctggtcaaaatcctggctctgttccttcctggttctaaacccctcggcaggcttcctagtccccctaagactcagtttatgcatctataaaatggggctaggaataggtgcacctcatagagctctgtgcaggttagatggggaaaaacatcagtgagtgcctagcctgtggaaagctctaaattaatgtgaattataatgataacaattgcgaattttgcaaggagacattaaaggatgtatgtttttatttattttattttattctattttattttttgagatggagttttgctcttattgcccaggctggagtgcagtggtgtgatcttggctcatcgcaacctccgcctcctgggttcaagcgattctcctgcctcagcctcccgagtagctgggattacaggtgcctggtaccatgcccggttaatttttgtatttttagtagagacgggatttctccctgttgtttggtgagcctggtctccaactcctgacctcaggtgatccgcccacctcggcctcccaaagtgctgggattacagggatgtatgtttttattattctccattatgcactcccagcttcatctcacttcaatccactggttgatagaagtgcagtcaaagactgtcccctcctctgcaagcttttatgttctctctcctctctccctagccacgtcctgttctgttatcaacacacttactcacctcctggccttctccttctattgtctctcatccctcttccctcacaaaaacagaagcaaagagccagagccttcagtttggaggaactgaaaacattctcttctgctttctcattttgtagatgaggaaactgaagttgaggaatagtgaagagtttgtccaatgtcatagccccgtaatcaacgggacaaaaattttcttgctgatgggtcaagatggcatcgtgaagtggttgttcaccgtaaactgtaatacaatcctgtttatggatttgtttgcatatttttccctccatagggaaacctttcttccatggctcaggacacactcctggatcgagccaacaggagaactttctggtaagcatttggctaacttttttttttttgagatggagtcttgctgtgtcgcctaggctggagtgcagtggcgtgatcttggctcactgcagcctccacttcccgggttcaatcaattctcctacctcaacttcctgagtagctgggattacaggcgcccgccaccacacccggctcatttttgtacttttagtagagacacagttttgccatgttggccaggctggtcttgaattcctcagctcaggtgatctgcctgccttggcctctcaaagtgctgggattacaggcgtgagccactgtgcccggccttggctaacttttcaaaattaaagattttgacttgttacagtcatgtgacatttttttctttctgtttgctgagtttttgataatttatatctctcaaagtggagactttaaaaaagactcatccgtgtgccgtgttcactgcctggtatcttagtgtggaccgaagcctaaggaccctgaaaacagctgcagatgaagatggcaagcacccgctgcaagctggccaggtacctggaggacctggaggatgtggacttgaagaaatttaagatgcacttagaggactatcctccccagaagggctgcatccccctcccgaggggtcagacagagaaggcagaccatgtggatctagccacgctaatgatcgacttcaatggggaggagaaggcgtgggccatggccgtgtggatcttcgctgcgatcaacaggagagacctttatgagaaagcaaaaagagatgagccgaagtggggtgagtggaaggaagacttttaaaaaaaattgtggccaagtgcacatagtgtacaattttccatctttatatatatatatatatatatttttttttgagacggagttgctcttgttgcccaggctggagtgcaatggtgagatcttggctcactgcaacctccacctcccgggttcaagcgattttcctgcctcagcctcccaagtagctgggattacaggcattgcacctccacgcccggctaattttgtatttttagtagagatggggtttctccatgttggtcaggttggtctcaaactcccgacctcaggtgatccacccgcctcggcctcgcaaagtgctggaattacaggtgtgagccaccgcgcccggccgtaataatttttaaatgtacagttcagtagtgttaggtacactcacattgtgcaaccagtctccagaactgttttcatcttgcaaaactgaaactcctcacccattgaatgataactcctcattgcctcattctcccagccctggtaaccaccattctatttgccatctctgtgaatcttactactctgggtacctcatataagtggaaacatacagcattttttcctttatgagtagtttatttcactcagcataatgtcctccgggttcaactatgttgtagcatgtgtcggaattcccttcctttaaaaaagactgtataaatactccatggtaccatataccaaattttgtttagttatctgttgatgaacacctggattacttctacctttttgttattgttaatgctgttatgagtgttggtgcacaaatatctcttcaagaccctgctttgaattctctggggtatatactcagaagtgaaatttctgaatcatacggtaattctgttaaatattttgaagaactgctctactgttttagataccatctgcaccatttcccaccaacagcacacaagggttccaatttctccatatcctaagaacacgttatttttatttattttttcttttttatagtagccattctaatgagtgtgaggtggtatctcactgtagttttgatttccgtttccctaatgataagtgatgctgagcacattttcactgcttgttggccatttatagagcttcttcagagaaagttctgttcaagttcttttctcattttcagaccaggtttggcttttgttgttgccttgtaggagttctttatgtattctagatattaaccccatatcagatatatgatttacaaatattttctcctattctgtgggttgtcttttcatttggttaactgtgtcctttgatgcacagaagttagtatgatttttttttttttaaatcatggccgggcatggtggctcatgcctgtaattccagcactttgtgaggctgaggtgggtggatcacctgaggtcaggagttcaacaccagcctggccaacatggcaaaaccccatctctactaaaaatacaaaaaaaattagccgggtgtggtggtgggcacctgtaatcccagctactcaggaggctgaggtaggagaattgcttgaacatggggagtggaggttgcagtgagctgagattgcaccacggcactccagcctgggctaaagagcaagaccctgtttcaaaaaaaaatttttttttcttgtattgtcttggttttttctcttttcccctctcacggtagtgctatgagaaggtggaggcaaactgtttgctttctctaactcctttaaaaagctgatgcagactgtacctaccccctgggcacctgccatgattagtccctctttatctgaatctcagcagtgcctagacctgcctccaattctccatccagcttctcagaccacatgttttgtccagtatctgctgtgtggtcagcaggcttgggcctctgcttcctatggcccagagggcagcctctctccttgaagaaccgtggagtttggggcagaagcctttcctttcaccaccactttgggaattggaatgtaaaagaaattctcttaatccccatgtacacattggggataaggttctttcttttgtcttgtgttctaggcaaaggtagggctcagagaagggcagggtattgcaggatgatgatgtagagctggtggtgatgggaaggaggagtacaaatgagtcagtggatagggagacacatgttaaggcagggcagcagtgtgggtgtaatgacactggggaaacagacagcagtgtgcagccgggggaggtcagaaaccagttgctgcaatggctctcacctgtagtcccagctactcaggaggctaaggcaggaggatcgcttgagcccaggagctcaaaaccagcctgagcaacatagggagacctcatctctaagtaaataaagcaattatcattgtgtcagtacttatatactcacatacccaaatgaaagtgtcataatcacaactgtagaagtactttgctaagcagtttttatggattttatggcacattcaagaaacccatgaaacagcttctggtattatccctcctgcaagtgaatgaggtgagcctggaagagatcctaactggcccatggtttatttctagccataaccagagctggggtaaaaagcagggcatgtctctgatcaaagcctggctcttaaccactacaccgtctttgcttccatatctggattttgaggcagaaaagttataactagggttagaagtttgtttgtttgtttcctggggtggggttaggttttaggtaatagactttggctaatttactgtcatggctcctacctgagtcccagttactcaggtggctgaagtgggtgcatcacttgagctcaggagttccaggctggagtgagctatgaccatgccactgccctccagctttggaaacaaagcaagactctgtctcttaaaaaaaaagaataagattttggttttggcttagattttttggattttattttgtgatatggttaccaagtagacagctgtcagaggtcttttatgggctgggcgcagtggcttatgcctgtaatcccagcacttcaggaggccaagatgggaggattgcttgagcccaggagtttgagaccagcctgggcaacatagtgagaacctgtctctacaaaaaatgcaaacattagttaggtgtggtggcacgtgtcaatagtcccagctgttctggaggctgaggtgggaggatcacttgagcccaggaggttgaggctgcagggagccatgattgtgtcattgcactccagcctgggcaatagagtgaggccctgtctcaaaaaaaaaaaaaaaatcatttatgttacttgtagattcctgcccacctgaagttatctgtcttatatatttcccctagtgactaactcttgttttacctaacctgaatttctcctatagaatgccttcttaagatatgctatctagtgactgtttggatttgtgattctcaacacagatgcatgttggaatcacctgggagcttttagtatgtgatggttcctgggcctcacctcagagggactgaaaaagaacctctgggcgtgcagtcctgaagtccatatttttaaagcttcctgggtgattctaaagtcagccaggattcccaaccactagattaggcacgaaatagactggtcgttctcactcttgaagaaccagacatctagacttgacaatagaagacgtgtgtaaaatggattgcagggaactgcggtcagggaagggtgacctttcttagcccacagccgtgttggggatataggagagcttggagatgccctcacaatcaggctgccaggggcaggcaaaagcaaacgagggtaaaagaaacttagcctgcttcgcatgtttgctgattgatttccaggcctgaggaagagattctgagactggggacagtgggaacacatgcttggcaggtggacagcagaagttgttttgaaactaggagtgcagaaatgctcccaaccagacttttgactggatacctgtcctctgcaactcagagccatgttttgatttgggggatgtttggggtctcctctctcatgccaaatattaggccaggtttcaattgcatcctctgtgataatagttctgggttttgacaccttttttttcccttttaggttcagataatgcacgtgtttcgaatcccactgtgatatgccaggaagacagcattgaagaggagtggatgggtttactggagtacctttcgagaatctctatttgtaaaatgaagaaaggtaagcgactggggtggtgcttctagttgagttttaagacctggttcaggaggctctgggaagctgagcagctgggtaacttggccatactataggttcctgctctttggaatgcaaaggcctgtctcaggaaatccattgtcagttgaagaaacaaattcatgtttgtgtggctcttgcagtcccagagccagcggcggtgattaagcgtttcaagtttgataaggcataggatgcagattacttaaaggaataagattgattcaaatgatctttgggctggtagctacacatagagatgggccttctgctcagctgtgtatcttaaaaacttgacaccagagattctcggcacctttcctacccagtggggaggagctgcaccttccatttctccattccggttaccactcgcttccgatgacaggccccagctgagagcgcatctcaggtggatgtgtgtatactttccccctaacttcctgtctttgccgtagattaccgtaagaagtacagaaagtacgtgagaagcagattccagtgcattgaagacaggaatgcccgtctgggtgagagtgtgagcctcaacaaacgctacacacgactgcgtctcatcaaggagcaccggagccagcaggagagggagcaggagcttctggccatcggcaagaccaagacgtgtgagagccccgtgagtcccattaagatggagttgctgtttgaccccgatgatgagcattctgagcctgtgcacaccgtggtgttccagggggcggcagggattgggaaaacaatcctggccaggaagatgatgttggactgggcgtcggggacactctaccaagacaggtttgactatctgttctatatccactgtcgagaggtgagccttgtgacacagaggagcctgggggacctgatcatgagctgctgccccgacccaaacccacccatccacaagatcgtgagaaaaccctccagaatcctcttcctcatggacggcttcgatgagctgcaaggtgcctttgacgagcacataggaccgctctgcactgactggcagaaggccgagcggggagacattctcctgagcagcctcatcagaaagaagctgcttcccgaggcctctctgctcatcaccacgagacctgtggccctggagaaactgcagcacttgctggaccatcctcggcatgtggagatcctgggtttctccgaggccaaaaggaaagagtacttcttcaagtacttctctgatgaggcccaagccagggcagccttcagtctgattcaggagaacgaggtcctcttcaccatgtgcttcatccccctggtctgctggatcgtgtgcactggactgaaacagcagatggagagtggcaagagccttgcccagacatccaagaccaccaccgcggtgtacgtcttcttcctttccagtttgctgcagccccggggagggagccaggagcacggcctctgcgcccacctctgggggctctgctctttggctgcagatggaatctggaaccagaaaatcctgtttgaggagtccgacctcaggaatcatggactgcagaaggcggatgtgtctgctttcctgaggatgaacctgttccaaaaggaagtggactgcgagaagttctacagcttcatccacatgactttccaggagttctttgccgccatgtactacctgctggaagaggaaaaggaaggaaggacgaacgttccagggagtcgtttgaagcttcccagccgagacgtgacagtccttctggaaaactatggcaaattcgaaaaggggtatttgatttttgttgtacgtttcctctttggcctggtaaaccaggagaggacctcctacttggagaagaaattaagttgcaagatctctcagcaaatcaggctggagctgctgaaatggattgaagtgaaagccaaagctaaaaagctgcagatccagcccagccagctggaattgttctactgtttgtacgagatgcaggaggaggacttcgtgcaaagggccatggactatttccccaagattgagatcaatctctccaccagaatggaccacatggtttcttccttttgcattgagaactgtcatcgggtggagtcactgtccctggggtttctccataacatgcccaaggaggaagaggaggaggaaaaggaaggccgacaccttgatatggtgcagtgtgtcctcccaagctcctctcatgctgcctgttctcatgggtaaggaaactcggcttccaggtgcttcctcctgcttcctcgccagcttcttcttggcgcttgcctcctctcatctcttttcaactatcttccaaatactgttgccacagctacatcataatgccaccactgtctgtttgagactccttcatgagcaaagattgatgtatggtaggtggataaatgggatgaggaaaaaaaaaataaaacaaggaacaaatgtttggggaatgccagtttagcacaaggtattaagtaggatgtaggattgcctacaaatatttgtcaactgaaatttcttgtaagctacttggagcactagtgcctaagagtcagtcaatgtctgtggggcagaacaatgccagagagtctgtgtcccaggagcgaggggacagagggcctcagagctggaggctggggggatgtttcttagaaatgtgcaatctaagcctcctttaaggaatggtgggacctgggcgcatagagaagaaattaaaggaattctgcactgaagactggtatgagccaaatcatgaatgcagtctgagaaaaagtgtgtgcaggtgacagtggagagagacacagtttccttggaaaaaaacatgatgaaggtaaatcaagggaaatagagcagaaatgtggagaccctctttctaggcccccatgttgctctgcactgggcattgccaaaaccccgttttcgggtctgttcacacacttgctgggtggttggaagctagtggccaagtctgtgcaatgaagtggttgagtcacctgacttctgagtcccttttgggtttatcgttcagtgcctcctgcagaaggaccacccacagtggttgtaggaaggtggccaccctgtgatgtgtgagtttagcctggatagaagacacttgacgtggggcaaaattaagggaaacaggaggcttggcccttccacaggcaacaatgagtttcagctttcttgatccgttgacattaccatgaccaggaccaccttcctagtcatggtttggccatgaaggactgactgcccacagggccgcagtggtggtgaagacccaggtcctggtcacagggacttgaggtctggctgtgggacagtccggaaacaagtgcagatgtcggggagggggtcatgggctctgacaaggaaacttgcagagtatccaaagcacaaggggacgaacctgttcaccagcggggcacgggtgggtgtccccgctcagccagcttccggaggatgggcagtgagagagtgagagaaggaaaggggcagccaggctgggggcttacggtgttgagagagagggcaggtgtgggaaagcagggtacggtttctacggcagcaaacagttccgagtgactggaaaaaagacagttgtcttcattcatcaggttgccataacaaaacactgcaggctggttggcttataagcaaaaggaaggttcaccttacggttctggaggctgggaagtccatgatccaggctctggcagatctggtgtttggtgagggcctgttccctggtcgatggtgccttctcactgtgtccttacatggtgaagaggcaaggcagctctctggggtccctttcctaaggacagcaatcccactcctgagggctccaccctcataacttaaccacacctcaaaggccccatcgcctgatacgtcatgttgagggttaggatttcagcgtatggattttggggcacacaaacattcagaccatagaaatgggagaagaagagtaagacagagagaaaagtaggcagaactactcattaagagtgaggtggaaggtggagagggcagggagaccttatgaagatcacacatctgtgaggaaggtttgcacactctcactgaagccccggtaggaggctcagcacccatttctctagatagcaccttccttcctctgaggacagattctgactggagccctggtagggggctcagcacccatccctctagatggcacctgccttactctgaggacagactctcactgaagccccggtaggaggctcagcacccatttctctagatagcaccttccttcctctgaggacagactctgattggagccctggcagggggctcagcacccatttctctagatagcaccttccttcctctgaggacagactctcactgaagccccggtaggaggctcagcacccatttctctagatagcaccttccttcctctgaggacagactctgattggagccctggcagggggctcagcacccatccctctagatggcacctgccttactctgaggacagactctcactgaagccccggtaggaggctcagcaaccatttctctagatagcaccttccttcctctgaggacagactctgattggagccctggcagggggctcagcacccatttctctagatagcaccttccttcctctgaggacagactctcactgaagccccggtaggaggctcagcacccatttctctagatagcaccttccttcctcaggacagactctgactggaaccctggtagggggctcagcacccatccctctagatggcacctgccttactctgaggacagactctgacgggagccctggtagggggctcagcacccatccctctagatggcacctgccttactctgaggacagactctgactggagccctggtagggggctcagcacccatctttctagatggcagctgccttactctgagggcaggagcttgctttgtatgttccagtcccttctgagaaccagaagcctgagcatctattagaaatgcaggattgtggacccaatcttagacctagagagctagactttgcatttgaatgagagctacaggtgattcaaaggtgactgcatgtgtgggtgcagtggctcttgcctgtaatcctaggttttgggaggccaagatggggggattgcttgaagccaggaattcaagtcctacctgagcagcaaagtgagagcacctctctacagaaaaacaaaagcaaaaatgtgactgcatgttggagccacctggctttttttaaataaaaaagatccatatagctggacacagtgactcgtgcctgtaacctcagctactcgggaggctgaggcaagaggattgcttgagcccaggagtttgaggctgcagtgagctatgatcatggcactgcattccagcttgggtttcatctgaaaaaaaatttaaaaaattcatctagttccacctcagagcttctgattttatttccatggatgtggcctgggcttgcgattttctttttcttttttttttttttgagatgaagtcttgctctgttgcccaggctggagtgctgtggcatgatcttggctcactgcaacttccacctcccaggttcaagtgattctcctgcctcagcctccctaatagctgggatgacaggctcgtgccaccacacccaattaatttttgtatttttagtagagagagggtttcaccatgttggccaggctgatcttgaactcctgacctcaggtgatctgcccgcctcggcctcccaaagtgctgggattacaggtgtgagccaccatgcccagcctggcctgaggatttttgtgagcactcctgatgctgttgtgtagccaggagtgaggactgccctctgatcacccagcacagaacgttcagggccatgttgggacagtggactggtaagggcgagaggaggacactggggagcaggctgtagggtgccacagtccgccacagtcacaggctcatgctctccgtccgagaggaggcagaactgcttttaccaaggctcatccagccctcttcatttctctgggaacaatttttggtttcgtgacccatttcttaatccccggaaggcatttctctgaactggtgccaggcaccccggcccccagctccagttagttattattcgaggctgatttcttttctgtctgtcttccttctaattcctagattggtgaacagccacctcacttccagtttttgccggggcctcttttcagttctgagcaccagccagagtctaactgaattggacctcagtgacaattctctgggggacccagggatgagagtgttgtgtgaaacgctccagcatcctggctgtaacattcggagattgtggtgagtccccgtgcatgtgatctgtgtgagtgcaagttcatatgagagagagagagagaaacagactggagaaagatcttcaggaccaggttgctggtgtggtttctttcttttctttttctttttttctttttttgaggcagagttttgctcttattgcccaggctggagtgcaatgccgtgacctcggctcactgcaatctctgcctcctgggttcaagtgattctcctgcctcagcctcctgagtagctgggattacaggcacccaccaccatacccagctaattttttgtatttttagtagagatggggtttcatcatgttgtccaggctagtctcgaagtcctgacctcaggtgatccgcccgcctcggcctcccaaaatgctgggattacaggcatgagccaccgcacccggccggtggtgtggtttctgctgtaacaaagtgccacagactgaatggcttcaacaacaaaaattcattttcttgcagttctgaggccgaaagtctaagatcaaggtgtcagcagggttggtttcttctgaggccgccctccttggtttgtagatgcccccttctccctgtgtactgatgccatcttgccttggggggaagagtggcctagtctcctcttcttacagggacagcagtcctgatggattaggcacagtcaggcatgactacacaagacctaatgttaatctagtcactcctttaaagaccccatttcccaaaacagccacattatgaggtcttgaggattagggcttcaacatgtaaatttttgggggggcacagttcagcccagaacaagtgagaaggtagaatgggttggaggccagctggggaagttttgtgtggggaagaatgaatgaggaactaaaaaaaaagtcatttcttgaaacaaccatgatgctcgatatattccatttcctcatgggccatgttcatagatgagagttggagaatttgccatttacaacaatggcaacctcacctaaaaactatgaaaatactttttttttttttctttgagacaggacctctctctgtcacccaggctggagtgtgtgatcacagcttactgcagcctcgacctcccaggctcaagcaatcctcccacctcagctcccccgagtagctgggactacaggcatgcaccaccatgctggctaatttttgtattttttttgtagagatgtggtctcatcacgttgcccagcctggtcagaatgctttgtatgggttgaaatgtcacagggaatctcctgtgactttattaataatgtgcttgctcacacctgtagtcccagctactcgggaggctgaggcaggagaactgtgtgtacccgggaggcggagatggcagtgagccgagatcgtgccattgcactccagcctgggtgacagagcgagattccatttcaaaataataataataataataataataaaaaatgtgcttgctttctcccacaccatgaatcagattcacacgccccaccgcgctggtgcctgggccgcctcactagctctgtttcattccctgctctgtggacgcatgcaggcgtctgcatttttgaggagctgcacagcaagtgttaaagtccgccactctaggacattttgctacctccctctccggctcaacacactcaccttgtcaccagtcttatcaatttttcctcctacccgagctgttttccacttttcctcgtcctcaccccaccagcccaggtccagcaactgtcaccacttgcctggacacgcagtgacctcctagaccatcagctccccggggatggggtttgcgtttgtttgtcttgctgtcatctttgccacgcctggacagacatcttagtacccatcagtggtcaaaagcacgcactgaatgaatgttggctctttggtctccctgtgtctgcctttttccctcacccgaccattctctgcacaaaagtaagatggtcctttagaaaattctgattcgattgtgctgttcggtggcttaaatgctttctgtctgctctgctctttattttttactttatgtatttatttttgtagatgtagggggcgcaagagcagctttgtttcatggatatgttactgcacagtggtagtgtctgggcttttactgtaactacccctttttttttgagatggactctcgccgtgttgcccaggctggagtacagtggagtgatctcggctcactgcaacatccacctcctgggttcaagcaattcttcgagtagttgggattacaggcatgggccaccacgcccagctgatttttgtatttttagtagggacaaggtttcaccgtattggctaggctggtctcaaactcctgacctcgtgatccacccgcctcggcctcccaaagtgctgggattacaggcgtgagccaccgtgcccggccttagtgtaactcttacccaaatagtgaacattgtacccaataaataattttccagccctcacctggctcccaccctcccacccttctgaggctctagtgtctatcattccatgctctatggatgttaccctttgtttagctcccacttgtaagtgagaacgtgtggtatttgactctgtttctgagttgtttcacttaaggtaatggcctccagttccatctgtgtggcttcaaagatgtgacttcattcttttctatggctgagcagtattccattatgtatatagatcacactcttcatctttgctcttttggtaaatttcaaatcgtagtgccatggagactggttgtttgggacatttaaccttatttctccaacttcatgcccaaattctctccccactgccattgcccctgtatgattctggagaggcagacacaaacagggaagggtaggggacagtgagatgcttcgcagagaagtagagatccatttgtccatttgcttgaagttggtgtaaggatagggacagaaaggaaggtggtctaacaggctccaggacctatgaactattgccctggaaagaagctagaatgttgttcttgcccccatgacagggataaagtatagtttttgttgctggtggtggtggtgacggtggtagtgatgtgcgtgtgtgtttgtgtgcatgtgtgtgacggggaaactaatcaagaatcagagctgcagcgggatgtggaatcccagcactttgagaggctgaggtgggcagatcacctgagcccaggagttcaaaaccagcctgagcaagctggtgagaccttgtctttagaagataataataataataaaaataaaatataaataaaataaaatggctaagcatggtagcacatgcctgtatttgcagccacttgggaggctgaggcaggtggatcccttgagcccaggagttcgaggtggcagtgagctatgatctcgccagtgcactccagcctgtgcaacaaagtgagaccctgtctttaaaaaaagaaaagaaaagaaaagaaaaagaatcagagctgcttttcctttcaatatagatggagggctgggatgaaatcgtcaaacacaatggggtgacaatgttggtgaagacaagaaatagctgagtgcagcactggcgagggcagtgccgactgcgggcacgtcaatggttaggaacacgagggaaggaggtgggtgcacaggcccacaccgcccgcttcacttacaaaccaggagcgcaccattcacatgtctggggggtgatctcaatgcacccggcactgtttacggccgggagttcactgacaggtgatccctctgctgtgactggggagactgggggctgacctcccaatgtgccttgtgctgtattccggagctctctggtcaggtgtattctgatgctttctctattccagagctctctggtcaggtgtgtcctgatgctttctctattccagagctctctggtcaggtgtgtcctgatgctttctctattccggagctctctggtcaggtgtgtcctgatgctttctctattccggagctctctggtcaggtgtgtcctgatgcattctctattccagagctctctggtcaggtgtgtcctgatgctttctctattccagagctctcttgtcaggtgtgtcctgatgctttctctattctggagctctctggtcagatgtgttctgatgctttctctattccggagctctctggtcaggtgtgttctgatgctttctgtattccggagctctctgatcagatgtgttctgatgctttctctattccggagcttcctgatcaggtgtgtcctgatgcttcctctgttctggagctctctggtcaggtgtgttctgatgctttctgcctctgttcttggcatgaaggttggggcgctgtggcctctcgcatgagtgctgcttcgacatctccttggtcctcagcagcaaccagaagctggtggagctggacctgagtgacaacgccctcggtgacttcggaatcagacttctgtgtgtgggactgaagcacctgttgtgcaatctgaagaagctctggtgagtcgagcccgttcccctaaggaagttctgccagcgaggcgtgctgcgcactctggcttcagtgaggcccggtgggctggggtttgagtgagaatggccttggcggctcgggtgactgcgtgtgcttgtcttggggtgtctagcattgcggtcagtgagtgtttgtcgtggggaaagccacacactcaaccctgacaaggagcataaataataacaaaaagaagatgtctgcctttagggtgcctactgcctagctgacaaaaagaaaaaatcagtgtaatgcattgctttagaggagttttagaacttcatgacaagccctgggtcctcatattgtataagaaaaatggtgctaaagcaatgcagaccctcgatgttgtatgcagcccttccctgagtgcttctgggagacttgcattttgaaggagagaaaaaaccacttaaaaatggaagggccatttctcacccattaggatggctattatcaaacaaaagcaagaaaactagaaaacaacaagtattggtgtgggtgcggagaaatggaagccattgtgtgttgctggtgggaatgtaaatgatgcagccactatggaaaacagcacagcaattcctaaaaaataaatacagaattactactggagccagcatttccactgctgggtatatctgcaaaagagttcaaagcaggaactcagccaggagcggtggctcacacctgtaatcccagcattttgggaggctgaggcaggtggatcactggaggtcgggagttcgagactagcctggccatcatagtaaaaccttgtctctactaaaaatacaaaaattagccaggcatggtggtgcatgcctgtaatcccagttactcggggtggaggcaagagaatcttttgaacctgggaggcgggggttgcagtgagtcaagatcccgtcactgtactcccgcctgggtgacagaggaagcattaaaaaaaacagaaggcaggaactcaaacatgttatttgtacatctatgtccatagcaacactattagaaatagccaaaaggtggaaataaccaaacgtccttcaacggatgaagggtgttgaaaagtgctatatatgtacattcagctttaaaaagaattctagtacacactacaacatggatgagcctcggggacattatgctaagtaagataagctagactcgaaagggcaaatactctgattgtccttataggaggtgtctagaacagacagattcatagagacaggaagaaacgtggttgcaggcaatgggagggcggagagtgggaagacattgtttaatggttatggagtttcagttctgcaagatgaaaggagttctggagatggtggtggtgatggttgcacaacaatgtgaagtgcttaaggccattaattgtgcacttaaaaatggttaaaatggtaaattttattttacacgtattttaccacaataaagctgaatgtagggagctgggaagatgtagtattggtgggagcttggagaatgcttacttgttattccaccaaatggaaaaggaaatcagaagtgtacatagagcttgtgtccactccctttccatgtgtaaactggagtagaggcagtggcaggtacgggtgcttccttgtccatggtggagcgtgggtgagagacatgactgacattctgccatctctatggaaggttggtcagctgctgcctcacatcagcatgttgtcaggatcttgcatcagtattgagcaccagccattccctgaccagactctatgtgggggagaatgccttgggagactcaggagtcgcaattttatgtgaaaaagccaagaatccacagtgtaacctgcagaaactggggtaagtcttcatgggtgtcttaccagaaaagtaacttcttttcagaggtgaattatttggaaaatgtggatgggggttactttggtcaggcagagctgaaggtagagtaaggaggtaaaaacatcagaaatgctttgaaggactggaggcatataatgtatactgctgctaataagataatttatgctaatttatgattatagaactagagtttcttagtgttggaagaaaccttagagatggtgcagcccaattgcctgttgagggaaaaacttgcttccaagacactcacatgaatagtcacccattttatgtgtgcatgcttgcaagcatgcaagttatcgcatagtgcatgcagcctctacactaggaaagagctctcaccctgcagcctctacactaggagaggactcttacactgcagcctctatatcctcaacagtgtcatggctcagcaccttcacctatgtagccatgctctcccaggtacacaggctggtttgttagtgtctgtctttgaaatgtggtgcccagacctgatgatgcatggtggatgttttacctcctgttgcagagaactatggtttcactggtggaatctctgatttccttgttttttttggcagttacataagccttttgattcatgttggaattctgcagtaaacagtagtagggaatacccactaataatcatgcactttccctgtaccactttcctgtatcactttccctgtatcacctgctctttcatgttcttacatggattttctcagttggcttcagaaagatgctatagggtagggtatctgtgtctccaatttaaagaggagaaaataaaattcagggagcctcataactttgtccaaggacactcagagagaaggtagtggaactcagtgtagacaaacgtctgtgacctcccaagccactgccttaattcccagtgcattgccttaggagatgttgctaatgggctctctacagggcttcttcatctggctctcagcttaagggtgggacctccaatttagctttgctaaacctcatcttacctgtcttttgacccattgactaggcagttttgaatcttcattctgacaataatatctacaaatacaataagcaaattggataggtcttcattcattcacattattaatatatataccagccagatcagcattcaagacaaaatttggcaggaaaggtcttcccagaggagtaatccactaatccataattaacaaccaacctctgttcacaaagctctgatacttccttggacctctcccatcagccaatcctcagatgtgaccatatctctttctatgaagtcttcctgcagtgccttcatttcctcgccttagggtattacccttccttagcaaatcgccttagaatattactcttccttggcaatttgacttctgcttctctaagtttgttcaacagacatgattttgtcccttcattttgcaggccctctgggggctctgtggtgggcactgacagcagcagtgagtaaaacagaccaaaatcctgttttcacaaccgttcttttagggaagtgataacagataatagacatgctaaacaatataccctgtgtataagagctataagaaaaactggagtgacggcgaggggtgcttctctgctcacgtttggcgagtgcctctccgagcgggtgacattggagcaggtgctcagtgaagcgtgggatgggctgtgaaggagccggaagagccctccaggcaaagcagatggaaccgaagaggcccaggcgtaggcactcaggtgactctcagtgatcctggttccaaattccacatgacaaacaagccaattacaaatgtgcctgatgcatctgtaatatgctctatgtagttactattgtcaatacctaacctggtagagctgctgtaataaagtatcacaaacagagcggcctaaacaacaagagtttattgcctctcagttcaggaggccaaagtctgagactgaggcatcagcaggctgggtccttataggtcgtacaggtccttcccagtccttactttagttgacatctgctgcctttaattcatttcactcttcctctttggaagccttcttcgctcttatttttaggtcactacttagtctttcctgctaatgttatagcttccccctccctggatcctgcattggcttctcttcctgtggtctggggatttcacgactggtttagttgtgtttttttttttttttttttttttgagttggagtcttactctgtcacccaggctaaaatgcagtggcgcaatcttggctcactgcaacctctgcctcccgggttccaacaattcttctgcctcagccttctgagtagcagggactacaggtgtgcactgccatgcctggctaatttttgtatttttagtagatacggggtttcaccatgtttgccaggctggtctcgaatttctgacctcaggtgatctgcctgccttggcctcccaaagtgttgggattacaggcgtgagccacacacccgcctggtttaccttttttgttgttgttgttactaaatatttctaaactccctgagaattctcatatacctctcaatttcaacaacagtaggtctcaaacccagatatcattcacaaactttttattagaaaagtaacacatgcttggtgtaaacatatcatagtacagacaaagtggaaagtgaaagctccttctcagccctcttctgagagagccatttacaatagtctgatgaacaaccatccagactttttttaatacaatagattgttatataatccattcatctgtccatccatccatccatccatcatccatccctctattttccatccgtcaatccatccatccatccatccatccatccatccatccatccatcaatccatccaagggagtatcagagctttgtgaacatatattggttgctaattatggacaaatggatttcctgtatatgctgatctgggtggtatttatatcagtaatgtgaatgaagacctatgtgattttcatgttgcatttgtaatacattgttatgtagtattttaaatgcctagtctgttagagctactgtaataaagtatcacaaacagagcagcttaaacaacagaaatttattgtccctcagttctggaggccagaagtgtgagattaagatgctagcaggctgggtccttctgagggctgtggggaatctgttcatgcttctctttggcttctggtggaatgtcatcttgctgacacattttgccattccttgacctgtagatgcctctgccacaccattgcctttatctctacgtggtgtcttccctgtgtctgtgtgtgtctttctccatgtcccaagtttccctgtgaaagaacacaagtcatgttagatttgtaacgacctgatcttaactaattacattttcagtaaccgtatcaccaaataaggtcacaatctgaagtactggggcctaggacttccacatataaagtcttagaggaaacaattcaatccataacaccctatctattgaaactagaaccataatataaatatttttctgtgatatccttttttcatttatcatggataaatttccatgctgatttgtgtagatctatcgattggggcataatatcccatagtgtgctttaccataatttatttaatcaaatcatgcattttgggataactgttcttttccactattacaaacaactctgcaaaaagcacatttgtatatatagttttatgcatgtgtatttgctttgagataggtatctataagtggcattaatcagtcgagacttttatgcattttatgtgttaggtacagccatacatgtggctgtgtgttaggtatagcctatgggttaggcatagcctgtgtgttaggtatagcctatgggttaggtatagcctacgtgttaggtatagcctatgtgttaggtatagcctatgtgttaggtatagctacatttttttctctcgaactttgggtcctcatctctggctgcatattgtgtactgcctgtctcaatactgctcaagggtcacacatgctgagcatttgcaacattggtttaattatcataccccaccttccacccccgttctctgacctgctcctgccctcttcctcctgcctcattgaatagtggggctttccaggaggctgctgagtgagtaaacgggggacggtcctaaatgctctgctttcggttccctctaccactcatcactacaccagagggaactttttaagatgcaaatttgaaaatattgaccctttgttcaaaaatcttcaaaagttcttctctgcagtcagagtgacatcttagcttggcacacaaggctgtccctgatactgccctctctcctgccataccttgcactccattttgagtcatattggatgagttttgttttgctgttttagagatggggacttgctatgatgctcaggctgaatttgaattcctgggttcatctacagccataccacccagagtgcctgatctcatctgcactcctgggctcaagcaatcctcccgtctcagccgcccaagtagctgggactataggtggacatcactgtgcccagctatgaattagttttgaaacatcttggtggttcttttaatcttccttattcttgctactcttttccttttgcctggaaggttacccccactttcccactttctactatccatctaagaagctcctacttattttttaattactgtgatcctcattttgtccatttaaaagcagggataaaactaacattcccatcttgaggttgtgatcattcaatgagataaccctgtttaaagtcgtcatccatgtcaagcacacaataaatactcaaaaaatgtttgatcttcttcttcagattccttccttccttccttccttcttcctcctcctcctttctttctctctttttctttttctctttctttctttctttctctctctctctctttctttctttctctttctcccttcccttcccctcccccccccctttccctttcccctttcctttccttattttcctttcttttcttttctttttttaagacagggttttgctctgtggctcagactggagtgcagtggtaggatcatagctcactgtagccttgaactctcctgggctcaagcaatcttcctgcctcagccttctgactagctaggactacaggtgtgtactaccatgcctgggtaatgtttaaaatgtttaaaattttttatgtagagacagggtcttgctatgttgcccaggctggtctcaaactcctggcctcaagtggtcctcccaccttggcctcccaaagcactgggattcagttttcattatgagacagttttgtgacataggcaggtagttaataaataaaaatccccaaccaattaacttaatacagtacatggcaagatatccgtgcttggtaaatgtagagctcagttaggtggattggttgaaatcgagatgtcaatcacattcctctaatccaaggattggttggtgggacatggttgtttgattctttaaacattttattatgtgttcagtgtaaccgttgcttaatagttaccagcattttcacaatttggatatgacgttttcttaacaaaactgcaccgtctgttgcaatttctactactactgtgtagtgctccccaaacatctgttgaataatccattctactcctttttggaaatagtggtaaagcctgcataactttaattacataatttaaaaaatattttctcttttcctctttgaagaccatccccattctactagaatgtccctggcctttgccaggaatgctactaatcccttctgcatgttaattaacaacaaccctctgatagaattcttaccggggatgagagcttagtagaagccactcaaaacttgctttgtttttgtctgtctctcttgggcttcatttgcctattagtcttacttactgtgtcttttcagtttgactcttccttaattgggaagatagaaaccagtggatggataatcactttttcctgctggtcatctgttcatgctttactgtctgaatacactttttctgtatttctatttttcctgcctcgtagacaccaaagagcttaaaaaacatgccattgccaaggactctggcaggaaggaggcaatcacctgcgctattcctggcttcatggaatagaagcatctgtgctcctaggaattacgccaccagtgattttagagctcttatgctcttcctgggtgatagaatgggcttaatttgactcaagaatagtacatcaaaactcttaattccatcgagattgatgcatttttggggttttatgctctaaaaggccttttgctgtgcagaaggaagagagaggtggacagaaagggcagtggggagaagatgagactaaaaggtggaaagtccaggtctggatccctccccaccacacacctgctctgtggccttgagagaaacatgtaatttttataagccttagatttctaatatgtaaaatgtatgtaatagttttagctgcactccttccttgccaggttgatataataatcaaataagactggtctctgggtcaggcacagtggctcatgcctgtaatcccagcactttgggaggccaaggtgggtggattgtctgagcccaggagtttaagactgcagtgagctgtgcacttggcctgggtgactgagcaagagcctggctttttctatttatttatttatttttgagacagagtctcactttgttgcccaggttgaagtgcagtggcaatctcggctcactgcaacctctgcctcccaggttcaagcaattctcctgcctcagcctcccaagtagctgggattacaggtgcccaccaccaccctaactaatttttatatttttagtagagatgggctttcaccatgttggccaggctggttttgaactcctgacctcgtgatccaccctcccaaagtgctggacctcccaaagtgctgggattacaggcataagccactgcacctggccttatttatttatttatttaggcagggtctcactctgtcacccaggctagagtgtggcagcgcaatcatggctcactgcagcctcgacttcctggactcaagcgatcctcccacctctccaacgtggttgagggctgcagcgagaaagatgtgaaaggggcatttgggggcgcaggaaggcgggaggtggcaattgctaagggccccgccgtgttcctgtcacagccctagctacagcttagaaggtcacaatggacgttcacctgttgtctttgatgtttaaatcagcaccgacttcccatgaggaggatttttttttcctgtctctcttaaaaaaaaaaaaaaaggcccctgcagtgtgggtgtctgcagtgttacggggattattagttgaggataaccactgggatgtgtttctggaagaagtggtgctgaggagcactcctggccggaggaaagctgtgtgaggaggaggaggagtatggggtaactggctcagtttgccttggctctttctgtcggactcatacagcaaagcatctgctgagacatcatttgtgtctcctgtgacagccagagacagcaggtcttgctctccccagatcatatctgagatgctggctcctgctctctgagctgaaggctgcagctgctgagagaggacgaggcactgagtcaaagcagctgcacaatgttggggaacagctgggtactgaggactcttctccctgtccttctacaggttggtgaattctggccttacgtcagtctgttgttcagctttgtcctcggtactcagcactaatcagaatctcacgcacctttacctgcgaggcaacactctcggagacaaggggatcaaactactctgtgagggactcttgcaccccgactgcaagcttcaggtgttggagtaagtcctttggtttattacagcaatgagaacacatggtggccaagggtggagggacgtttaggcagagtggccacaagataatctgtatcttagaagtgaggtgtcttcttagtgtttgccttgttacaggatcatgggactgggaggagtccttccagatgatatagatgtaggaacttgagtccttaccatcacagttttctgtaccacaaaacaaggagggcagtatgacacttacattttatggaaatgtagggaaaggcacagaatttggtaaatcaatgaacaaaccactgttactaatttgatctgtgcaatgcagtggatttgaaaaagagagagaagaataattaccagcatacaaggctgcttgaagctagttagtcctgtgctcctgtgctttttttttttccacctgaaacaagacaggctaagatgctaaaatcttggggagctagggggatggttaaggggacattttctttaaatcaccccctttttgcagattagacaactgcaacctcacgtcacactgctgctgggatctttccacacttctgacctccagccagagcctgcgaaagctgagcctgggcaacaatgacctgggcgacctgggggtcatgatgttctgtgaagtgctgaaacagcagagctgcctcctgcagaacctggggtgagtgtgctctgcagagatgcccgtggtgggactctgagttctcaggaaacgttgactgttatcaaaatccaggatggctctcgcttcatttgcagccactcaagattaggttgggcctgggtcagttgtggtggatattttaaaatagagaatatggggttaaactacacattccacttcactgagatggttagaatcaccaaggctaagctggatttcacccacattccccaaagaaacacaagccctcatgcgatcatggccaaggaggattctgttctacacaaggaaccgaacttcgtagaactcgtctatgggtcatccaaattggaagggtctttacatagtggggatcttgttgttttgtttctgaggatttattttttttttccttgagacagagtcttgctctgtcgcccaggctggagtgcagtggcatgatctcggctcactgcaagctccgcctcccgggttcacgccattctcctgcctcggcctcccaagtagctgggaccacaggcgcctgccaccacacccggctaattttttgtatttttagtagagttggggtttcactgtgttagccaggatggtctccatctcctgacctcgtgatctgcctgcctcggcctccccaagtgctgggattacaggtgtgagcctccgtgcctggcggtttctgaggatttctaaatgggaaaagagtgctccaggaatagcaagatgggaaattacacgaaattcgacagtgtgtcaggatattgccagcccacctctgtgatactactgaggtagtcgtctcctctctagcaagagcttcctggcgagtcccacggttctgtcagccgtgatgattgcacttttccctgaagacgttttcactgcttggctttaaggccaacatgctctcctgggttttctcctatttcatcagatccttctactcagtctcctttctggcctcttcttcatcatcctgacccttatgtgttgaatcctcagagcttagtcgctgggctaatttttcttccctacactttctccctcatttaaattatctggtcttctggcttcatgatatgtgtgctgtggcctccagattatatgtccataaattctgtgtctccgtgcttggctgatctttcttcttgaaggtttaataaacctctcaaacgtcacatctagatccacacccttgctactctcttctacccgaaacctgattcttccccatttcagtcgatggtcacttcctccaagttgctcgggccaaaacatttctggttctgtcgtcactgtctctttttccttataatcatgtccaatgtgtcagcacatcctgtgagctctgccttcccagcttggccactccctgaccacttcaggccagcttcacggcttcttccttggctcaagccaccatcacctggtgtctggattgtcatggtggcattctgacaggtcaccctgcatctgttattctgattttagcagacaagggattcagctaaaacgtaactcgcatcatatcactcttgtcaacatcgtcttcttatcactttcataatcagagcaacaaactcatggtggcttccatgccccacataatccagcctctcctgcttccgaagattccgcttctcccaacccttgcttattctgccccagtacagtgatctccttgctgttttgcaagaacactgtcatctctggatttttgcacttgcttttcttctggcctagaactctctccccttcagtatccacctgcattattccctgtaccttcctaaattctctgcttaaaggtcttctctgcgaggctgtctttgactattctactgaaaatagaagcactttttcttctcttctcattctcctctgcagtgtagcacatcttatgtgctatgtcattttcttgtttatttattatctatctctgctcccaaaatataaattccattagtccagggacttctgtccatattaatgatctcaaggctgagaacttgttggaatgcaggtttgaataaatacaagtttgaatcagccttgcatccttgtgccaacataatggagcacatttgctgcaggacaagccaatattcccagagctaagagagatgggggaacaaacaaaggattggtcaggtcaaagctggggacactgctacatgtagcatcactgacctagccctgagggacattctggacccaggctgagggacaggctcaaaatagattgaagaatccatgaatgcaatcaacccgttttctcaggctgcgataacaagctgctttagactgtgtgactcaaacacagatttattatctcacaatactggaggctagaaagtccaaaatcaagtctctgatgaatttggttgctggcgagagtcctcttcctgatttgcagatggctaccttcttgttatgtgattgcatggagggaggggaggcaagggagagaagacaggggagaaagaacaaactctctgatatctctcctgtaagggcactcaccccatactgagggccccaccctcacaacttcatctaactctaactacttcccaagggcctcacctttaagtaccgtacattaggggttcgggcttcatcatgggaattgttaaggaagacaaacattcagtatataacaccaccaaattgagatggttataaatggtgcaggacaaatgggtggatttattagttaagttgcaagggaaactttattaaagaggaggaagaacttacatcgaagatgtgagaggcatcctgggcaaatgcaatgtgtagaattgatcaggttagtgactaaatgaacataaggtaaaaaaatttacaagacagttgaggaagcgtaaatgctgactggacatacagtgatactaagaaattattgttaaacgattttggtgtgatagtgacattgtaattatattttagtgtcacaaagtgaattattgatagatgcattaaatgcagtatttaaaataatccatgggtgggaggagtgggtgggcaatagaagaaacaagttgacatgacctgtttaattgtcgaacttgggtaatggacacagggggttcattatactattttctatacttttatgtatgcttaacattttcccaactagatagttaaaaatataacaggaaccacattgggcacttagagcttttttttttttttccccacatttttattgggagccgtgggaggggcctcctctgtcattggaggtgctcacagtttcttcagccactccaggctggggtcctgggggtctgaggctcccagtgacgaaggacacgacgagcaccggctccttggcccaggcattcttgaagaaggtgcggagtctcgcggccatcttggtctcggcggcggcgacggcggcgaggacgcggagcactctgggagttgtggtccctcttttttttttttttttttttttacattttagaagtgtgtggagtttagggaaatgaagagatgagacttttaaggttaacgactctgacagagttatctgaagagtgcaacccaggctttctatttgcttttacaggttgtctgaaatgtatttcaattatgagacaaaaagtgcgttagaaacacttcaagaagaaaagcctgagctgaccgtcgtctttgagccttcttggtaggagtggaaacggggctgccagacgccagtgttctccggtccctccagctgggggccctcaggtggagagagctgcgatccatccaggccaagaccacagctctgtgatccttccggtggagtgtcggagaagagagcttgccgacgatgccttcctgtgcagagcttgggcatctcctttacgccagggtgaggaagacaccaggacaatgacagcatcgggtgttgttgtcatcacagcgcctcagttagaggatgttcctcttggtgacctcatgtaattagctcattcaataaagcactttctttatttttctcttctctgtctaactttctttttcctatcttttttcttctttgttctgtttacttttgctcatatcatcattcccgctatctttctattaactgaccataacacagaactagttgactatatattatgttgaaattttatggcagctatttatttatttaaattttttgtaacagttttgttttctaataagaaaaatccatgctttttgtagctggttgaaaattcaggaatatgtaaaactttttggtatttaattaaattgattccttttcttaattttaaaaaagagtacctagaaatttttcaaattatttctctaaaccactaaagataaattaaattgtttggtgcattttaaaagtcactttggcaaatgattccattgtagataatttttaaaacgttacctcactctaactgtaatgagtggaatttcatctttgataggataggagattgaaaatcgtggagggaaaggtttgagagtatcagagcctgcgctcctaactagaagtattatgtagaagatgcatcttgctttcagttgataacagcttattttggatttatcccatccgaggaacagttcatctattatacttcacagagcattaagttataaggaaatatttactaattgcttctctacacatggacaactcttaaaccgcatggaattgctcaggatggaaatactatttcctctgtacaattagccatcaaagtagccacactttgctactcaaagtgtagtctatgaactgtcgatataaggagcttgtataagaatgtaaaacaatcacattattaaacataccttttagatgagctgacatttaaaaaaaaccctgaagactatttttataagggaaacagtatgagatttacattctgttgcaaactctgtcttgttagcacttctgagcagcaccaactggagactgggtttctgcatcttggtgaactattaccgactgccttcctgctacaaacactttgataacctatataaataatgtaatcagaaacacatagctgagcttgaaagagagaaagagaacctttgggcattaggacattaaaactggccaggttgctgagaatgccattatttcattcctttttatggctgaatagtatttttccatggtatatatctcacattttctttttcttttttttttgagatggagtcttgctctgtcgcccagtctggagtgcagaggcgcgatctcggctcactgcaacctccgcctcccgggttcaagcaattctctgcctcagcctcctgagtagctgggattacaggcgtgtgccaccatgcccagctaatttttgtatttttagtagagatggggtttcaccatcttggccaggctggtcttgaactcctgaccttgtgattcacccgcctcggcctcccaaagtgctgggattacaggcatgagccactgcgcccagatggttccatatttttccaattgcaaattgtgctgctataaacacgcatgagcaagtatctttttcgtataatgacttattttcctctgggtagatgccccgtagtgggattgctggatcaaatggtagatctactttttgttctttaaggatccacaatgttttccatcgtggttgtactagtgtttgtactagtttacatttcatggaaaaactttctatagaagaaaatgtgaactacagagaaaaaaaaatcaaaatcacaggaagaagatagcaatctacttcattcctggaattgtctgaaaaagtcgtgtaaaatttgtggagatttaagtatatggagaaaaacacttattcattgtaagtaaaataagattgtatttcagcttcatcttgtgtatacttaggagtaatagaaaagagacaaatggggagagaataaaagaaatataggaagaggaaaagagaaaagaatcaggaaattggaagtgaaataattccacacatacttattgaagtctatttaaacaatgcttaaaaatatatggcctcttagaattatacgtttaaaatgaactttgtcgctatgggatttggggcattataacaggaagtgagatgtttgaagacagggtttttgagctctctgggtattaactccttaagtgaaagatgctctgagtgcacaatagacttgtgctgtgttctttaattgatggagatgctacatctcatgtcctcatcatccacagagcctccagatcctggccagaagtctcctcagagcccccttcatatctttatttctcagggtgtaggtgaagggattgagagtgggggtgattatggaatagaagagagaaataaatttgccctgctcttgggagtagctggaagggggctgcagatacatgtaaatcgcaggtaggtagaagagggagacgatcatcaggtgggaggaacacgtcccaaaggccttgtgtcgtcccttggaggactggatcctgagcactgcccgggcaataaagccataggagagaaggatgagagccaggggcaccaacacgaagaaggccaccagcacagccagtatggtgtcattcacagcggtgtcagcacacgacagcttgatcacggccggcacctcacagaaaaagttgttcagcacctgccgcccgcagaatggcaattgcaccgtcaggaccacctgcacgaaggagttgccgaagccactgagccaggccagagccacgagctgctgacagagagcacggtgcatgagaacggcatagtgcaggggcttgcagatggccacgtagcggtccagggccatggcggccaggacgatgcactccgtgcatcccagccagtggaagactgcatattgcacagtgcagcctccatagctgatggtcttctgggaactgcccatgttgaccagcatctgagggactgtcgtggtggtgtagcagaggtccaggaaggacaggtgactgaggaagatgtacatggggctgtggagttgaggatccacccgggatgccaggatgatggcgacgttccccaacatggccagcacataggacagcaggaggaccacaaagagagggagttccagccacggcctgtcagacacacccagaaggatgaaggctttaggggagtcccctaagaagctatggttgtcacttttcatgttgcggcattttctggc

SEQ ID NO: 4 - RNA, 4470 nt, Homo sapiens
  source 1..4470: mol_type = mRNA
gtagatgaggaaactgaagttgaggaatagtgaagagtttgtccaatgtcatagccccgtaatcaacgggacaaaaattttcttgctgatgggtcaagatggcatcgtgaagtggttgttcaccgtaaactgtaatacaatcctgtttatggatttgtttgcatatttttccctccatagggaaacctttcttccatggctcaggacacactcctggatcgagccaacaggagaactttctggtaagcatttggctaacttttttttttttgagatggagtcttgctgtgtcgcctaggctggagtgcagtggcgtgatcttggctcactgcagcctccacttcccgggttcaatcaattctcctacctcaacttcctgagtagctgggattacaggcgcccgccaccacacccggctcatttttgtacttttagtagagacacagttttgccatgttggccaggctggtcttgaattcctcagctcaggtgatctgcctgccttggcctctcaaagtgctgggattacaggcgtgagccactgtgcccggccttggctaacttttcaaaattaaagattttgacttgttacagtcatgtgacatttttttctttctgtttgctgagtttttgataatttatatctctcaaagtggagactttaaaaaagactcatccgtgtgccgtgttcactgcctggtatcttagtgtggaccgaagcctaaggaccctgaaaacagctgcagatgaagatggcaagcacccgctgcaagctggccaggtacctggaggacctggaggatgtggacttgaagaaatttaagatgcacttagaggactatcctccccagaagggctgcatccccctcccgaggggtcagacagagaaggcagaccatgtggatctagccacgctaatgatcgacttcaatggggaggagaaggcgtgggccatggccgtgtggatcttcgctgcgatcaacaggagagacctttatgagaaagcaaaaagagatgagccgaagtggggttcagataatgcacgtgtttcgaatcccactgtgatatgccaggaagacagcattgaagaggagtggatgggtttactggagtacctttcgagaatctctatttgtaaaatgaagaaagattaccgtaagaagtacagaaagtacgtgagaagcagattccagtgcattgaagacaggaatgcccgtctgggtgagagtgtgagcctcaacaaacgctacacacgactgcgtctcatcaaggagcaccggagccagcaggagagggagcaggagcttctggccatcggcaagaccaagacgtgtgagagccccgtgagtcccattaagatggagttgctgtttgaccccgatgatgagcattctgagcctgtgcacaccgtggtgttccagggggcggcagggattgggaaaacaatcctggccaggaagatgatgttggactgggcgtcggggacactctaccaagacaggtttgactatctgttctatatccactgtcgggaggtgagccttgtgacacagaggagcctgggggacctgatcatgagctgctgccccgacccaaacccacccatccacaagatcgtgagaaaaccctccagaatcctcttcctcatggacggcttcgatgagctgcaaggtgcctttgacgagcacataggaccgctctgcactgactggcagaaggccgagcggggagacattctcctgagcagcctcatcagaaagaagctgcttcccgaggcctctctgctcatcaccacgagacctgtggccctggagaaactgcagcacttgctggaccatcctcggcatgtggagatcctgggtttctccgaggccaaaaggaaagagtacttcttcaagtacttctctgatgaggcccaagccagggcagccttcagtctgattcaggagaacgaggtcctcttcaccatgtgcttcatccccctggtctgctggatcgtgtgcactggactgaaacagcagatggagagtggcaagagccttgcccagacatccaagaccaccaccgcggtgtacgtcttcttcctttccagtttgctgcagccccggggagggagccaggagcacggcctctgcgcccacctctgggggctctgctctttggctgcagatggaatctggaaccagaaaatcctgtttgaggagtccgacctcaggaatcatggactgcagaaggcggatgtgtctgctttcctgaggatgaacctgttccaaaaggaagtggactgcgagaagttctacagcttcatccacatgactttccaggagttctttgccgccatgtactacctgctggaagaggaaaaggaaggaaggacgaacgttccagggagtcgtttgaagcttcccagccgagacgtgacagtccttctggaaaactatggcaaattcgaaaaggggtatttgatttttgttgtacgtttcctctttggcctggtaaaccaggagaggacctcctacttggagaagaaattaagttgcaagatctctcagcaaatcaggctggagctgctgaaatggattgaagtgaaagccaaagctaaaaagctgcagatccagcccagccagctggaattgttctactgtttgtacgagatgcaggaggaggacttcgtgcaaagggccatggactatttccccaagattgagatcaatctctccaccagaatggaccacatggtttcttccttttgcattgagaactgtcatcgggtggagtcactgtccctggggtttctccataacatgcccaaggaggaagaggaggaggaaaaggaaggccgacaccttgatatggtgcagtgtgtcctcccaagctcctctcatgctgcctgttctcatggattggtgaacagccacctcacttccagtttttgccggggcctcttttcagttctgagcaccagccagagtctaactgaattggacctcagtgacaattctctgggggacccagggatgagagtgttgtgtgaaacgctccagcatcctggctgtaacattcggagattgtggttggggcgctgtggcctctcgcatgagtgctgcttcgacatctccttggtcctcagcagcaaccagaagctggtggagctggacctgagtgacaacgccctcggtgacttcggaatcagacttctgtgtgtgggactgaagcacctgttgtgcaatctgaagaagctctggttggtcagctgctgcctcacatcagcatgttgtcaggatcttgcatcagtattgagcaccagccattccctgaccagactctatgtgggggagaatgccttgggagactcaggagtcgcaattttatgtgaaaaagccaagaatccacagtgtaacctgcagaaactggggttggtgaattctggccttacgtcagtctgttgttcagctttgtcctcggtactcagcactaatcagaatctcacgcacctttacctgcgaggcaacactctcggagacaaggggatcaaactactctgtgagggactcttgcaccccgactgcaagcttcaggtgttggaattagacaactgcaacctcacgtcacactgctgctgggatctttccacacttctgacctccagccagagcctgcgaaagctgagcctgggcaacaatgacctgggcgacctgggggtcatgatgttctgtgaagtgctgaaacagcagagctgcctcctgcagaacctggggttgtctgaaatgtatttcaattatgagacaaaaagtgcgttagaaacacttcaagaagaaaagcctgagctgaccgtcgtctttgagccttcttggtaggagtggaaacggggctgccagacgccagtgttctccggtccctccagctgggggccctcaggtggagagagctgcgatccatccaggccaagaccacagctctgtgatccttccggtggagtgtcggagaagagagcttgccgacgatgccttcctgtgcagagcttgggcatctcctttacgccagggtgaggaagacaccaggacaatgacagcatcgggtgttgttgtcatcacagcgcctcagttagaggatgttcctcttggtgacctcatgtaattagctcattcaataaagcactttctttatttttctcttctctgtctaactttctttttcctatcttttttcttctttgttctgtttacttttgctcatatcatcattcccgctatctttctattaactgaccataacacagaactagttgactatatattatgttgaaattttatggcagctatttatttatttaaattttttgtaacagttttgttttctaataagaaaaatccatgctttttgtagctggttgaaaattcaggaatatgtaaaactttttggtatttaattaaattgattccttttcttaattttaaaaaaaaaaaaaaa

SEQ ID NO: 5 - DNA, 20000 bp, Homo sapiens
  source 1..20000: mol_type = genomic DNA
gataggtaaaatcttcttcctgggtgtctaggagatctaatctaaaaaaagctccttatctttgatgtattgtgaacattacaaaaattgattcaaagcttgcattttactgtatctctgtctaaatattaaaatgctttaatttagtcatcacttatattaacttctggtcaaaaatttccaaaaaccgattctattttgaagcttcttcgccctccggatacaccactacagactggagtttaaatgctcaatgtaaaagattactacatacatcacagtgcccttcacaaaacgttagtaatatagctgggcgcggtggctcacgcctgtaatcccagcactttgggaggccgaggtgggcagatcacgaggtcaggagtttgagaccagcctgggcaatatggtgaaaccccatctctactaaaaatacaaaagttagctgggcgtggtggcacacgcctgtagtctcagctacttgggaggctgaggcaggagaatcgcttgaacccgagagggagaggttgcagtgagctgagatcgcaccattcactcggggctgagtaacagagtgagactccgcacccccttccaaaaaaaattagtaatacttttgaggaacacatttaaaatgctacaaaactatataaaaacaaaagtaaagacatgaactcatgattcagttgaaactgaatactaaatttcatttagagcttagtaaaaataaatttgtaattattttcccatccaagttcaaagacactttacccttaagaatccaccttctaaaggaaaaaagaaaataagtgctaacactaaatgaacactgttgcaggatctctgataatcactatgtacacttcatgtcattaaaccatcacaaatactattccacagattaggctgcttaggaaagttatttgtataaagccatgtgaccaaaaatacattcaaactatagtgtaactccaaatgaagactgtgacaaagcacctcaaaaaaattttctagcctctagctgaggaatcattgaggaacactctactgataacactataactcattaatactcctattaaacaactttctgtttgggcaattaaaaacaatgttcagttaaaactaaaatctaatacttcctagagttccacatgagatcatcaccatcatcgtcatcttcactagctaacccaaaggaacaaggtaaacacaaaaactccccactcttgtaccaatctaaaaagtaaatttttgaatccattttccaactgtgtcacacacagttgttagtatccttctaaggtgtgtatatgcctatgtatactttttaagtaaacttataaacatgtggtaactagggcatattttattctgtctacggcagcttcttggtttatccaactaagtattactaattctattttcttagaatgagaagttctcagaacaatgatctatcacctaaatttcaaatgaatgtgtaactggtagacaaacttaaagcagactttctaaaactattaacagtgctcaagaatgcatctatttacatcttaaaaatttctcagttactatatgctactctaatgaaagctatattcaaattataattttttcccacagcatgccaacagattaggaattataaacagacagatctggatttgaatcctgtctattctttagcagctggttatctctgacaaattactgtaaacctcgttaggcttctcggttttgtattatcaatcatcattggtaactgatagtactgagagatcctcattatgtaaggattgaaagaaaaatggttgtagcactgagaaaagtatcaaacattattctgcaatttccttaacttgggttttacttttaagttgtaaattttcccttggcaatgttcacaggatatctttgctaaaatattatttttcagttagttttaagctgactctttaaatatcaaatgatttgctctagagatggattttctttctttggaagaagccaagatcatttccatttaagggcatgtaagcagctgctgctacacattttagttacccataagaaagtgaagtgggctaagttcactctgtcataagcatttaaaaaattaaaaattacaagtacctcctctaaaattaaagaagagatttaagaattaatattttcgagtgtggtgacttaagtaaatctaacatctaagacaacaaattagataaacagagaagaggagaatgatgcccggctttacaaaaaaattatttccccagttctactgtaagataaactgttctaggaagttcaaaatatcatctcacttactagcatctcatttttatagtaattttcaggaaagcaactgctagattaaatgaggcacatcctttcaaaaacattacaaaacttaaatttcaacacatcaaacctataaagcctcattaactgagatgtaactgatttggaatctgtaattatttcttttttgccataaagttgcccttaatactgcatcagtttattaaaaatttggtaagattgtgtaataatttaatgcaattgtttttaaaaaatcttaaatacttaaagtagcatattgctattttgggggtgttgtatgtatcagtttaaatataagtattactattcacaaatatattgttaaactgctaattgaagaaaacacaaatgaattaaatacatttattagttctttaactgtaagataaaaataattttttaaaacaaaaagcaattagcctgattttctcatactccttctcccatacacacaagaacaagaacaaaataagaaaacaggtataaaattttattgtgtaaaaatatttcactttcactaaaagctaacattatgaagacacgtattaaagcaacagcagcaagaattcaatgaaagttgttttgcttatacctgtgtttatttttctcataattaaaattcctgcagtaactattttagctcttcaacatcttcaccattaatattcaattatctctaagcctgaagatgcatgaatctttaacaaaagctttccaccacctcaagtttacttatttttttcatttatctaccatatactgttttaaattaaaaacaaaagatgaagcacaaagtgttaatgacttttccatacctaaagtaagaagttctaaagtttggttgtgataagactgagactgtggctaaccaatcgaaacttcagaattcctatgtgacatcataagacctccctagaacactttttctcctccacctactgcaactgttcccataaactgggtgacagagtcagaaaactccccagctaaacacccgtaagacttcatacaacacaatactctatactgtgatgatcacagctgccaaggtaagaaacagatttcgctgactttggtaattcttactttctataattcttaattcctataatttctataatctgaacttttaaaatgagttaattttatgaatatcagttcaatcttaggcaataaaatgacatgacaaagtgcttaaatttataaatgcttatccatttagtgacaggaaaaatgagacaactttgaaatgaaaaaggtcatattcatctttgatcctggttactggtttgtcatttaaatttatctttcacttttattttgcttttcaaatgtgaatttctgccaattaaaaaatcttccaattatgttaccatatttggtagtagtggttaatttctccatgcaaaaacaatgacttaattttgttatttattgctctgctgagaaacagtgcagaactgagctatttacatctgaactaatatgaatagtcatttgactacaacatgcacattatcagcatgcctattccaatattatcataatttcatacagtgaataatgaaatggagtttcagaatatataatacaagctacttttaaagtgcccttgaggatgtttcccctctaaagtccagtcaacttttaacaaacatttctaaaaaaattccatgctattaataaattgagttactgatattaaattcaatattgtatcataaagaagtttagaaattttaaaacaatgttcacaaacacaaaaaatctgacgttagagaataatttgatactttaaaaagttattttgacacacgaatattcttaactatcttattttcacacaaatttgattaaatggatttctgcctattaatgcctatagttttgtcaagttattatcctccagtggtactccatttcctctctcggatttagaaagaaaggaaaaaataaaataaatgccaggaatggagatgccacaatcaattttatgacttctgtttgaattctaccctattctttatgttacaatcctcaatttagtaaatgaaacgtttcctcattcttagatctctgtcagggcatacagaaaattacatatattttatttattttgattttcatatttcatatatatgttaaaataaaatttatctctaaaattctcaattcctatgacaaatgttaattctattgctcactacaaataagaactttgtaactctgtaagcagctttccttaagacataaaaaaacataatttttgtctaccactgaggtatcctaattgtgtctccatatctctatactcatatttttcctttgatagtacataaaagtcattcagtgtaggtgtcttatgttatttgtgcatttttattcaaatatctatcaaattacattctcacacttcaaattgggtgttcacgagttattttattgtatcagaattttgctatatcacatattactctaaaaagtacacatacttctggatagagcagaaattatattaaacttacccttagctcactagtatgtctcagttaacagaaattacagttacagagactgctaaaatttcaaatataatgtggtagtaccatacattgtgtcccaactagttcatctataccttaaggtgcaagttaagtattatctttgtttatgaagacatgtggtttcaaagtaagtgctaaaaaaagtgttagatgaaatcaaatggaaaaaatatgaaagatgtttaaattaagaagcattaagttttaaaaacgcatgaaagagccagagtacttgctttactaaaaggcgtgacagcactatcatttcctaaaactcaaatatcaaatccattttatttgtattttagtaggcataaaggaaaatgatcacatttgggtatataatcatatctttaattagtgagattaagaaataataaaatattgcataaatacaatagtttcagaaaattttaatgtattttaatgttttaatgtactcattacacatgtacactaaattatgtaatatattaaatttttaattaaaaaacctaaagtctagttacctctccaaattagacaatatattaccaatcccagaaatgaggagggccaatgaacacttcttttttattcttaaagagcaatttcctaatatactcgtgtacacaaatatttcatttggtcctcttaattatatatttgatactgcatccctattctacaatttaggaaagatgcaaaaaggtgaactgctcaagatcacagaactaagaaaacagggaaaccttggcagaagtttaggttttgtcactaagccacatgcacatcctctatatactgatcagcatggcttaaagtaaaccatgacactgacaaacaaaatttgaaagcccccaaatactgtaaatgatattctaaaaggcaaaaggcaaattcagagaatacaaacttctattttaattaaaagccattccactccatttaaattcaatttatgcatagcattacattcttaatagtctaaattatattctactgatcattttcaaaaccagaaatatacgaaaattacagatgcccttagttattaagcaatacctcctggaaggcaaaattcaaactaactgcacagactttaaaaaaaataacacaccccaatcaatcaaagtttccttttatttgtttcattgctaaaatactcatgccttcaattcatctgatacctaaaatccaagttaacatctcctcaaaactttcacaaaaatcacatttcgatactttattctaggttccctagaatcaagtagtctctttgtacaatttcaaagttcttacccagagtaattctgaagcatgtgttaccaaataaacacatgaaaatgaagcctggatgtacagcatactcatagtcaactgaggacctctagtgcctttgaaaaggtactccatctttagttttcaacccccaacccccgcacaaaaaaaaaggttgactaactcactcacattaatagggggtatatttattaagtggcattcattttaaatccttaagactttctcaatactacctccccatattctcttcccccagaaaagattctgaatttccaactcctacagggttaagaagaatattttacttgtaaatacacttgtaaagcattgtttcaatatttaaaaaacaataatgaaggcaaacctacagacaatatagcaacagcaataagctaaattgtcagttttagagagaaaaatatctctgtgctgttgtttaatgaattctcctcaagacagagctttaacatgagaagcacttcattatgggtcaatttaggaatgagaatatattgatttttatgcatatacaattattttcataaccagacagaagcagcttgaagattctttcaaacagccagtctggaccaacaaagctctggaatgttgctaccacaaagtaacttcaaatagaatgtccaagtttagtattaggcaatctcaaaaggaaaatgactccactggagtgaacttttgtaagccaacagattcatcgtaaatctaatgatgaactgtcctaatttattaccacaagtccaaaaaagggtatatgcacattcacttatggcttatcagtggaaatgtcagaaagtagtagaaaaataaaattccaaacaatccaaatatagacaagtcctgtttattcaatctatagaaaattctaatcttctaaaccaattagatggaaaaaacatcctagagtatatcagactgtagccttagatattacttgaattcaatttaataaagtatttcttcagtactcccatgtttactaaaagaataaacaaaattaaaaggagaaaagcaaaattctaaattctacaaacataaagaatcccaggaatttattatttcagcaaaaggaataccaccaaaaatactgaagtttgagaagttctgcaagaagtgaacatacttaaagtatagatggagattaatgctcagcatatacaacatcattaaagtatcaattgtctagcaagtcataaagcaggccaccaaaagttttcagaagactattgaggttccttccgcacaagaatgcatctgatattacattgctaaaacaggactcactgcagacaaagtaaggactcctgaaggagttgatatatagtagcttccaccaaacatgttgcctaacatggtatatgacattagtcaaaagattagagttgcctaatggcttttctatttccttcttccacctcaaaaaaaaaaccagaataccatcttgaacttgattttttttttaatttccagcgttacttttcttgaggaaaggacgacaaccaaaggatttataaatcccacaaagaatagtaaagaattctttatttttattcttctcattcccctaaaaagtagagtaatcatggatccacagacataagatactctgtggatactttcctgcctctgacatgtaactcaagagacaggagtctggcatttctacacccaaactcctaacaagcacctttcatgttttcaatactcttgattctagggcctagaagacaatttgattttaaaattcatctataaatgaataccactcttgtgtcaaaacaaccaatttatatatattgtcattcttttaataaaagggtggagagcagcttcagtttccatggttgtttaggccatatacaagttcagaaaatcccaaaactatttatgattagactaacagaatgctctaaaaagatcagataacatgaaaataaaactaaactatttttgtatgctttccatcgaaaaagtactctattaaacagcttagctgttaagaaattaaaaaaaaaaaaaaaaaggaaactcatacagtggttgtcagtgcagagaagagaatgataaacatctgacaaccatgccataaattataatgtagtaaaggtcacagacaactccaaaaataggattctgctgttcccacaacaaaggttttcaattctcaatgtatgacaggaagccccatcttctatggataaaatctggcctaattatcatcatacaaatgttggtattcagtagaactaggattccacacatttcagatgataactgtaaaaaattgagcccaataaattaaatgtatatcattaacattttagcgtgtaaagcagatttaagtttaggcataaaatcataaagtagttacaaataactttaggattatggcatatttctaaatctgacaagaaacaggatactatttttggtcatctcctttacacccaatttgtttccagaaacaaactcttctttttcaataacagttagctgttgtaggattataagatcatctttaaagtatgttaactatgctttaaacagtaaagagctcatctctttagggcatatctctgtatttcacaaatactaaaaacccatttatacaaagcctagttcaggttaatactgtgttaatcaggtaaccattaatttaggtgaatcctctaagcctcatttttctcacctgtgatagaaagagacttgaggaaaatattagagcttacatgtccaactaacaaattgttattagaactagttaatctgtcaatcacagcattatttttaaaattgtttaacttattattaaaaatgagggccaggcatggtcattcacacttgtaatcccaggaattacctgagctcaggagtttgagaccagcctgtgcagcacagtgaaaccctgtccctaccaaaaatacaaaaattagccaggcatggtggcgcacacctgtggtctcagctactcaggaggctgaggcagggagatcgctagagcctgggaagttgaggtgcagtgagccacgattgcacaactgcactccagcctgggtgacagagcaagaccctgtcagtcattcattcatccattcataaaaacaattaattaattaaaaatgagatggggtctcattatgttgcccaagctggtctcgaactcctgggctcaaacattcgtcccgcctaggccttccaaagtgttggaattatagatgtgagccaccatgccctgcccacagcattatttttaattaacaattttctaatagttttagtcataaaaatcccttatttaactttagtgatttattgaagcataccaattatgcactaagtactaggatactaaataaacacacagtttctttacttcagaaactatcagtctagctggggatacaaacatgtaaattgaaattgtgctataatctgacagatatcctcatatagataacactaaagccctattaaaaaccagtagaggtgacaaccaattccaccttaataactaatgaaaggtttcactaggaagtgatatttaaactgaaccttaagaatcaactgaagcttgcatggcagacaatcaaaaggtggagaacacattccaggcagagatagaacaacatgtgcaaagaacaaaatcacaaaagggaatggagtatttatggaaaggtgacatgtttcatgtgactgaagtacaacttaccagtgtcaacgtaggggatgactcctgtatatgcttcatgataaactcctggccaactccctcctttcccatgttttgtctcaaaataatttttaaaatttctgaccttttaagaccacttaagcccaaaaacctcacaaaaccatatgttcaaataggaattaccaagtctaattattattcctttcttaactgtattctgctacacatcttcataaaaggtgactactcggccaggtgcagtggctcacgcctgcaatcccagcactttgggaggccgaggcgggtggatcacgaggtcgggagatcgagaccatcctggctaacatggtgaaaccccgtctctactaaaaacacaaaaaaattaggcatggtggcgggcacctgtagtcccagctactcgggaggctaaggcaggagaatggcgtgaacccgggaggtggagcttgcagtgagccgagatcgtgccactgcactccagcctgggcaacacagcaagactgtctcaaaaaaaaaaaaaaaaagtgactactcaaatataaataaaatcttcccataattttccaatccactagatctacaataagcaaatatcaacataagcaaatatcaacataagcaacttaaaggatgaatctcaataaagaacaaaagaaaatctatttatattttacctgaagaattcaaacaaaagtcattaaatatatgtcaagtttaagctgctatgtcccttatttttaacttttgttttaagtttgggggtatgtgtgaaggtttgttacacaggtaaacacatgtcatggggagcttgttgtatgtattacttcatcatcccgttattaagcccagtacccaacagttttctgctcctctgcctcctcccatcctccccgctcaagtagaccccagcgtctgttgtttccttctttgtgttcataagttcttatcatcttgctcccacctgtaagtgagaacctgtggtatttggttttcttttcctatgttagtttgctagggataatgacctccagctccatccatgttcccgcaaaagacatgatatcattcttttttatggctgcatagtattgcatggtgtatatgtaccacattttctttatccagtctgtcactgatgagcacttaggccggttcatgtctttgctattgtgaatagtgctgcaatgaatattcatgggtgtatgtctttacggcagaaagatttacactcctctggatatatacccagtaatgggattgttgggtcgaatggtagttctgcttttataagctgctattttctaagtagaagtgttatagacaacctaaataacagcctttagccacctgtttagacaatgaagaatatatgctagaaaaatacaggtagttaataactctttaaggaaagaaaatttgatagaagttgagtgtttggaactccttgctacagaccaatattatgaagggggacagagtctcaagccaaaaatgcccagtctactatataattcagaatataatagacccaagttgaacactacagaatctaaacaccataaaccatatggtttctttgccaaagtaaatgccgggttctaactagtcatgcctgatacttaccttcccctttgccattctttcagcacttccttctgctcccttcagcactttcctctctcaggaatgggctaacaggttgagatgggcttttatgggatgtataaaaggacttaggagaaaataaaatctgacacctggggtaaggtagtaatatgttgattaacaataatatatcaacaaatgttaacagtcactatgtctggcagttaattactgactttttttctccgtttttcatttttcttatttcaaaattgacacataagtatactgattgaaaacaaaatgtccccaagtgttaataacgattatctctggacagttaatacagttaattttcagtctatatataatttttctgtaatgacatgtaaattcttattttattaatcatcaaagtataggccccacaggcagcaatagcttgtgggatctctgaaagaaggcatgatggaaactactactattaagtagaagtctgtaaataggatatgtctgtggtagtgagataataataattactatgtgttccaagcttgacagtcttcagtacttaacatcaaatcttattaaaatgttacttaagataacattctataaaactataaaatcataaaaaggaataacaatttgaatctatatttttggtaaaacacttcccatttaacactattttattttagattaaaattaagatccagggaacaatttgttgtatgcatttcctttttatgagattggctctggagctattaatacagtgactgatcaaaccaattacatctacagagtaacagatttaaagaaactatatgttagaacttttacccaaaagaataacccaaaacaagctgtaccttaaaccaaatacagcaggtcctcaaataacatcatttctatgtcattttgttataacatttaagtatgtgtggggcttgcatattctccccacatctgtgggactctggtttcctcccatatcccaaaacagtgcacattaggttcactggcatgtttaagttgtcctgggttgagtgtgagtgtgtacatgagtgtatcctgtgatggagtggcctcctatccaaggtgggttcctccctccttgagctgctgggattggctccagccaccagcaccccaaaccagaataagagggttgaaaaatgaatgaatggatgaatacaaattattatcgaataaaaattggtaaagtctacggtgatcatacaaatgcatgacaataaacgctatggcacaaaagcactcagagatcccaccgtatttgaattgtttttgatctgcatggagctggatgtgctcctgacaattttcatttctcaaacatgattccatgtttttaatagaccaccacaaccactgttactcactgattcaccaaatactgggtaattatctttgttggcttttttttttttttcctgggacagagttttgctctgtcacccaggctggagtacagtggcatgatctgggctcaatgcaacccctgcctcctgggctccagcgatcctcccaagtagctaggattacaggcacatgccaccagcctagctaatttttatatttttagtagagacagggtttcaccatgttggccaggctggtctcaaactcctgacctcaggggaactgcccgccttggcctcccaaagtgctgggattacaggcatgagccactgcacctggcctatctggtttttattaatctttcttaaatgtatacatagttcatatttctctcaacgtttaatattagaagtgtttggggtctttattgagaagtttggtgatgtttttgtgaccagaaatatgctataggaacttaactcttgtttacatcaatcagcctagggtaaaaatggttttgttatatgttgttttgcgtaaagtcatggtttccaggaacttatggaagacactgaggattactccaatacttgtagtaaatttgggagaaaaaggcaaggactaaagttactactcctaacacaaatgagacggtcatggtgtgccccatcaaaaaaggagagaaagagagacagacacatagaaacacgtgcacatacacacacacacacacacacacacacacacacacagagagagagagagagagagagagagagggagagagactatagaaacatgatgttataaataacaatagtgctgaggaagatgaattagtgtaaaattgtattttttgttctgaggataggttacatagatgattctaatccatttattatttttacattccaggctacctaaaagaagacagttatctcatatttggctgccagctttttatctttctctcgaccacttaaaacttcagacttcctgtcctgctggtatcatggagaaagtccaatacctcactcgctcagctataagaagagcctcaaccattgaaatgcctcaacaagcacgtcaaaagctacagaatctatttatcaatttctgtctcatcttaatatgtctcttgctgatctgtatcatcgtgatgcttctctgaagttctgctacaacctctagatctgcagcttgccacatcagcttaaaatctgtcatcccatgcagacaggaaaacaatattgtataacagaccacttcctgagtagaagagtttctttgtgaaaaggtcaagattaagactaaaacttattgttaccatatgtattcatctgttggatcttgtaaacatgaaaagggctttattttcaaaaattaacttcaaaataagtgtataaaatgcaactgttgatttcctcaacatggctcacaaatttctatcccaaatcttttctgaagatgaagagtttagttttaaaactgcactgccaacaagttcacttcatatataaagcattatttttactcttttgaggtgaatataatttatattacaatgtaaaagcttctttaatactaagtatttttcaggtcttcaccaagtatcaaagtaataacacaaatgaagtgtcattattcaaaatagtccactgactcctcacatctgttatcttattataaagaactatttgtagtaactatcagaatctacattctaaaacagaaattgtattttttctatgccacattaacatcttttaaagttgatgagaatcaagtatggaaaagtaaggccatactcttacataataaaattccttttaagtaattttttcaaagaatcacagaattctagtacatgtaggtaaatcataaatctgttctaagacatatgatcaacagatgagaactggtggttaatatgtgacagtgagattagtcatatcactaatatactaacaacagaatctaatcttcatttaaggcactgtagtgaattatctgagctagagttacctagcttaccatactatatctttggaatcatgaaaccttaagacttcagaatgattttgcaggttgtcttccattccagcctaacatccaatgcaggcaaggaaaataaaagatttccagtgacagaaaaatatattatctcaagtattttttaaaaatatatgaattctctctccaaatattaactaattattagattatattttgaaatgaacttgttggcccatctattacatctacagctgacccttgaacatgggggttaggggagctgacaattcgtgggtccgcaaaatcttaactacctaatagcctactattgaccataaaccttactgataacataaacagtaaattaacacatattttgcgtgttatatgtattatacactatattcctacaataaagtaagctagagaaaatgttatttagaaaatcataagaaagagaaaatatatttactattcattaaatggaagtgggtcaacataaaagtcttcattctcattgtcttcacattgagtaggcagaggaggagaaagatggggaggaagagaaggcgttggtcttgcagtcttgtcttaggggtgtggggagtgggggaaagaatattcatgtataagtggacccttgcaattcaagcccttgttgttcaagggtcaactgtaataggatatagctatttttcttcctctatcaaccaaatggtaagcatctattttgcagtccactctactgagctaaattatagatccagctatgctatttataattattttcttgatgaataaattttcaatttctcctctgaccatttcagaacatcttccaataactcataaaacaactgaagtaaaattgagtgctggaaaatatattcaccaaactttggtaatttaagttgactaaagtttaaaattaagtctaaaatagtttacacctatactgcataatccaacaattttaatttcagttgaagacatgttactaatataactattattaaaagagtagaggatgtgtaattaaccatatcttctaaaacatggttactaaaagaatatgtaacatcaatattgaccttggtttcttacacaagtgttgctaactcaatagtgaaggagacactattaaattttctgaacccatgagagatactagagatggggagtggaaagtgtttggttcagggatatctgaagaacagaagggcagagatttcttaagtgacgcctcatctacaagctggaaattcctaaaaacaagtagaaagcttataaacaacaggtgatacactcacctcactggttttagtaaattaccaatacagaaagtatccctagtcttaaaaacaagtggaaaatttgaactgattagtcatattcctttgattacactgtttgttacaatatttttctcagtaaacagaaataactaatttttttgttcttcattctttgatagaaattaaaatcttattctgtgaggattacagaatactataactcaaattataaagtagaataaactctttaaataattattcttcatcataaagtgtaaagaataagatataagaaaacaatttatttttaaaatttaatatactaaatgctcaaatatgttctactatagaataagttcttatcttaatttacagggcactaaaaacaattttaaaatgcttaatgttgccttttatattttaattggttaagaatatatatttgtttaatgcaaatcagaatcactatattaaaatgaatgttcttgaaaactcagtggggctgctctataatacacttacaattgatactaacgataaaacgctctaattatagttttaattttataggggtttttttggtgactttccccaaataaaacaaaatcaagacgcccaagtccagacacacaagagggcagacgtatataagataacaaattgctactacatagcgattatttatcttttgattatttttgagacttctggcaaagtaggactataataaattttcagaaaagatctgctcttctgctaagtaacagcacacttcaaaatgtccagaaattttatgctaatattacatagaaaacttgacagatgaaaaaagtgaaacacattactaattttattcattaaaacaggtatataaaagtcctctttaactacctaatgaatgtgtcatatcctaatatagggagtgtcatagtgttcacatctttgaatatataaattatctcaaacagttaaaaaattaaagccagaacagggtacaaaaataagaataaaaataagaaaactttctgttcacaggacgtaacagaatactttaaacactctcaagttataaataaaactttttcattattatttcatgttagacaaaaaacaagtcattttactttaactcattttatcaattttttttttttaaatcaagagacagggtgttactctgtcatgcaggctggaatgcagtcacatgatcattgcacactgcagccttgaactcttggggtgcaaaggattctccaaccttggttcccaagtagctggcactacaggggcacatcaccatatatggctaattctttttattttttgtagagatggggtctcattgcccaggctggtcccaaactcctatcctcaagctatccaccccccatcagcctcccaaagtgttgggattacaggggtgagctaccatgcttggtccaaattttttgtttatacaagggaaaatctccagtaaaatatgtataggtgccaataccataactgttcaaacacccttatgactaaataggcacaaaatttcatctttttaatgactgccacctgaagttcagaaacatcctagggaaaaaaggataaacaacttcatcaataaagaggctactattatttcactactgtctgggagatccatcgtgggcttacaggaatccaaatggatactgccgttacgtgtagaagtgtttatcctccatcccttccaccctaccttccccaagaaaaggaactcaagggggccatggaaagggaaggagtcttcccaaaaagaccagactgtttttcctcctctgtcatagtccctatagagtcaggcagcttaggggttgcagggggtgggtagcataagtgtgatgtactaccgaggaaagagtcaaagactagcagtaggcattacacatggagccttctgtcataaaccatctgagggcataatggcttcttttcattcacaaaggaaaatgattcagagtactacactcctgcactcttgatgatttagcagaaaaccatggaaatcaaggaacaacacacacataagaatgtgtgtctggctcaataattattctggactaagtcctaggaagagcaaaccttcaatgttacaaattaacctggggagtggggagctgtgagaatcaaatgagataaaatactgtgaaagctacagaattctataacatataaatctaaggttttattagattatgactttcagccaaattccttttcttagttgtaaaaatattgttttttcatggtgagtgtttaggagttgtgcttgcaaatcacaatttatcagacggcctggtccttattaaggttcttctctttatgtaaaaattagactaaaagaaaatcagtgtttctatgatttttatcttttttcctttttagagacggggtctggccatgttgcccaggctagtctcaaactcctggactcaggcaattctcctgccttggcctcccaaattgctgggattacaggcgtgcgctacagtgcctggccagaagtcaatgtttcaaagaggcttttaagaaacaactatgatgaaagcttttaaaataaagataatactacttggaggctccaagaaggtatttaacaacttttttctgtagttttctaaggaggaaattagaagggaagcagtcatttaatgattacaacttagtttgtctagttttctttacctgaattcatctttctactccaaaacttaaaagcgctataaagagaccatcccaaataaagttaatcaagaagtagggctttccagggtatatgcaaattttgctctttagttgccttctctctctactatgcactagaaagaagatttaaaaacaaatttatctcaacagtgtgtccccaacctccctaccctcctctgcattgctttgaggctaagaaaaacaccttgtttaaaccagagatttgtccaagcagaataaaaagcatgaatcagtatttactccttgaaatttgcccaattatctctatcacacctactctagtttggaatagcatactcagccccactggacagctccaattctgtgtaaagacaccagctggagaaacaactgcctggatctctgttttcctataatgacaaacatttgaaaactaaaacttgacagtatttgaaaaattaggtttcctatttttcatcacttgaatggataaatcacaaatttctaattcaatcataatgattcttctgttttgattgtgttgtttaaatacataatcaaaattataagaactgtatctaaaataagaataaaggtacatgcgacatgttaagggttctcctatgaatgtagtatgttagggttctatgttttgagatcatactcatatttgtgaggttcctggacaagtgatttccttatcctttcatagcctatgttcatttattctatttgtttttattagtagtagtaatgaataccaattttacatttttactctagggaaaatttgcaattttttatagaattaatttgtttcagaaaattctgatgataaaaaacagatgacaggacttatatcagaaaattagtttccttgttaaaacaagctacagaaaattgtcttggaatagaaacattcccagattaagaaatttacacatttacatgctattccctagaccaactgggggctgtatactatttttctttatatatgatatcatcataaagcactttctataagctgattaatgaatgccttgacacataatttttttt

SEQ ID NO: 6 - RNA, 3021 nt, Homo sapiens
  source 1..3021: mol_type = mRNA
actttttctcctccacctactgcaactgttcccataaactgggtgacagagtcagaaaactccccagctaaacacccgtaagacttcatacaacacaatactctatactgtgatgatcacagctgccaaggctacctaaaagaagacagttatctcatatttggctgccagctttttatctttctctcgaccacttaaaacttcagacttcctgtcctgctggtatcatggagaaagtccaatacctcactcgctcagctataagaagagcctcaaccattgaaatgcctcaacaagcacgtcaaaagctacagaatctatttatcaatttctgtctcatcttaatatgtctcttgctgatctgtatcatcgtgatgcttctctgaagttctgctacaacctctagatctgcagcttgccacatcagcttaaaatctgtcatcccatgcagacaggaaaacaatattgtataacagaccacttcctgagtagaagagtttctttgtgaaaaggtcaagattaagactaaaacttattgttaccatatgtattcatctgttggatcttgtaaacatgaaaagggctttattttcaaaaattaacttcaaaataagtgtataaaatgcaactgttgatttcctcaacatggctcacaaatttctatcccaaatcttttctgaagatgaagagtttagttttaaaactgcactgccaacaagttcacttcatatataaagcattatttttactcttttgaggtgaatataatttatattacaatgtaaaagcttctttaatactaagtatttttcaggtcttcaccaagtatcaaagtaataacacaaatgaagtgtcattattcaaaatagtccactgactcctcacatctgttatcttattataaagaactatttgtagtaactatcagaatctacattctaaaacagaaattgtattttttctatgccacattaacatcttttaaagttgatgagaatcaagtatggaaaagtaaggccatactcttacataataaaattccttttaagtaattttttcaaagaatcacagaattctagtacatgtaggtaaatcataaatctgttctaagacatatgatcaacagatgagaactggtggttaatatgtgacagtgagattagtcatatcactaatatactaacaacagaatctaatcttcatttaaggcactgtagtgaattatctgagctagagttacctagcttaccatactatatctttggaatcatgaaaccttaagacttcagaatgattttgcaggttgtcttccattccagcctaacatccaatgcaggcaaggaaaataaaagatttccagtgacagaaaaatatattatctcaagtattttttaaaaatatatgaattctctctccaaatattaactaattattagattatattttgaaatgaacttgttggcccatctattacatctacagctgacccttgaacatgggggttaggggagctgacaattcgtgggtccgcaaaatcttaactacctaatagcctactattgaccataaaccttactgataacataaacagtaaattaacacatattttgcgtgttatatgtattatacactatattcctacaataaagtaagctagagaaaatgttatttagaaaatcataagaaagagaaaatatatttactattcattaaatggaagtgggtcaacataaaagtcttcattctcattgtcttcacattgagtaggcagaggaggagaaagatggggaggaagagaaggcgttggtcttgcagtcttgtcttaggggtgtggggagtgggggaaagaatattcatgtataagtggacccttgcaattcaagcccttgttgttcaagggtcaactgtaataggatatagctatttttcttcctctatcaaccaaatggtaagcatctattttgcagtccactctactgagctaaattatagatccagctatgctatttataattattttcttgatgaataaattttcaatttctcctctgaccatttcagaacatcttccaataactcataaaacaactgaagtaaaattgagtgctggaaaatatattcaccaaactttggtaatttaagttgactaaagtttaaaattaagtctaaaatagtttacacctatactgcataatccaacaattttaatttcagttgaagacatgttactaatataactattattaaaagagtagaggatgtgtaattaaccatatcttctaaaacatggttactaaaagaatatgtaacatcaatattgaccttggtttcttacacaagtgttgctaactcaatagtgaaggagacactattaaattttctgaacccatgagagatactagagatggggagtggaaagtgtttggttcagggatatctgaagaacagaagggcagagatttcttaagtgacgcctcatctacaagctggaaattcctaaaaacaagtagaaagcttataaacaacaggtgatacactcacctcactggttttagtaaattaccaatacagaaagtatccctagtcttaaaaacaagtggaaaatttgaactgattagtcatattcctttgattacactgtttgttacaatatttttctcagtaaacagaaataactaatttttttgttcttcattctttgatagaaattaaaatcttattctgtgaggattacagaatactataactcaaattataaagtagaataaactctttaaataattattcttcatcataaagtgtaaagaataagatataagaaaacaatttatttttaaaatttaatatactaaatgctcaaatatgttctactatagaataagttcttatcttaatttacagggcactaaaaacaattttaaaatgcttaatgttgccttttatattttaattggttaagaatatatatttgtttaatgcaaatcagaatcactatattaaaatgaatgttcttgaaaactc

SEQ ID NO: 7 - DNA, 2226000 bp, Homo sapiens
  source 1..2226000: mol_type = genomic DNA
aaacaagttgtactacggcaaaccataaaccttctgtacagcataggaaacaattaacagagtgaagagacaactgtggaatgggagaatatattagcaaaccatatgaccaatatgcagctttcatccaaaatatatgaggaactcagagctcaagcaaaacacacaaacaaaaaacaaaaaatctgattaaaaatggtcaaagcccctgaatagacagttctccaaagaagacatgcaaatggccaacaggtatatgaaaagattctcaaaagcgctaatcatcaaggaaatgcaaattaaagcaacagtgaaatatcacctcaaacttgttaggatggctattatcaaaaagataaaaaaaataacaagttttggcaagaatgtggataaaagggaatccttatacattgttggcgggaatgtaaatttgtatagccattatggaaaacagtatggagattcctcaaaaagttaaaatacgaatgccctaggatcaaattaccactcttttgggtatatataaaaaggaaatgaaatcagtatctagatgagatatctgcactcccatgttcagtgcagagttattcacaatagccaaggcatgaaaacaacctgagtgtacatcaacagataaattaataaagaaattgtgatatatgtaaatataatgaaataatatttagcctacaaaggaaggaaatcctgctatttgtgataatgtgggtgaacctgaagaacattacgctaagtgaaataagccaggcataggaagaataatactgcatgatctcacttacatgtaaaatctgaacagtcagctataaagaagcagagggtagattgattgttaccaagggcagagggagggggagaatgggaagatattggtcaaaggacacagagttttcattatcaggatgaataagttctagagatctaatgtgcaggataggggctatagttaataacactacagtatgcactaagagagtaatcttgagtgttatcaccaaatacacaaaaaaagggtaaccatgtaagaggatggatatgttaattacttttactgtagtaatcatttcactatatgtatattgaaacatgttgtacaacttgtatacatttttacaaaaaattaattttcacaagcctcaagacagacttatgaatagatgaaacagaatacggaaaatatctgaaacaggaaggagtccagcattttagaagaaaaaatagaagtccattgtggctggaataaagtataaagaggaagagaggcaagagtttaagctggagaggctagtagaagccaagaatacaacaaaaaaaacacatggcatttatgctattctcaatctctaaaatagatatgctaatcaccgaagactttttatgtaaaatagcagtaattgatataccagtattttcagagttgtgtggaatgatatgtatattattttagagaaatcttggtggattcatatggactcaacttatctttcaggtttatttcttgcatttataaattatatctaataaactataagttactgattgttgtgtatatcttgatatatagggattatttgtgtttgttatacaaaaatcaaatggaagtagaatagctaaaatgtatgagtacttgcacacaaagcacacacacacacacacacacacacacacaccataaccccttaggaaaacactatttcagaatagcgatattggcatatttcacatatgctaaatgagttattccttatagtttcataatgtaactatgaaaccagctgtctgtttactttttgtggtaggggggatagctttcctaacaaactaaatacctaatacaaatctgagaggaaacatatgattttattaatttttctcatgaaaacacttaaactttcttgtgttataatttcaaaccataagtgcccccaagacaggcaaacttggaagttttagagaaaattatacggtataattgataacaattacagtttcttttaacaaatactgattcacgattagtatttttaaaatacaaaatgcattttcctgaatagcatttatttacttgttaaagaagttgtgtaagagattcagctaatctaatttcttactttgtgaagaaatcactcatctaaagtcaaaatatcaagtataaagtctacccttgggagaagcatacagggtgccagactttaaatatctccagtgtgcaaaataaataatattttcttgaaatatcctcttatttgaaaatttgctatagagtcacaagaggcaaattccatttgagaaagtgcatgctatattttacaacgcagaaatgtggagctgagcacacaacatcttattgcaaaagtacaattcagaagagagtttttacccttaaaaggctgtgaagataagtaaaaatcagccaaaatttcagtgtgaataatatgatgtttggcgaggaactctactattgttacacttaggaaaataatctaatccaaaggctttgcatctgtacagaagagcgagtagatactgaaagagatttgcagatccactgttttttaggcaggaagaatgctcgttaaatgcaaacgctgctctggctcatgtgtttgctccgaggtataggttttgttcgactgacgtatcagatagtcagagtggttaccacaccgacgttgtagcagctgcataataaatgactgaaagaatcatgttaggcatgcccacctaacctaacttgaatcatgcgaaaggggagctgttggaattcaaatagactttctggttcccagcagtcggcagtaatagaatgctttcaggaagatgacagaatcaggagaaagatgctgttttgcactatcttgatttgttacagcagccaacttattggcatgatggagtgacaggaaaaacagctggcatggaaggtaggattattaaagctattacatcattacaaatacaattagaagctggccatgacaaagcatatgtttgaacaagcagctgttggtagctggggtttgttgccgagctcttcaaactctgcaaacagtgttgcttttacagaatggattttaaaattgccttgtgctgcgttagattttggggagggggtgtgcttgcctccaacctcaggaaaacacttctgggatagaaatcagtgttagaagattttagaataaagtattgttcaggagtctaggtttcttcaggtagatgatgacagggggaaaaaaatcttcggggaaatctaccccagattagttatatgcaatttagttgcaagaactgattgatgtattggcatattcagacagtgagagaaatgagaatgtacagaatgtttggataggttgaaaattgttatacttggtttctattttataaggagtttggctgtcagtcatttctcctcatcaatttctagcttttgacatttattcagtcattctgcattatatgaagaaaatatatcaatatctcctgcagggtttttcaacaactctagcatctgtttcagctattgaactgtattcacgttttgccaagttgatgtcgacccagctggtctatgatttctcgcttgattactgctcttaatttctctgtatcagcttgtttcagatagggctttgaaggctgttaatgaaaaatgacagaagtgataaattattgaaaatgtgagcatttatttatttatttatttatttatttatttattttgccctttaatgagttttgtcttacattctttcttgcctgcgtacgatttttagaaccctttctctgttttgcaatatttctttcccctacaatcagtggattataattataagtacttttaagcaaatggagcatgagcatggacagtatttggctccaaaaataaagtttttggagaaaggggagcaatttatgctttttgtataaactatgcatcgtttctataacctatcttcacatgctgtcatggggatctgtcagtgactgtaatcagactgaacatattgaaataatctttatcaccactagggtaacaagcaaataaaacattcaaacatttaacaagtgattgtttaaaacagatgttaaataatatagaaatagattttcctaagtgtgaaaagcctgattattaactgtctatgtaatacagaatctttcggctctctacccagtctcctccatagcctgaggagctaaatcatccaagttaatagactatcatatatgtacatctaatatgacctttcagtgtacacagtgctactcgtatgtgctgtgccttttctgtagtaattgtaatatcccagtcagtctggttaaggaacactattggctgttatgtaactttttttctgaatgttagtccatggttttcaattacgtattcctcttagaaagggtgagttaaaaacaacatgtatttaaatatcagtaaattaattagcaagtggtgggctaattacactaggatttctccaaaataattgctaacttctgttttgaaaaatagtcaaggatttggatgactactttttaaccttgaagcatacattaccgtggttgaatatcattcataattcatatatacagcaggaaagaaaatagttttctagatgtatcattttagcagcaaagaatttttttttataatgtggttcaggcactctgattatttccgtttaatacttttaagtactgtagatgcttttgtatagtgtgttacagaacttggttaatctttgggaagctcaaagactgacagaattttgcatccaaatgctacagggttattttgtggttggttgagaaaattcagctctgtctatactgttgtttaaaatacagccctctttggccaatgttacttttcaactttttataaccgttttaagtgaccattcaagactgtaaaaactcttttacactgcatctttagtaggactctccttttgtgaattgtctccttcgaaaaaatgtgagcttccttctagcctcactctcttgttaccatagttacttttaaaagaaggtttttctttttcaatgaagatagcgtactttaaatcagccactggaatccccaaactgtgtttttgtattttttagtttatagtttaggcttgcttcatttgcggttagaaagtgctctgtatttggtcccactgatgaatggattggacagacgctaggtggcaccagctgttgattattaatgaaatcgtaaagtctatatgccacgcacctgaagagcaggcaaacccttattgataaatgcattgtaagagctggaaatgtctgccaatatttcttgctctaaaacagggtcagcctgcagagtgatgagaccacgtgaagtcttcaaatcccaattgcttaatcctgtgtcttctgaagtgctttaaggaagaaaaaacgatgaaggagaaatgcataaaaatagaaggtgtgaaagagaagtgggacacaatgaaatagactgcaaacattttaatatatttttaaatccagaattagtgacttttataaatctatgtgagttttccccaattctctcaaactcagattgttttctctaaggcatttatattctaaaacaattatttatctcttttaggtaaaaattttattgagcatcattattttttaagtaaaaaaatctcccttatttctctttttgtgataagactgtcaagtgaaatttcccacatgagctagagtagctgcctctcaggtgttgctcttcagaaagatgagcaggggaagacactatcggttaagaaatatgctttgaaatgttttgcctgagaagcttgctccatcctattatcctcccattctcatataatccatcttttaagaaggaaaaagcaaataaaaacaaaccacttaagcatgtgcatacacacacacacacacacacacacgctttggaaaaaaaaaaaagtcagaactgtttaaaaagagaaagccacgacaatattttagttggtcctggagttaataaactaaagtgaaaaataggaaggaaagtccataattagattgtggagagtaaataattacttaaaactggaaatatttttccagaaaaatatgcaatattttttcttcactgggagtaactgacaattcctgaagaaggtgagatggtttagaaagagtgcaaagataatatatgctgtgattctccaatgttatctgaaaagtatgtaatatggctagttatcttgattatagcatggactttggtaaagatttttatgatgcccatatggtgaaaatggagaaatatttgctgtttgacataagagtctggtcaataaatcagctggctaaatgaccctgcctgtgatgtatcaattaatgaatcacagtaaaccaggaagagggcctttcacaggactatagcatagttctataaaattggttccatctgacttgaacctaatcttctgtaatgtgccttatgtctctgttcttgaacctacttggcctgtgaaatattaatgtccaaaaactgaaggacgatccagatagcctgtctatctgggaagcagaacaaatacattgaactattagggtaccaaaggattatgaccacctaaaaactgtggtgaggtcaaagagaataattgtaataggaataagtataacatcctaagctaaggttcataaaatcaatctggcaagtacaggacatgagagagttaaagcttagtaataattaattgaataaatcttactgattttgttggtcatcattattatcagtcataattcatatgacatcaaaatacaatgaaacaaagtaatattgttagacatgtatcctgaaaaaggaaatgaaaaaaatgagaacgaattttagaaggatatatatgatataatggtgtgtgtgtgtatatatatgataggtatggtatatgtatatattatatgtggtaatatatacatattttagaaggacaccatgatctaagaggaaccttaacatttgggggtatgttcagtgaaaagtgtctgaatgctaaaaggtcctacaaactataacatttgaggggcatggaaagtactagaaaagtgaaaagttgaagaatacttgaaggaaaaaagtagagaaaattaagctgatttcaaatattcgatgtgctataatgcagaagagggtttagactcacttgcacctctttggtagcaatggaaaagtattcttccagttaatgttgtgagcagagaattgattactttgtgagacactgcactccttattcctaaagtgttcagtgctaagaatggagtttctgcactaaatggaaattgaagaagatgtctgagataatttttaactaagaatctgtgagtccaatcatttcttttaaaaacatgttcttttttttagacatttatttctctgagggtctctactactccactcgcatcatccaggctaggggtcagtaaatgatagtccacattgtcacatctattactgtttgaccagtcatttaaaatggttttcacgtttctgaattgtttcatttcaagaatatttctgacacatgagattatataaaatttcaatttaagagtctatagtttatttggaagacagccacacccatttatttgtttatatgctatataggactcctttcatgctaaaacacagttgagtacttatgacagagaccatgtgggccacaaagcaggaatatttactatctggccctcgataggaaaagtttgctcacctcatctctagactataaagaaattttgttttttgcttattgactcaagtatctaaacaagcaatgtaacagttaaataacagttctataccataaacagaaattgtaaccacccatactacttaagtactagagacttggaaaagtagttcaaatatgcagcctaacagataaagatggtttcatttggctgttagtctattgagataatttacttgttgaggaatgtttatttaatgtttccataaaaaattgaagtctctgcaatcattgacttatatataatatctgcctagtttgactccattaatcttgctgaatttacctatttggtaggattctgttatttttattgctgcttttccgttagtgtatgatttcagtagacttacagaaagggtgaaagtcaatggaaaacaaggtaaagtgagtggaattttcttcttgcagctaccctcttctctcttcgtgggtttatagactctctcagcagctttggaattgcagttttagagacttacttttataacattatgagtgtgttcttgatcaaatatgttctagaagggatcaagataaaacaaatgcactgcactataaaagaacagttaagggttttagtaaatgattgataagacatgctaaatttaagaattagcaatgagttatttatattttcctgaacatagggatatgagaagggattttttttcatgtcataggagaaactataatcaaattctaagcataaagctgagggattctgaatttaccaccaaatattacaatctccatagttccataatgtgcaactaaaatccccacattttttttctagggaaagatataatttctgctcactggtagcgctggaaattcctgtaaaacccataggattcttattgtatttccatgaggatgttcctgagcagctactttgtgatgcctgtctctatggtaacagacacaaggcttaagggtctgaaagaaattcttcctgttggcttaggaatatggagcaatgagggagacccactgaagactataaaactgaggaaaggcaaaagaggcaattgagaaaaagttgtcgtgggggagctttttttgtgtatttgaaaataatttcacaatttcatttgctcttaatatatctctgaatgaaataagaaccaacatacaagtaaagttttacagaaagaaaaaattctgtgaaagtattgttttttaaccatctagtcaattttatgtaattgaagtcacacagattttttctttagttggcttgcctttcgctactcaagaaaagattgcttcttgcctgaaattggtaagaggacggctctacccctggcaaatttagttcttgttactgctatcaaagatcttgatcttttaaaggactttctttttcctgattccaagggtaagaatattgaactctggttcacattactcataatcactgagcttctcagggaattatgaaagtacactagccttccaagatgttcttttttaggtctatttctcttaaagaccagtaataaatagagcaaatagtactgcttatttgaaaattgggtatttcgtaagaggatgctgggtgagagtttgtgtttttacatgttttactttgtttctcttattaaaataacaaaaaagcaaacaaaaagctcctagaagtttaaaaatatttgattttccatttatttgacttcatcttactttcagcttagcaaatagggacacatcacatttgaattgttttagaaaggagataaatatgactctcctttcccttagattcaaagtatatgttcaaggtgtcatcaaatagccaaaagtctttaaaatatttatgctatgtaaatgtccttcaggaaaatataagtcagagggaggagatggccgtcttagtataaagctctcatgtgtatttgcagtgttaacatgagtgttgatgttttatttatcttcttaacatgttatatctgcacatgtcttcatttgttatatgttagggtcaacagaaaaaataataaagttattgcaagtaagcaaaaacttataacctgatcaataaaaattaatattttaggttggaagataaacacatctcaaatgtcattttataagatcaagttaacaaatgttagcatgcttaaagctttagaggaattaaatctttttatggtttattttctgaccttgagaaatttatagactctgtgcagatatatgttttcacaaatttaatccactctatatagatattagtaaaatgtaagacagtgtcttcagtacctgttcacactatctttaaattaaatgaaaaaactcaagttagctgtaatgtttcagtgtctcctttgatagtgttggaaagcaaattttttaaagaaaaccttttttataactccatacattttgacctatagatactaattgcaatataaaatgtgacatctgaataaaacaagaatactttaaatattcaatatatatactacttttgaaaagatgacttaaattataaacatataaattatatgcctaacatgactggcttccaaaaaacttattttcttgagctttggggttacagcctaaagtgcactgcagtaaataagcaaatgggtaaaaatattgtctagacaaaagtaaaactgagatgttcttttgagcaaacgtttatagaggaggtacaggatgacaactggaaacgtaggtggtacgcagagattaattgctgtcaatgtacacctgaaggtaaatggatggtgcttatcaaatttccagaagaaatattgacattatgttgcaatttgaagacagggttatgaatacaaagagctaagggaaaataaacttatcagcatcattcagctctggtcatgacattgttacaactgattataacactcccaggataaaatgtgataaggaccatcatagtctgtttttactagtacagatttcttttatacatgctataagtagaattgttcggtccagcaacaataagctggattattgaaagtgacactaatgctaacctgaaattgtatgggttttaggggagatgtgggactcatttatgttctatgacaagtgtaaaaaggagattaagtaaaagcctgcatgtgatggacacattagtgagtaggaatctcaggttcctctccctttggctgctgacccattcatgggctggttttggtggccacagtggcaggaaacagagtctatttctccattaggtcatccagacaggattagagcccaccaactgaaatgaaaggttgtttctgctgcttttcattcatccaacaaatatttattgataaattctaactgccaggctctgtgctagagcaagatgactaagatacagtccctgaggaatttagagacgaacgtggtttatgtggatgagaagagaaaaatatttacagtgaatagctaagcagagagcaacagcaactgtgaacccagacagtaaagctgacttaggactgagctagaggtttccggagttcctagtgtgagtgatgtggaaaaactggcaagtccatcaaagagcaaaatgataactgaacagaaagaaagcaaatccagtgaaaaatagtaattcaaagtaaagggtaaagcgacatatttgaagtgtcacttgaaataaaaaggagcatgccttccacctgttgctcatcttcactggaatcaaacctagaaggaaaatgtctaggctggtctaaaagccagttgcatacaatgatattaaatatgattaaagctagcatgagcatgaccatgcaaactttcaggaggatttgaaaacagttacctcccattggtagtttatgtacgtctatccctggaaactttttcctatgctatctttagagaccttgtcatattttatctcaatgtctaacactctttaattagaagctacctgaaaatgtttcactcatgtataaagttaaattaatcacagaatcagacctcagaggttacaaaggagggctgaaaggataacatctcagatagaatagatctattgccaaataaacctgtaacaataagaaattgtgttagataatccgtaaggttttatccaatttcaacatcttccaatttaattgatctccagcctcacacccaactcctcctaggaaattaaaaagagacaggtaaacaagatattttctgaagaatcgaatcatccagaaagtcattctctctcaagcagtacattttctaaagaatttaattatcgaaaaaagtctctctctctcctctttctctctcccttcttctgacatatatagatatgcatatatacacatatatgtatatatttatctatatatctatttatatctctgactcgctgaagtaacttagatatataggctaaaggcaaagaaaaattcctcccaacattcattagtaatttccctttatagattaaggaaagtatttctgtcctccttgatttttaaaacattttactgaactataacacgaatatataaaagttcacaaatcaataggtgtccagcttcatgaattttcacagattgggcacaccccagtaattactcaaggcaagaaaagaatattaccagcatccaaaaactttgtcttaccacttcctagtcaatactctcccagaggtaagtggaatactgacatctaacacaccattgattaggacagacagttcctgaaatgtatgtacttgaagccatacagctgtactcttttgtttctggctcctaaatctcaacattctgtttgtgagatctatctaatttgtttcttgtagttgtggtcccataattttcagtgttgtgtagtatgccatcatataaatgtcctataatttacttattccatctactctggatgaacatttaaattgattccatttgtgaactcttaaaaataattccactttgaatattcttgcaaatttactgcacatatgcatgtagttctgttatgtgccaagaagtagaattattaggtcatagaatagtgaaatactcatctttagttgaaaatgccacgtagtttttcaaggtaggtaaacaaagaaccatcattactttatagaagttctggacatgtcaatgcttagcattattagtctttaatttcagcctttctggctgttatactatagtatctcattgtgtttctcatttccatttttttctagtgactaattaatttgagaaccattttttgtgtttattgctcatgtggatgttatctatagtaaggataacatttcctcccaactttcattagtaatttccctttgtagattaaagaaagtaattctatcaacttgatttttaaaatgttttactgaactataacacaaatatataaaagtgcacttttctaatctcatgctcatttttctattgatttacaattttggtttttataggtatgagatctttacatttttatatggtccctacatttattgtatgtgttgcaaacatctagacagatatcttttataggaacttagaatttcaaaacccggagaccattaaagaatatttagtcccatatcttagtttgaaagatgaggaaagtgtgacttatagagaaattgtcatttcttttaagtttcttccagttagtagtaaggccagatacgtaataaaagtctcctgacactgaagtaaagggtttttttctagtaaaccatgtagggtctttagtcttgtctaatactgtgactcaaactccttgtctcttttggaaggccacaaaatgcgtgacatagtaattttaatagcaagtatagagtgatgcgtgattaatctcattgattttgtgaacaaaaatatcttcagctaacaaactgttgtatagcatggccatgcaatatttaaacctgtatgggccgggcgtggtggctcatgcctgtaatcccagcattttgggaggtcgaggtgggtgtatcatgaggtcaggagttcgagaccagcctggccaatatggtgaaaccccatctctactaaaaacacaaaaattaggtgggctcacgtgcctgtagtcccagctactcgggaggctgaggcagaagaatcgcttgaacccaggaggctgaggttgcaatgagtcaagatcgtgccagtgcactccaacctgggtgacagagtgagattctgtctcaaaaaacaaaggaaaacaaaacaaaacaaaaaaaacctatatgttcttttcggcatcagattttatttttcctctttcataactttattattatattcagtttcttttcacatttattcttattacttggatgttcccattccaaatttggttctaattcaaaaagttttcattttctatagtggatgaagaacaacataaattttacaatactttcttttagtgagataaaatttagtttacaaaacataattactagtacattaatatttactatttatttttaacatgctaggtgcagttcatgcgttattttagctaatctttggaacaacccccgccaaaatgttttattatgcctagtttatagatctagaagctgagcctaagtgagattaagctacttgtgaaacagctctaatcagaaccagatctttataagattctatgcatttcactccttccatgatctacttctgtacctgcttggaaggaaattgagttagtgatacagatttgggtcactacctgcctttagttcttctgccatacataggtcttagggataacctctttttccaatatcattaaataattcattttctgtatcttttttttccaaaacggtaattagagaagtcacttcgttggccttgattttattcattgtattgaataaatacaattttctaaatacggaactcttattcatgtgcaacctaaatacggattaggtgagttaatatccagagaccagattattactaaacttttcttgcatttagagactgaacttattataagaatcttttaattctttttagcaacctattccaaggttgattacttctcatgcatattttagttccaaatatttctttctctttcttgttcattggagaagcattccacagatgcctgagaaacaacttgctctcagtctctctatcttctagtccttggctagagtccccttgccacacttccctagcttcatgcagagtagatactcaatagtacttccacttagaaatttaaatccagatgagttacctagcatgctactttcctcttaaggagtaagtgaagcaaatgtttatagttgtttcactgtatgtgaacaaataggaatgtcaataaaacaagtacatttaattcataagtacttgataatcttaattccttaaatgtataaagctttaaaattaacaaaatactttcaagtttaatttattcacataggaaccatatgaggtaagcaaggtaggaagtcttatttcctctttatagagagccatgtaactaatttctcctatttgtatcctaaatttcttttagctctgccatcccccctccatatctcctgacagtcaccaccttagtttagatccccatatctgacttcgaatacactgatagcttcctaatgtaccttccttcttgcttctctccagtttacccttcacaaggctgctaggcttatctctctcaaagacaaaacttaataagttattccactgcttaaagtccacaggtggctttatattatttatagattataattcaaataacttgcatgaagagaaggtactttacaacaatttccctgccatgtgctcagtctaatcttatatccaccatgtgaatgcctcaccctagccatacaaacagttctctgactgtaacacacttccttttcatgtgcctttggaaatgttgactccatcccacagtcataaacaattcttattcacatatatttacttggtacatgctttataatcctccaaaatagtgtagctagtgcctcttctttacttttggctgaatcatgcacccctgtgcatagaatcttcctaatacttgtttcaccacttattttgctgtgatgtacttttcaggttattgatttattcataaactattagtgcctgagggccatgaattctctattctttttttttttttaccctttgcttagctcttctggagggagctactcaagtttaacttaaagtagtaatgagttacacagccagtaagacatttgtttgagtcctaaggtgacatcatttccattgcatccttcttccctctaatattactaaccatagtacacgagcagtactattgtcaagattcctcctcattcagtttagggaaatgcgttgacccaagttaccatttttgtctatttcacaccgtaaaagtcgggatatttagttatgatggtatgatagttaccctacatggtattttaaaggctctatttcctttgtgacttacacatgacctccccagaggtcttaatttaatggaatcatcacctaaaataatagaagagtaaattgacagtttcgtttataaggtacatggattcaggcatattggtaaagtaacacaaagcaaaaatgtggttcttcatttgtcttgtttcatcactaatagaaaatgatggagttcaccaatcacccaattgtactgtgcagcatggttattgtaaagtatacctgaaattaaaagcaaatatctacttccattttttccactgaattttcatcagaaaatgagaactacatactgaaggatttggggttggcgaatagcagatgtataatgccagcaatatgaaagcagagcaaatgcgtgattggtttacagcctcaacttcagtagtactctgcaaagtctgccagcacacaggtgccttgaggctgcaaagagcgtaggaattcagtggatgtatcaaatgatatgagatgttaatacctacttccttctaatgcatagctttgtgatattagaaaattaataaagaagtgaacaaattaattactttataatctcctaaatcttctctgtggaaggaaaatctcaaagatgcattaagtatccagcaaattggttttgaaattatccattattaaaaagcacaattctgtgtaacaggaagccacatgccaagagctatgtatatttaatcatttatgtcgatgctttttgtagcaattctgtttattctctattgacattatatacagtcctttttatacatagtggaatttaatgtgctgtgtttaaaagacacatcaagcctgacagaatccaattgtatacattatacttttaatttattagaaaatgaaatgatcatttgtgggcttatattagccaaagcagaggataaattttattatattaagaaaatcaaatactgtgactacatttacaaacattgtaaacatgacacttgttgcataattaataaatgaacatattgacctttaatataaaacggcatgaaaggaaagggaaggtggaagatataaccacaatcagaagtggaaatgaactcaaaatctgtaactgtatattaaagaaacatgtgattcatgattgcttttttgccttttccattttgaggcaatagtgccatgttgatattcatttgtgctgtcaaattaagggaaaacattgacaatctttaatataacaaagatagagaataaatgcaggtcaaaagtgtgtgggagaataagagaattgatcacattttaagaacaattacccatgtcactgcttaacccaacgtaatgatgtcaaccagtaggatggaagccagcatcaggaagaatcattttccaagcagatggatctgctgatatttttaattgattgaaggagcgttccattatttttaatcaaaaactaatttcaaataaaatggaaacttccatgaagtttgcaaaaatctgtatgcattaaggctcagactaatagaactacaatgttgtgatagttaataatccattatttaattataatgattattgttcttaacacattacacatgggagtttgtgggaactaccctacctttcttgcttctcaggtgagacaaatcattctcctagtggtctcaagtggtactgaacctcattttatcactgatgacatgctcatgaaactcacactgtactggtgttcttttctccgtctcactcacttctttgctgtgcttcctgggatcacctccgaaataagttgctggcactcaaataatttgctcagggtctacttctggtaaaaggcaacccaagacaacatgatattttattattaatagttttcctcatttaattttatatataatcatttttttctgacagggaagtatatttgaggaaataatgagggcaattatcaaaatatgcattggtttgggagttagagaaactgtcagaagtgacacaccaattttgctacatcgtgacttggtaacagtcattaccattctgggccttttattctcttctgaaaaaatggaagcattcgattacaaatcattaaagaataaagaagatagaaagtgatagaaaagataacaaatgttgatcacaccatgtgcaattgcttgatagtagtttccaggagtactataacagactgagactgtatctacttggaactcgtgggataaaataccattatttgatgccgtatgtgctcggcatgaatgcagtgggaaggatagaaaatatttcatatatttgccaactgtagaatatactgtaatagatcaagtttcattttaaaaatacacaggacacatttttttaaaaatctcatatgaaagcccagcaaagaaaagaagaattgaaggtgtagacatcttgaatgaaaacaagaggacgatttgattcaactgccatttattccaactttcaccctataaccccatagacacagctgtagaaaactgagatcttgaagaaagccactgaattagataatatctacgactacttccaactacaaatgtagaaataattgtctttacctactcatcctcagctagaaagcagctaatgggctactttaaatgtgtgatgctttcacaaattaagcaagactgagtacaacaagcacaacaagtccaacagcacaagttttcacaaacagtattggatgtaacaatacatccaaccagtattagatgtaacaaaaattggttaatttcctaatcaattaattaggaaattttattttctaacctgttggttgccagttatgggcttaagatggaagccagcatcaataggtttaaataatacctttgttttaaaaagaagaagtctaattcatagtcaaacatgtgctttggctaagtggctttgttctgggttttgcatgacagctggtgataaattgggaaaatgtgtaagtagcactgtggtaaggataatgttgatgaagatagaatgtttgaggccactttcagggagaataaaaacgacataaagtaatacttaagactgaattttcttagagatgataatctcatcaccaagcctcattttgccattgaaaaatttcttatgaattcaactatcatatttacatcacaatagacagtattataactctttagcatagggattttgctttaacttactttcaaccaatttatatgttaaagctatttatatctctgctgtttcatgaataaagcccagaggtatcttctttcttgactcactgtcatatcttcacatttcatcacatttttgcagttcaaatatcattcacttagtaacactgaaagcatagaaagattaatcagaaatgatttctgccctcaacaagctgacactggttagagtacaaaagccacactgaaagaatatatggagatctatgatctatgatcaatgatctttgaagttactattgtcatttttgggggcaacatgagtcatgcccatatgaaataacaaacttaatcaatgttgtgtgtgttctgagtgctctaccaaccggccacccccacccccccacatctgtctccctctccttggacctttctattctgagacaaaccaatattgaaatgaagccagttaacaaccccacagtggtctctaagtgttcaagtgaaaggaagagtctcacatgtctcatcttaaatgaaaagctagagatgattatgtttagtgaggagggcatgtcaaaagctgagttaggctgaaatctaggcgtcttgcaccagacagttagtcaaggtgtgaatgcaaaggaaaaattattgaaggaaattaaaagtgttacccccatgcacacatgaatgaaaagaaagcaaagcagtcttactgctgatatggataaaatttaaatggtctagacagatcaaaccagccacaatattcccttaaccaagagctaatccagaggaagatcccaactctcttcaattctacgaaggctgagaggtaaggaagctgcagaagaaaagttggaagctagcagaagttggtttatgaagtttaaggaaagaagccacctccaaacataaaagtgcaaggtgaggcagcaagtgcagttggagaagctgcagcaagttatccagaagttctagctaagatcattgataaaagtggttatactaaatgacagattttttatgtagatgaaatagccttctatttgaagaagatgccatctaggattttcatagctagaaaggagaagtcaatgcctggcttcaaagcttcaaaggacagggtgattcttttgctagagtctaatgcagctggtgactttaagttgaagcaatgctcatttaccattctgaaaatcctagggcccttaagaattatgctaaatagacttagcctttgctctataaaagtaacaataaagcctggatgagagcacatctgtttacagcatgatttactgaatattttaagcccggggttgagaccttgtgctcagaaaaatatattttttttttcaaaaatattactgctcattaataatgtagctggtcatccaagagctcatttggagatgtacaaggagactcatgttgttttcatacctgctaatataacatccattctgtagcccatgggtcaaagagtaagttcaacatttatgtctcattatttaagaaatacatttagtaaggttatagctgctgtaaataataaatcttctgatggatatgagcaaaggaaattgaaagccttctgtaaggaattcaccattctagatgccattaataacattcatgattcatcggaggaggtcaaaatatcacatttaacaggagtttagaagaagctgatttcaaccctcatggatgactttaaggagctcaagttgtcactggaagaagtcactggagatatggtgacaatagcaagagaattaaaatgagaagtggagcctgaagatgttgctgaattcctaaaatctcataataaagcgtgaatggatgaggaattgcatctgatggatgagcaaagaaagtgctttcttgagataaaatttacttctggtgaagatgctgagaacattgttgagatgacaacaaaggatttagaatattacacatacttagctgataaagtagtggcagaatttgagaagactgactccaattttgaaagaagttctactgtgagtaaagtgctatcaaacagcagcacatgctacaaagaaatgttttgtgaaagaaagagtcaattgatgcagcaaaattcattgttgtcttattttacaaagttgtcacagtcactcccaccttcagcaaccccaccctgatcaatcagcagccatccacattgaggcaagagcctccactagcaaaaagattacaactcactaaaggctcagatgattgctagcttttttagcaataaattatgtttttgttaaggtatgtacattttttaacataatgctttgcacacttaggctacaaaataatgtaaatataacttttatatacactgggaaaccgaataattcatgtgactcactttattttggtgatctggaactgaacctgcagtatctccaaggtatacctgtacatattcattcaacttttaccctctaacccgcttacttctgtccctgtggctattgctccaacatcatgataaaaacaaaacatcacatagaagtatggcaattgtactaaacgtattgtaccattggcatttggtgtctgtcgtaccatcacaattgagcctcatccttctttgttaacgcttaattcagagaaaattttcattgagattttataaatgagtaatatggctctgattattgccctgtctgactgcttttatctctatacaatattgtgagagttgctaaagagacttctgatgctgccatatatgtaattggatatttttaaattccatacagtcatctaactgacctctcacccactcaccaaaaattacaactcactccatttgcataaagtaaactgtggaaatatatatattttacctttttcaatctaaattattgctcatggagagtctatttcaccacaaacaatgctatatccttaccttaatggagtattacaatgtaattagccatggaaatggaaaaaatgaaagaaactgttatgaacacatcttcccttttaagccaacttgtcagattttgatagaagaaaaactttcaaagtcttcttacgtgagtcaggtcccattttcttatatttgcattctgctagatttacatctgtctatgacgatgatagtaaaggtgataatgatgataaaggttatgcttatgataattcctcataatgggtaactgtaatatcagataatacacgataagatctttaaaagaaagatgacaagtgaatctcataggagttcagagcatggtgaggatggccctgatttttcatttctgtctctctagtgcattttcatacacactcatcatgggggaggagggcactcaactcaattcagtttatgggatttcatcccagatttctaaatacattatacttatgactctgttcattatcccacccctcccttctctgattatggatgtagtgatgctgattatttttatattcttcactatgaaataactatcattcttcatccatttgggcttctataaaaaaaaataaataataaactgggtggcgtaaactaaaaaaataataaactgggtggcgtagaaacaacagagattcattgctcaaagttctggaggctgggaagtccaagatcaagatgaaggcacactctgtgcctgatgacagaccgtttcctagctactagatggtaccttgttgctgtgtccttatatgatgaagaggcgagctggctctctagggtctcttttataagggtactaatcccaaacaagaaggctctgtactcataacctaatcacaacctaaagacctcaccccctaataccaacctcttggggattagctttcaacatttaaattttggaggaacacaaatattcatactatagcaacattgcaagcaaaattagaataatgtattagtactgttgtgtgggatataacatgagcatgttaagaagagaatcactggattttggaatgtggtaaggccaattatctaattctcaggggaaaatactcagtaagactgaggaagtaggccaggcaaggtgactcatgcctgtaaccccagcactttgggaggctgaggcaggtggatcatttgaggtcaggagttcgagaccagcttggccaacatggtgaaaccctgtctctactaagaaatacaaacaaacaaaaaaaaaattttgctgggcatggtggcacactttagggtggctgaggctggagaatcactcgaacctgggaggtgggggttgcagtgagcggaaatggtgtcactgcacttcaccctgggtgacagagcaagactctgtctcgaaaaaaaaaaaaaatacactgagtaattaaatgtgtaaacatcattttaaaaaaacttttaaaactagtttttaaacttttaatactttaaaattttaaatcatctaatcgaacatgtatataaagatcaaaacaaattaattgtttcagtagaacagtggtgcctagagaactttatttctctggacccaattattcttaactcatcaaatcatatatatatctgtttattcatacgccactccatatatacctaagatagatacatagattgaatcatatgaatttgctgatattggtccattttgaccaaaaaatgataagtttttaggattcaaactaatagctctattactgtattgattaagtggagtgataaggtaccagtgcaatatgttatcactccacttaatcagcacagtaagcccaagaaacataaaacataaagaatattttagaaaatgatgatgatgatttcattttatcaaagctatatgctcctttactgaaatcagacaagggaaaatgttcccttctgtagaaactttattaatcccttatgatcttaatactgttaataatggactagactgtaaaggattaggtaactgaggtgttcaatatggatacttgttttatgtttaatcaaatttatctgactctaaataaatttggctgaaactagacagattccttttctattgagacagtgggctctattaagcactatgtctgcataggaaacattacaattaattttgcagtgacaatatgctttttaactaacagactaatggaaggaggactgatgtaaagcataattctcaaaaagaggggggtaaaaccttggtttctactacaattattcattttatagtattgtttgataacacatactttattaaattgtagatgcattgtaagtttttatagtatatgggaatctaaataaaaggagttatttggttgttatgccatatttagcataaatattaccatccatgtatgttgttgacttaaaacactgttattttctaaaatgtaagcatagaaaaagaataaaattcttagttgatattgcagaaatatattgtagtgtttgcagcatgaaaaggttttatatataataatatacacttaataattaatttccaaaggctgcctgtggtcagccttctttgaaagcatggattctggcaaatgagcaatataatctctttaagaccatttaagctcttaatctcttcaaaccagtaccaaagtctgttcattttgttgtaatagttattgtgtattgtttctttttaattgtgtaagtgagattcaacatcacttgtcagataagaaaaaaaaccttcaaaataaacgttaatttttcccattattgctagaaggaacttggcgtttgaaattttagatattcttaaaatttctttttaaaaatttagaattaaaaacacaaaaagaaaaaagaaaaaaatagcatttactattattccccaaaaatgaaatagtaagatattaacaatatatatatgagatatatatcctgaaaattacaaaatgctgataaaagaaatcaagacctaaataatttcagggatatattgcattcatggattggaagactcagcatagtaaagatgtcaattcttcccaaatcgatctatagatttcatgactgaaaacgattaatgtgggaggaattgctctactcaacatgaagaccttagtatatagctacagtaatgaagacaatgtgatattggtggtgagacagaaacatggagcaatgtaataaaatacagaacccagaaatagaaggaaattattatgccaaactgattctttgcaaaggtgtaaaagcaattcaatgaaggaaactatcattttcaacaaatgatgctagggtatttggatacacataggcagagaaataaacttgacctgaacacctcatactttattcaaacattaactcaaaatagatcatggatactaatataaaacctaacgcttatagatttttcatatatgtatgtgtgtgtgtatgtatacctggattatttccatctatgggtatatatgatttattcctgcctttcctttaaacccaatataattgagaattagtgcaggggtttttcatctttcctagttcaattttacattaataatctttatccctttaaagatattgatattgaattgttggagtttggttttcagaacagatgttttacagtctctggtagctaattgagttttcccattcccttgattacttcttgtactcttagatgaaagttgagtatgtttttcagtgtttattgctaggaaatagttgattacagagtcatttactagataacaaacatggaaagtaatatgacaggtttttgcttttaattgtgcttttaatttttattctacatataggaaagggtagttttcaagaggtatattgcaaaacatttgataaaaatctcttaagaaaactgaatcttgactcaataaaggaacatatgtttccaagcttttttgacaatattaaaaaaaaaactagtcctctggtcaaataaattgaagaagtttctacacaagagtcatgtattttatgtactgttgtaggcatagtaatgatcccccaaagacatacatgttctaatcttaggaagctatgaatatgttgccttatatggcgaaatttaggagtcctcaagtctactctcaggttcaattattccttaggaggactcatataattcttaaaagcagttacactcatgattacagtttattacaacaaaaagataaagactgaagtgaacaaagaaaaaagttgcatacaaccgggttcaggaaagaccaggtgccaccttccagttttcctctcctcatgaagtcatctggacagcatttaattatcccaacagtgatgtgtgacaacacacacatcgtattgccaacgaaaagttgcctaagtcttggtgtctagaattgtattggagtttgtagtaggcatggaacactcacatggctgactttagtcatctccagcctctccagagttcaaactgatacagtgtaacctaaaagctgcaccatacattattaaaataaactatctggtattgcccagaagccagtcaagagccagatatttctttggaatgtacagagtttgaacaacccagtcccgttaagttaatattttaccataaaaaggcaaagtttactttgcagatttgattaaattagggactttgagatggtaagattatcctggattatgtggatggaaccaattaaaaataagcacaaacacacaaagatccttcaaggtggctaggtgcggtggctcatgcctgtaatcccagcactttgggaggctgaggcgggtggatcacctgaggtcaggagttcaagaccagcttggccaacatggtgaaaccccttctctactacaaaatacaaaattagccaggcatggtggtgcatgcctgtaatcccagctacttgggaggctgaggcaggagaattgcttgaacccaggaggcggaagttgtagtgagccaagatcacgccattgcactccagcctgggcaacaagagtgaaactccgtatcaaaaaaaaggaagaaaaaaatccttcaaggagtcaaaggagatgttggaatgaaaagcagtgtgtcagagtaatgtgatgtagactggaagatgctatactgcttgctttgaaaatggaggaaaggggccatgaatcaaggaatgtaggcagcctctagaagctaggaaatggattctcccctagagtctccagaatgaacagcgccccattgacaccttggttttagtccagaactctaagaaagataaaaaaaaaaaaaaaaacaaaaaaaaaacaggctgggcacagtggatcacgcatgtaatcccaacactttgcgaggccaaggtggacggatcacatgaggtcaggagtttgagacctgcctggccaaaatggtaaaagcccatctctactaaaaatacaaaaatttgcttggggtggtgatgcacgcctgtagtcccagcgacttgggaagctgaggcatcagaattgcttgggcctgggagatagaggttgcagtgagccgagatcgtgccaccacactccagcctgggcgacagagtgactgagactctgtctcaaaaaaataaaagataaaaaatatatgtacatttaaatcactaagttcatggtaatttattatatgagcaataggaaactagtagagtttaatataattattatgtctatgtttgtgtagatatatacataaatgggggttgtgtgtgtgtgtgtgtgcgtgtgtaatgtcaaagcaaactttccaaatgcttacttcttgtacatcttaacctcaaggcacacaaacacacactcagttgcataaatgcacattctcacattacacacacacacacacacatatatatgacatactacattctgttctagcttcctttaatgacagctcacaaatatgtgagtagaatacactgggtttgacttgggattatgaaattcatggtaaacatcatcaaggcagatggatatctaggtgtttgattatattgatgaacaggttttggtatacaaagtgacacttgttattaaaattttgatttcatacctatttcaaactaaattgcacctacagtccctttgcaagctccactttttagaaattcagctttgtattcactgcatttatgacattcctttgcattttttttttttttacatccacttcgcttaacaagaagacactgaagttctaagtagcactgtataggactgaattattaatacagttcttcagttggtaacaagaatgctcttggaaatatcttgtacatttgtcttctcctggttacttagtagattgagcatgtaaaaaaatcttttgcttaaaattgcagtacatcttaactgacaatacttcttaaccatagtgcctgacaaaacctggatattataatctcgacgtacaatttggtccagcagttgatctctgctcagatcattcaaaagggcaattagagaaagtcaacaatacacatgtctgtaatttagttttctgtacaaacaccataaccaaatgggatgaaaggatttaaccatttgcaactaaaaacagtatagtgctttataaaaagggcctaatcaagcagtatattgattgaaactttgtacagatggttctcattattcacacattctgtgtttgggagttctcaaaacttgctaaatttaatttgtatccctaaaatcaatgctcatagcattttcacagccatttgtgtgtatgcatagagtggtgaaaaatttaagtcacccaccacacatgttcccagctgagatcaaaaaaggaacactctgcattcttgcttcaggtctcatacggtaaacaagtgtcctttcagcggtgtatttaatgctatgtttttcatatttttatgctttttcttggtgattttgctgctttaaatggccccaagcatgatggtgaatttctgtctagtgttcctaagcttaagaaggctgtgaagtaccttagaaagaaaataggttccttaggtaagtttccttcaggcttgagttacagtgctgttggctgtgtattgaatgttaatggatcaataatatatattcaataagatgtttttaaacagaaaaacaggcaaaatgggattatacattgctggttcacaaaaatgttatgagcagaggctcccagaaatctatcattgtatttctcctgggaggaatgcttcagtattcactaattcagtgttcacagtgactttatagaaacacagtgaataacaagacttgactgcacattgtcatccttcatccaacccacttgcatagtgtagggtctacactttccaacagtactaaaaacccagaacgacattcaagttatgcaggtgtattatttagctgtatttgggttctaagacatgagtaaagttatatatttgtacagctcccaactatatacagttgtccctcagcatgcacgtggtattggttccagtactctcatgtataccaaaatctgaacatactcacatttcacagccaactctgcagaacccgcacacaggcaaaattggccctctatatacgtaggtttcacattctgcgaatactgtatttttgatctgagtctggttgaaaaaaatggcatgtaagtggacccatgcagttcaaacccgtgttttctcaggactcaactatgttatttatccttttacttttttattccttttttattcctgtgtataaaaaattgtaccaccagtacaaggaatgtcatgaaattgaaatgacaccattctgtgtttcttaaataaatgtcatacaggttctatgaagaataaattctcttgctaaaaaaaaaaacttgctatttttcatcatttgattttctcatattaacatttttcatcttaaatagtctttctctttactatttcccttcacatttcttgaaaattctttttcttgcccatctgttttgtatctccttattattttctttctgtttttattatgctagccatggtaatgataaaatctccgacttccaactccctgcaccatttggcacttggcaaatggcttttttatgtatttatatttttgttatttatatgtctatatcctaaacagaaccctacgcataagagcaggtggccagtaactaatggcattgataaaatagagccctttacctctattttcttgaaatatgctttcaagaaattccttgtactagatcatcgtgtatcataacattatgaacacagcagcaaaaaacaagaaaaaaattcagactttagtattcgtaagtaatgtcaatacaatatttggtttaacagacatacgatcattttgtttgctatttcaccatattattttttatgtaaataaggtagattatttccaaagtctttctgaatttactaaaatctcattttacatgaccctactttagtaccttaactaccaccctcctaggaatatatctgtggtaagaacagacaggtgtatatatattatagataagtgtctgtctgtgtgtatgcatacatatgtgtgtatctatatattaaagtatgtatatgcaatatgaaggtatgtatatatgcatatatatgcatgaattatattaagcatatgtatatatatattatagttaagtgtgtgtatgtgtgtatgcatacatatgtgtatctatatattaaagtaggtatatacagtatgaagtatgtatgtatatatgcatatatatgcatgaattatattaagtatatgtatatgtgttagatatttatgtatatatgtatatttataaaattatgaagttctacattgaactgggatataaagtccatgatatctttacataacttagaacagcaaaactctcgattcattcttgttttcaaaatccctttagcttcattttctctggtgcatgaaacaacataaaaatccctcttcttgccattaatctcttcaaatcccatgccagatattgtcaacattacagctataaaaattttagaatgttttagggacatcttgagatctttaaattaaaatatccactaaattaacatcataagcctagactcgtaatctttatttttgatctgactttctgtggcttgcaaatttagaatcaggaaatgaaacaatactcaatttttgcagaattagggcttacttatgatgcaaggctaatatggataatttcttaattgactgtatctgctaagacaaaatcaggaaatgacttaattaaaatgaataatttaggtgatattctctatattgtaatccaaattttaaagaagcgaacttctcttagaagaaaaatatacatttaataattggttcaatgttattatagaccttttgtgttctttcagaacataataatggttgctaattttctgggcagaatctcttgataagagagttaaattgactcagattatctgcaacccactggactattgtggtaatggcagatattttttaaatttaattcattgatataaaatatttagtcttttataataagcaattaaacctttgtacttaagccacttcaacaaaaatattacaaaaccattaggcagctacaataggctccatgcatttttaagtacggtttatacagaataaattatttctgtattggaatatcttcttaataatattgatgtttcaagaaaacatccaagctattttataagttatttgaatggagactgaattatatagtagttttttgttgttgttattttaattcatacaccttttcagtagaaaaaggtgccttggttttaactttgttaccccacaagcacagatattaatttttattgcattcttcactaaagtacatcttgcatttgattttcagacatggataagaccatgatagctaatgaatgactaaaataaatcaatactccaaatacttctatgcttcatttttgatggaagtatgagtaagggatacaagctgaaggcctcctatatatagtacttctacattactttttttgttataattttgtaataataatataatcacaccacatacttgtaataaaaatataatattcatctaggctaattggtcaggtcctgaagtaaatatatctcttcacaaaaggccaatgagtgacccacctactggtagattttatgcaaatggttgcatcttgtacacctttattattttttaagtatatttgtttcctacttgtaacctattctaaaataaaaagtttactatctctttgcagtaaaaataaatatcacatatctatatatataaagatagatatggtatacacctcagtatagatataaagctctttatttatttatttgttcatttatttatttatatttatgtttaaatacagacagatttccagattttaaaatgcatttcttctcactgaatattaagggacttaaaccatatactcaatttgtcaaagctgactggggaatataaagaaagggctagatatgtaatatgtgttgctaatattaactagaatcattattttgaagtacagatcttagttcaataacatagcgcgctagagcagaccaaagttattaacttcaattgataaagaattatgaatataattataatcctgttaattatttaacaccgtgaattatgcaaatgcagcaggtattattaatcatctgcaggaaccagaacaatttccctaaaagaacatataaatattaaaaagtctgacttggctctgttatgtactgttagagctttagtgttcccatatgaacactgtttggattcaattatcctttataacatgaaaaatgccccgaatgcatcctctccaaaggccaaatgaatgtcattagagttctccttttgtctataaaatgtttactgactgtgtggtctcgcatgtttgtttatatcaaaatatctttcatcctattaggctaatactggtctgtggcggctggcatcctacttgctaatagcacgttgtgtggatatccttgctgtgagactaagctacatgtgatagtcttgcagtatctaaaaaaattcccaaaattaacatatgttgaaccttccctcaatactaaggaacaacagagcattcaatggagtaattttaactaatttcctaagtatgctcaccctttacagaaaggaaaaaaagaaaaagaaaaggaattccaaattggacctttggaaaacactcaattggggagaggaattggtaaggggcttgaagatctagtttggttaacagattgttgtaaattttcctgaaggaaatattagccctttcctttaaagagttatttgtggaaacctttaaaaaggattttcaaaataaagactgtttgcctcaatatattggagtttaattcctatccatttttactttatttaaagttagacgattaattgattctcagaaaaattatttgttttaaaaggaagaattatttatttcgaaatctcaaaatatttccaaataccactgtgattcttggaatgcaatctttcttgggaaaatgccaaagttgggcaaagactggggtaggagttaggagagcaggcaaggacatgtaggaaggaaggcaaactagggaactattgtgtttttgaatcttttaaactcttagcctttagaacaatgtctggcatagagacttccaaaaagaatggttcaattcaatgtcataagtagcttgtcatttatggcacattcacaataaatgacagtataaatcaactgcgcattggtagacataccagagtcatgactatttcaacattcattttatccatgtgtttccaagtatgataatagctgaacattacgtggtactcaatgaaatttagatttatgtttatgcctcacatcttagcaattatatttgaaaaactggtgtctgtacagaatgttacagtttaaaaaggattttggatgagtaacttttgaaggaggtaggatttggggactctaaaatatttttcttcttatttttattgaatttctgcctgtgactgctttctaccctaacaatagaggcgctgcttactgtgctgcctgctgtatctcactggaaccattagtacttacaatgggcctttctgatctttatttctatatatttatattttttctgagatggagtctcgctctgtcacccaggccggagtgcagtggcgcatggctcactgtaacttctgcctcccgggttcaagtgattctcctgcctcagcctcccaagtagctgggactacaggcgtatgccacgacacccagctaattttttgtatttttagtagagacggggtttcactgtgttagccaggatggtctcgaactcctgacctcaggtgatccgcccgccttggcctcccaaagttctgggattacaggcgtgagccaccgtgcccagcctctgatcttttactctttctaaggatgactcgtgagtgaaatgtcaaactcttttatttatttatttatttttacaaaattaaaaaagatataatctgggaaaaatataacatctgaatttttattatatgtaagtctattaggtggaaggtagaaatagggccagccagtagaaattgaattctttgcatgaaggagagcaaatttaggtgtaatataagaaagaactttctaatagctaaatctgtctcgagttgcaatgatcatgcattcttctctcctcttttatttttggccactgctggatttcagggatcatcatctggactctctctgctccaatacatacttggaatctatttaatcaatgttgttattaaaaggatataattttacatactttaaaagaattttgtccaatactcctcaaaacaatccaatgagctaaatattaatatcctcattttgcagataagtaaactgaggcatagagcatgtattagtcagggtggggataaacaacttgtccaaagtcaccaactatttgagagcacattgaaacttaggcagggtagcgccatagtatcttgttgtaatatctactctatgctgcatctgtcctcagtattacagagacagagtctgggtccccatggctttgtactaattgagactttggattgtttgccccaattttcttctccagactcactttccaacatgacatttatattgctgtgatgtagccacatagaatctctcacctctcacccaaacatgccaggagttttcaagcctctgtgccatttgcctttcccctccatgtcccccacacccatcacagccctacttctaccattctatcagtggaaatctcctacttatttcctcaattaaatgttgttccctctatacatttagcaaataccaggcccatttaggtactccttcctcattttagccaaagcttcagattttcagctctactatgaccatacgttatattaaatcatgtatatttctgttccttgttataaactggaaactgcaagatcaggaaccacatcttcttcatttgtgtacctttagacttcaataagtaaatgcattaaaaatttgtctaaatgaatgatgcacatgtaacataaagcaagagtttcttttcatagtaagtattcaagcaggagctaaattgaccagccagcatcactgtggtaaagaagacaactgcatagggagaaaggttaagctggatacttgtctctatggcctttttgtagctctctcattgcaatttcatgtcatgccttacagctaaaaagtgccagtcagaaatacctatccattgtgtgtggctcaggctagttgattatgatccccaaggcctagttcttagaaaatgtgtttgtattatagtccaaaaggagctactctctgtctcctttcctcactaaattctcttttatatttttcaagtttacagaagctatatttgggcacagacttcagtaatttttcctctgtgcataaacactcaaccaggaaatatttatccctcagagacactgacaaaagatgtgttcttaagttattgctaagaactaatccttttcaccatgggaggaaaacgtaatgctctataatgtgacttatgagactgaaggttttttataacatagaatgaaatgataagagaatactcttgaatatatgtttgtagttaattacagaagtgtgcaaacaaacttctgacattagtttgttttgtctcctaaattaggtatagatttcttttttttttttttgaagttatatttggcattttttttaaattttattattattatactctaagttttagggtacatgtgcacaatgtgcaggttagttacgtatgtatacatgtgccatgctggtgtgctgcacccattaactcgtcatttagcattaggtatatctcctaatgctatccctcccccctccccccaccccacaacagtccccggagtgtgatgttccccttcctgcgtccatgtgttctcattgttcagttcccacctatgagtgagaacatgcggtgtttggttttttgtccttgcaatggtttgctgagaatgatgatttccaatttcatccatgtccctacaaaggacatgaactcatcattttttatggctgcatagtattccatggtgtatatgtgccacattttcttaatccagtctatcattgttggacatttgggttggttccaagtctttgctattgtgaatagtgccgcaatgaacatacgtgtgcatgtgtctttatagcagcatgatttatagtcctttgggtatatacccagtaatgggatggctgtgtcaaatggtatttctagttctagatccctgaggaatcgccacactgacttccacaatggttgaactagtttacagtcccgccaacagtgtaaaagtgttcctatttctccacatcctctccagcacctgttgtttcctgactttttaatgatcgccattctaactggtgtgagatggtatctcattgtggttttgatttgcatttctctgatggccagtgatgatgagcattttttcatgtgtcttttggctgcataaatgtcttcttttgagaagtgtctgttcatgtccttcgcccactttttgatggggttgtttgtttttttcttgtaaatttgtttgagttcattgtagattctggatattagccctttgtcagatgagtaggttgcgaaaattttctcccattttgtaggttgcctgttcactctgatggtagtttcttttgctgtgcagaagctctttagtttgatgagatcccatttgtcaattttggcttttgttgccattgcttttggtgttttagacatgaagtccttgcctatgcctatgtcctgaatggtaatgcctaggttttcttctagggtttttatggttttaggtctaacgtttaagtctttaatccatcttgaattaatttttgtataaggtgtgaggaagggatccagtttcagctttctccatatggctagccagttttcccagcaccatttattaaatagggaatcctttccccattgcttgtttttctcaggtttgtcaaagatcagatagttgtagatatgcagcattatttctgagggctctgttctgttccattgatctgtatctctgttttggtaccagtaccatgctgttttggttactgtagccttgtagtatagtttagatttctaattgttggagagagaatctgtttacatattggtgaccgttacaagcaaatctaaaatataacatcattttacatcatatattaaattatattaaaattcattaataaatttgaaaggaattaattcatatttataataaataacttcagaagattcactgatttaatggaaaaatttgttgataaaattatattaagagaggaaacaaaagacattaaataaatttgaaatgataaatattcagacatttaaaaaattaagtgtattagttcattctcacactgctataaagaaatacccaataatgcataattcataaaggaaagaggtttaattgactcacagttcagcctggctggggaggcctcaggaaacttacaatcatggcagaaggggaagcaaacacatcctcatcacatggcggcagcaaggagaagaatgagagccaagcaaagggggaagtcccttataaaaccatcagatctcatgagaacttacttgctatcacaagaatagcatggggaaaccacccccatgattcagttatctcccactgggtctctcccaccacacagggggattatgggaactacaagatgaaatttgggtggggacacagacaaaccatatcagtaagtatctacataatccatttgtaattcttcccatcccatattcctattacccaggatttgtgtaatctaggagacataaaacttctgaatttgtattatatgtaagtctcttcggtggaaagaagaatgttggctttattttatcattttaatcttagaagattttaaaaccataattcttaactgaaactaagcttattttggcttgttatatataccacataacttaaaattttaaaatgtaaaataccaaaggagttgaaaattatgtccacacaaaaccctgcacatggatgtttatgacagctttattcatcattgccaaaatttggaagcaaccaagatgtccttcagtaggtgaatggataaataagatgtagaacattcagacaataagatgttattcattgctaaaaagaaatgagctactgagccatgaaaaacacatagaggaaaccagtgaacaagcaaatctgaaaaaatctacatactatatgatttcaacaatacgacattctgggaaagcaaaaactatgtagacagttaaaagatcagtgttttccaggggctgtgagggaaatgtatgaatacgtagagtccagaggaattttaggacagggaaattctctgtaatgatgctataattgtgaatacatttcattatatatttgtccaaatccatagaatgcacaacacccaagaatgaacctttactcttaactatggaattttggtgataatgatttgtcaatataggttcatcaattgtaacaaatgtacccgtctggtgggagatgtagatagcgtgggtggctgtacgtgtgtggaggcaggggatatatgagaaatctctgtaccttcctctcaattttgctgtgacgctaatactactctagaaaaattaagttctttaaaaaatgtgcaacactactaataccactatagaaaaatggaaagagtaaagagaacaaatagcttaccgcaaaagaaatataaatgcccaagaaatatgaagatatgctcacggaattagtagaataactaaatcagtagtttttaattttaaatttatttttatgtaaattttacctatcaacctagaaatggtgaatacagtagaagagtcagtgaagtgggcatgccctttcttgttggtgaggttataaatcagtctaatggtttttgaaagcattttggcaatatgcataaagagtgtatttgaccctatgacccagcaatttgtcttctgagactcttccctaaagacatgattaaatagtatggacaaggttattctttgctatgttacttttaagaaaagtggaaatgaccagcaacctaagtagctgaaaaataagggtcagataaacaaatcttggcatatctgttgcaacggaacattaagcacttattaaaattatgttttcaagaatatttagtaagatgaataaaaattgatcacattataaaaatatatagccaatatgtttaatactatgaaatatgtgtgtagaaaaatgaatattaaaataaaatttttcaaaatattaaaacttaatatcttacatgatgaaatgtgtcatgtatgtattttatcttacaaactgctatgatctgaatgtgtcctacataattcatatgttgaaacttaattgccaatatgatagtactaaaaggtggaggacattaggaggtgattaaatcatgagggcagagccctaatgaatgggattaatgaccttataaaaaggctggtgagaaccgagaactaactaggctcttatatttttccatcacttccactatgggaggacacagcatcccttctctctggaggatgcaacgttcaaggcatcatcttcgaagcagagactgggtcctcaccagacacctcaccagcctacagaactgcgaacaattaatttctgttgtttataaattacctgtctcagatattttgttataatggcgccagtggactaagacacaaatattttcttacaacaaagggaaaaaacttactgcataattttgtaaaatcgaattggaatgagatacactgtgttcacaattttaaaaagtttcacaagggcataagatcattatgcttggcatgtcttccttaaaaaaaaatataccatgaagtataatttctaagcattatgtagagagccacctatttctgtctgtttggagtgggcagggtatccacacactattttgaagaggtgcttgcaaaattgagatggaaaaatgtgtacgtacagttcctaaggccttacctggagagtgaattgccctggtttttacaggtaataccacttggaaggaaactcatgcttctccctaaatcagacaatgcctggccttgagtggtgtcagggtcctggtgataatggttattttaacctcctgcttttctacttctagcatattctgcctttggcttcatgcaaaatactgaaggacagcgagtgcatggatactgctttatcgaaccttgttaattggtctctttgctataagaaatacattgtccctgaagccacaatactaacgcgactggttctacatcttaaaaaatctttgatattttacactgtgtctgttacatggctattatgtttaaactcccttgattagattatagaagtttacattggggaagagtatgtaaaagagacagcaattactgccaaaatcttccccaaatcagtgtcttagtccttttagactggtgtaacaaaaataccataaacagggtggcttataaagaacagaaatttatttctcccagttatggaggcggggaagttcaaggtcaaggtgcaggcacgctcactgagcttccaaggcctcttgggcctctcttataagggcattaatcccattcatgaaggtagagccctcatgacccaataaattcccaaaggcactaccttataatatagtcatcttggtgattagaattcaacatatgaagtttgagaagacacaaacaatcacagtatggcatccaaacattacaaagagttatagtttgtctccacagttagcttagtattaaattttcctcatcagcaagataggaaaaggttagttgaggatgaaccagaagttttcacctgatcatattgacatgggtgcctgataatctcatgcctttatgggaattatatgttcttcattaaaaacaaagaattctggcctttgccaatgatggctttaaactagtacaagcattctgggtgtggctgtggtatttgatcaaagctaatatttgctaatttgcatgttcaatgcaacaatcataaaatactggatagtttcaggtctagtttatgcaccacaaaaaagcaatgataaaactcattcatcttcactttaaagtcgttgtgaagtggctgtttccactgggaatatataggtagcatgtaaaacagttgtcttttctggtaaaggggtttcttgctaaggcgtgaccacaaccaagtgattctttctcttttgattagtattcattgtctcttctgagctgtctctagtggatacagtttagaaatttaacataaagaaagaaagagctctcacactgtaggatttgcagcatgctatttaagtgcaactgctaccacagttaaaggatcatcggaaacatcaaggtgaatgggaaagtggagagagtcaaaattcaagaagagacttttatattattaaaatttattcaaactgtaattgtaaaaatggcatggaggaaaagttaaagtcgaaaatatcagcagtatgtaaaaaaggacaatgtaaaacatctaccaattgtcagaatggctagaaaaacatattccattattcagccaaatattcttgcctttacctctccctgttctttacctgtccacccctagactgtatctttcttgcatatttcattttaagattcttgcacataatttagagaactgaagcaactacctagcccatctttcctcactaggccttccttagaatctgcacggagtcaagtttatggcccctttgaaaagctgcagctccttaccaaagttttttcaaatagaagctaagaagggaaggagtaaaagacagcatttgtataaacattagctcatgtaatcactataaccacctatttaaggtagatgatattaatttcattttcctgaggaaacttactgccattcagatcaaaagtcttctgcaaagtcctacaagtaccaaaagaaaaagtcagggtttttacctatatctctctaactctgattatgtcatttttcttttctctcattttggttttcaactatagagtaacataataaccacttactctcaggaaaaaaaaattagaataaaaatttgcagaccttgcttataaagatttaattacatttaaaataaatagagaaaatatttggaaagtttatttttaataatgatgagtttcatttaagttatgtattctctgtacctattatgaaatatattctgtgaagttgtggttatctgatacaggtggaggtggtagacattaagactcttgatagctgttccgcttctgtcccctttctggtacgtggaatcacttccgcactcacttgaagttgagtctggctgtgtgacatgccggatcaatgaaatgtgcgaagaagtgaactgtgtcacttttggacagatgttctaagagccattgaatgttttactgtgttctgttttctctcagacctatcaaccaacaacactcaaaagttggctgctttatcttcctgagaccaacaacactcaaaatgttggctgttttatcttcctgagtgattacagtatgtagccatcccctgcttattaggataggcacagagtatcagcaagaaataagatactaagagaatagaatttgttattactaaagattttcctaaagtgtccgatacgctcaacattgacgattgttttgcagccaaaacagcaaacatatttaagaaatgtgtttaagaatcacatattgaatctgtgattcacatttgttgtgatggtaaaatatttgtgtagttttctccttttttcagcttctattttaaataacataaattgtttgaaattttgttaatggttcttgaaattaaagacgttcagcaatgatatggtcttaatagaaggaaattgttttccatcactgaagattaattaaattttgagtaagaattgagatatgtgcggctaacacagggaattatctctgtgtttctggatgaaatgggattattaaaacatgaaggaactattttcctcttacggtaagagaacagtaacttaatagtgaaaatcagttgatcatcacatgcttgtggctaaatatcagtttgtcctttttgtagctgctgtaatgatatgttattgaaatcatttagggatacttttttgttgttaatttttatggaggtattattgagaaataaaaacattctatatatttaagatatacaacacggtattttgatataattaacatatccatcaccgggcatagtagtctcttttttttgtgatgagaacacttatgatctactccctcagcaagtttcaagtataaaggacattaatattaactacagttaccatgctgtacgttagatctctataactgaaggttcctactctctgaccaacaactccccatttataccactcctggcaaccgctattctactccctacttctataagttcaacattttatattccacacataatatcatgcaacatttgtctttcatttttttctgcccttatttcacatagcatatgtcctccaagttcaccttgttgcaaatcgcaagatttccttctttttatggctgaataatatttcattgtatacataccataatttctttattcatccatacatccacaaacacaggttgtggctatatcttggctattgtgaataatgcagcaataaatgtcagagtacagatatatttttgagatactaatttcatgttcttcaggtaaataatcaacagtgaaattgctagatctcatggtaattctatttttaatagtttgagaaacctccctactattttttttgtaatggctgtaccaatttacattcccacaaacagtgcatgagggtttccttttctccaaatcctcaccaacacgtatttttaaagatacaatgagacaaactttttatttaaaattatagaacaagaatgaatattaccaattcatcaaaaaaaaagtctgtctactatcaaagtctatttttaaactttatgttcttttacttaaatatttttggaaaaaaagataattatgtacactaatgtgtgtgtgtacattcacaatttggcatatactattaatttggtttaaatttaatttggacataataattcttaaaacttgtcagactgcttgataagtaggtattagtgtatcccacctcatctacagagatgaaaactacagcgtaagttatctaaaacagtaagtgtattggatctcaggaagtatcacttcagaggtgttattcttaacaataacactattcagcaaatgctgcaagaataaaatcattaaaataattttctaaacatcaaataagccaaagtgaatgtaagcttttgtgaataagtttagattcagttaaatttctcaaggatcagctaaattttttaatcaaaaatttcaaccaggtactaaaactattttttgtgtcttcctttgacatatgggctatgtatatgttatataaaaccaaataatgggatatttctgattattatacatttgaaacatatcattgtgtctagcttcataacgtagctatcatattttggtaagttaaattgtatgtcaaatgggtgctcagtctggaagactcaaaaactagaatttttcttttttctaaaatttagtaataattgacaaataaaagcatctggtaccattatacttcctacagtctatattctcctatcatgataaaactggaattcatattatattgaaaaacctcttatttttttcttttttcttctttaactacatcctacagtgtaccctagaagacataaattcaaaaatgtgaatagttctgagaggttttcttgggattttaccttttatgaaactgctataatttatagaatctgcttgtgctctgtcacctaaatttaaaaagctgccttttattatttattttttagtttgctccattcagacagtgatgtttcatgtgggagacatcaccacaatggattactttaacttggaataaccttgctttaataattatatggaatacctttcacaagagaaagcattactaggagaaaagccaataaagctatgaaagacatggataaaagtcaacagctgattggatatagaatctaaataatgtgatatgatttaacttacctggatctcataggtaaaatgaagaaatgatagttacatatcagaattcatatagaatatatgtgagataatgcaaataaatattttagtatcatatttgtcacaaaatagtttgtcatcacatattagctcatcccccatggatgtctcttgtcatacggttgatagaattctgtgtccatttgtgtaattttagctccctaaggatagccactatttgtcactcactgttttatctagatagcacagaaactgatagggagtagtcaataactcagtaaatgtttggccagtgaatggatttacaacatccctgtggaaataatggtagatgtgggtctgtttattgcacaccgcaattgtcaggatgtttattgcataaccagttgtcactggttagtctctgtgtttgtttctgaatttgtttagaacaaggctttatttttactaaaaatataacttgagttgctgacgaattttcagtttttactcatttaccttgctgatatagctagctgaatttacatatctatgtcactatttgtatttatctttatctccatatatttatattatatatacttatgtctgtatctctctatatatgtctctttggggatgtgtactgtgtaggtatattttaaccaccagctcagtgagaaagaactcaagctatgattcttagtgtttgcttatttctgtggtgtaaatacttcaaccacatccagtttcaagctatcaacatgatgttgctgagtgtggagctgggatgagataggtagtggccaattattatatagcattttcaccatacagataaaaggatacaaataacctcacaagtgtagacgacagtgaaatgtagtaaaataattaagaagtgatgagttttgaacatttattacagttgctttaatataatttatttaatcataagtttatttaattttaacaagggctatgtttaatagtatgccctcaaaattccttaagatttagcattcagctttcacaatccatagtaaatctttaatttcaaagtctctgttgcttttcattgtaaaactaaacgtaatccatgctttaactcttttctggttgttttcatatgtcctttaaattctcgatgttttgtatgtttctacagtgaatatttgtgagttgaaactttttaaataattcaagaatatacttttgtgtgtgactttgaaattgtatatactgcttgtatgatttctataatctattgccaagggtaataagagctagtcttaaaatcaaaaaggcactatattactctttgattcccttttttttttctcttaatgaagctgaaataactgggcactgaagataaaatatatgttaactagaagagtatttgctataaaataaaaaatttgacacattttggcaaaagttttttttttcggtagtaaacattttactacctagtatcaaatatattaaacttaataaatataagaaaacagagcctacaaatgcaaagtctaaatcctaatttttacctgcaattgttacttatatgagttcatttttctaaattaaaactaaatcaatctactctacctcctattcatggcctctgccactgcagtcctgaaggttggggtgaagatactcacattttacaagtttgtgaaatattaactaaaaaactatggcgaaatataaacatgaacattttggagagaaacacttctgaaatggtagtgtgtagtgtcaggggctccatggatgctgtcccgagtaaaacaactgtaactggtgaaaattgtaataaaataaccatggaaagtctctggaaatggtcttaagagcatatagcaaatggagaaatatttattcaaaacaaaaaaacctgcaaaatctcagtcagaacagtgaaagttaatgacatttgagcaacaatccccaccccaaccccactctctctagctctgtgtgacagaaactttactctggatagacatggccaaaaacagggtgcttcttctacgtgattctcttcttctttttacttatcagcagaagctgctgtggcttatcaccacgtctggtcatagctgaagagatgtggctgcttctgtatctcctgagctaccacacctagcgcagatccttcctctcataaatgagggagaggctaagaccatgaaaatgagaaagaatcatcttttaaacaaacggtgctgagaaaacttgagattcacatgcagaagaatgaagttgaccctttacctcttggtgaggaagaatataaaacgtttgggcagttatctaccttttggacacatacttaatattagctacactatgaattattggtttggggtgagttagtgagaaacgggttccttttatatgtttagcctagaggcaggtatcgagagagggcttaaatgaacatcctacaataaagtttaaatttttcatcctccattgcagctaggtatgatcatgtgacctggttctgataggacataataagaattaatgtgtgaaacttctaggaagagaagtccatcttcccctatcttccttgttatttctcactgttacttggatggcaatgtgatgattggagcttgaatagccatctggactacaaaatggaagttgtatgttgaagaagacaaactaataatataaattgtccaatgtccctgatgatcatggagccactgtactgcctctcaactgtctcttcttatttcagaaagatgcaaacttccattgttcctgatattggttattttggattttctgtcacttgtagctcagttctaatctcaatgaatgcaagagtcactgacaacctgctatagccaaggtactatattaggcactgacaggtctagggtgaaaaagagacatcgcctggttttcacagagcatacttactagtgagaaaagataaaaatcaaatatttaaagaatatgattttgagggataatcacataacctatagtgagtgaatctggatttaagggcttctcaattcaaagaaaagggaaggccactatgaagcagtgatagctgagctgatacatgagataatagacagacctatacatgtgatgatctggataacagaattctatatagggaaacaggaagcacaaagggaggaatggactaaaaaaagagaagcagaaaaattgacttgtgtggttggagtagagagggcaatggtaagagcaacaatgggagatgaggttagaaaatagagtaggagtcaaatgaaacagggtttaataggtgagggataaaagcaaaaccaaaaatatatacttcagaatcttgtcctggcatctgtttttcctccaatcatctcctcctttgtatattttctttcttttttttcttcatctatatatcttctcatttcattcattcaatcacctatacaatgtggtccactgtctccagaatccaaaatccaggattgtatcctactatttttttgtagattttctacattcaattgtacataaaaaactggcctaggaaatccgcaccccatcgtaatttgtattacaaatttaaaaccagtagctctcaaatcaaatttggataagaatcaatgtactactttgaagatcttccgaatatgtatatctgtttataaataacatatattttaaagtgttaacttatgatctttcattgatacatttctgttttataaaacatgatattcatgatagatctattttattcatttcaacatagatattatcttcgctactcttttaaaatagttttgaggttccaacacccagaaagtgttgaggaaaatttgtatcttctaatggtactaaatataatgtaactgactttgagctgtataaaaaaatgattccaaaatgagtcctaactcttggttttaaaggtgatgtaggtgtgaagggagatgtgacaaaaccccaaagattgttacggaagttttggggaagggaatgaaaacaaacccaccgtggtaattactcctaagattgatgaaaatagaaagtcttgtgcagtattagtagtggaatacatacattcttataaatttgcttgagataatgtggacaatgtgtattaaatgttaaaattggcatatataatttgcatgaatatacaaatgggttacatcttattccctaatacaagtgtggtcaaataaattatataagatttataaaatagcaaattatgcagccatcaaattattgaattgtttcagtatataaaagtagaaacatggccagaaactattgaaaaatattacaagtgagttacaaaacaatatatgtagtaggatttttagggtaacatatatcgaagcagaatgtgggaaagatgaagacggagacacagaaaaaactgtcgtttggaaatagtcttcaaataaattgggtgtctatctcttggcaataaaattataagtatttctctttttatttatatgtagctttttccagtgaaataataattattataataaaaagactttttaattcaagacaaaataacgagaacatcagtgtgattagaaggcattacatggggataaatggcagccatgtcatctgcaaacagagacaatttgacttcctatttgaataccctttatttctttctcttgcctgattgccctggccagaacttccaatactatgttgaataggagtggtgagcgagggcatccttgtcttgtgcgggttttcaaagtgaatgcttccagcttttgcccattcactatgatattgtctgtgggtttgtcataaatagctcttattgttttaagatatactccaacaatacctagtttattaagagtttttagcatgaaggggtgttgaattttatcgaaggccttttctgcatctattgagataatcgtagtttttgtcattggtgctgtttatgtgctggattatgtttattgatttgcatgtgttgaaccagccttgcttcccagggatgaagtcgacttaatcgtggtgggtaagctttttgatgtgctgctggattcagtttgccagtattttattgaggatttttgcattgatgttcatcagggatattggcctgaaattttctttttttgttgtgtctcataattggtgggaaatacatatatgttgagaatatatccgttgtttgaaaaacatgacttttatattcaaaagttgtaatctttttatgaagatgcattttcttttttaaggatgaaggaggggtagatgtatttttaagctaggaggaaagaaattcgactttctggcagcttattttgtgaccatgtataaatcaagcaaacaaaagctttcacttatagtaaagttcacttgaagataaaaattgaccaggaattaaagacattgtatgcacttgtctagtttatattacttgagggtggtggtaagatgttttctggcttgtatagcatgcatgtattaaagacctgagacataaagaagcaagtatatttgaggaactaaagtcaagcacagctagaatgaggaaagatgaatgaatcaacatgggttgggggagatatgtaaacagggattacctcatgcagcatcctatagttcgtgtttagcattctggattttataaccaaaaaaataaggagccgcttatgagatttagtcaaacggaataacatcatcatctttatctttttaaagctcattgtgagttcatgtggcagagagactttattgggaatagaggtacttatatagggattggaggatcaacaggctgaggaaagatgaaagaccagtaggaggtcgtagtacttataaagtcataagtgtaatatgattttgattagaatagtaacaatagacactgtttaaaaacactttttagtggtagaatctacgtgtcttgaagcttgattaaatgaaggtgaggaagacagaaatcttaaatgatacaaagttctgacaagagaagtttaataaatagtagttccatttaccaaggtgagaaatatataaggaggagcacatttggggtggaattcgttttgttttcttttgttttttattcatgtcatgttatgtttgaagtggacttgttcagtaagcagcagaaaatatgtgcctggaatatatgcgctcatttaaaagttatttccttttaaataattgctcattctgcagaaaatggctgactttgaatatcagctgttttctttttctttttcaggaaatcattcttgaaatggtaaacatccaagttttatcaaataccaggatataattgcctggtgtgaattattattttgttagtaactataatagataatccacagaaaatcttttggaaataaaagacttgaaattaaaagctatctggaatgttatatttaaggacacagaccttgaatgactgttcttcaagtaaagagtctttgttgacagatatcaaaatgtcttatattatgaattcacctcaacttagaattatgttaaaatgtgtggccttccttgaaacaccacctaaaagaattttcttattgtcaaacaaacacttaaaaaatagtttttgaaaaatgagtaaattggtattgataatcttatagaacatgtgtacagtttttaaaatatattgaatgtaaatagtgtctttctgtgtgaaactaaacaaatattggacacctccaaaaatattttgttctgaaattttccttggattgaaaaaatgactcaaatcccatattctacttacatctttattgtagcatgacttagggctcttctgtgaatgagcgtttacaccttattttaaaaaattatgttttaaaacaatttcctttgaaaataatggttttcaaaggaaaaaaagagcatctagggctcagaaaattttctttatacttgcaattcaaagttattttcctgcagcaatttcttaaatgaagatttttttaattaaaaaaactatattttgttgttgcaagatagaaataataactttgttgttcaaaattgacagagacgagcctaatgacttccttgtctgaccttgtctataaacttggaaacctcacagtctcgtcttcctgttgtcttcggatgtaattttgttggtagctcaggtcatatttgcttgtgtctatagtaactgagcccttttcgactttaggcactgtgcaagttagttggcatatgccacaagaataaaaaataaaaccaacagctattgtctcttggttacaatccttaatgttctaatgacctttctggaaaggtgatatttacgctgagatcctctgaactataaaaattggagggagagagaaggggaagacattcagtacagagaaataacatgtacaatggctcttaagcttcgaagaattagcgaacttagggaaatgatagaggccagcatctgtggagccatgaaatgaggcaggaaagtttgacgggacacctgtgaatctagagtgttttaacttcatcctaaggtcaataggaggccattgaacaatttgaggggatgtcacaatgggatgtacacttgggcattactctgatgctgtttgcagtgagaagaatatagagagggcaagatctcaggagatacagagttttatgttgggtacaggttggccgaagtaaattgtgtttatctatacaataaggttagatgaagtttgcaattgatttagttaaaaaatttcaaaaactggatgaccacataaataggaacagataacctattcggaaatatggcttccccggtccatcagatttcccagtggaatggcacccatgacactaaaggcccaatgtgagatctgcctagttatagaaagtaaaatctttatttttaccttaccctgttcaactgggatattacatcaccacttcgaaagaatttgaactaatcatctatgtgcttccattcaagagaatatttatataaatatctggttttttataatccttaaactaaacctagaataaaaaggccacatcatcatcagtggctcagccagctttccagaaggctggaaagccattcacctcgaggaggctctttcacttttgcggggtggctttgacaagggtagtggcacttatgaaggaaagaaagtagcctcacatgaagtattatttgcagggagcactgacaggctttgcagatgagttgaatggtaggaattgttttggagaaggtaagaatcataaaggattgcctgatgatggattgtggtgtgagtgagctaatattcctaactcagaagcatccattacttaaattaacaactaaggtgtgattgtgtcccagtttagagttcagcttctatttttgcactggcctagtgctctacattctactcctgtctttttaaccgttccttacttttcagatctatataattttatgctttactttttattgatgttgaagaaaaggcatttcttcttcttaagcagctagtatgggtatcataattcagctcaaaatcagttacaaggattttcattgttcaatagtgtaaaaatataataaatatccttgatgcctgtggtgaaatactatcaagcagctaaaaagagtgtattagataagtggttctcaaccaggcatgagtttggccatgaataagacatttgacaatgtctgcagttttttttatcgtaattactgcggaagtggtagcattgtactggcatctagtaggtagaagacagagattctggcaaacatcctacaatgcaaaggacggcctcccccgaacaaacaattatcagtccaaaacgttaaaagtgccacttttgaaaaaccctgtattaattagatccatatctcacaataattatgtaacccaaatatataatattgagtgaaaaaggaaagttgtagaacgattgcaaagcgtgatagtatattcattcttttaatgctagctagcatagcaaaccaaacccacaatttcagtgccttaacacaacagatatttattgtttgctcatgtcacagtccatggcattccatggcagcgtgttgctttcctgcatgtgacgatgcaaggatccagacgtcttccattttgttgctcccccgcatctcttcaacctcagagtcatctgcatacatccatagaatgggaaagaaacagcagagaagatatattagctttttaaaatctgaagctctgaattgacacaaattacttccactcatattctactgggagaaacaaatcaaataaccacacctgcatgcaagaagagctatataatacaattagaggctgaacagcctgtcagcgatactacctgggtatggagtggatcaacatggattcttatggatagctcattagctcaatgaaggatgccaagcactcaagtaaatttgtaaagaacatacacacatacatacacaacaacaacattatgtattgtttatggatataggaatgtatgtgaaaagcagaacaattgagctaaattaatgaacataaaattcatatatcatggcctcttataaagacgagagcaggagaacaggcctggagataaggaagtaaagtgttttcacatgtatttgaatcattttcttttataattagattatgcacaataaattaggacagattattcataattatgatttcctggagatatgtactcattgtataagtctctggacttctctaattttacctttctcaaaagaaaataaataagttgagtaagttggatgtatttgtatcagccaattaacttttatattgatatttaaatgagatataacatctacattattttttacatttatgtaaaattctagatatataaaacaagaatttttataaaagctattgttgttattaaggtatactttggtggaacattgtacagtgttctttatcgtatggtcctattcagattatgtaccaaatgcaatactaatatgctctcaagcttcttgaaaaaaatcctatctacatcacgataatatgttggtaatatttttgttccctgtttattttggtatctcaagtagtctcatcttttcttttagaatatacctgatttttaagtcatcttgtaaatatcaataatgtctttctttcttgcaagaaacagaaacccaaacaaaatacaattcaaaattcaaggtgtatttgtgcatactctggattatctactggtagaacccaagaaaaatttaacctacaggccatgggaatgatggggccataggccatctccatagtggtatgctactaagaatgactcattgcacaaattctcattttatgagtctcaggtaaagtattttaggaagtgcatctgtttgttccaagttgaatcaggcctcaatcttggtccagtcagccttgtcctagaggcaaatatcacacaatacaaacatgatatcaaggactctgcttatggattgtttgactggagggtgatagtcgccagagaagggagaaaaattatggactgagtagaacttcccaaatatctcttgtttagtgtgtttcttgttccacattattttgacagaaagaattctgagttatattatttgatcctccaagtttcaaaatccttacaaacaaaaatgtttttaatgccttcacatgtatgtttctttctatcatgttactttgaattatgaatgcatcaatatgtaatgttacagcattaaatgtatcaagtttgcttctccactacattataacacacacacacacacacacaaatgaattcgtattaaactttttgaaatctatgatttaaatagagagataagaagaataatgactggttcattatattacacaacctatgctttgtatatggttttcttttttaaaaatgtactttgtaagttgagaaaaaaggtaattgacaaaataccagtgtaaattttgaacacaataaaataaaattacatcagcccaattacaaagcaacatgtatgaatagcttaaccaactctcctgttttaggtccttacgtgaaccaaaatcctgttgttatttatcacttattggaaccaaaaagagccacagatgttgctttgaagagcaggatgctatgaagtactgttttaaagaccttattaaacacttcactgaaataggaagtcatttatgtagtcattaatacccctcactgcatttaaaccacagttctcaaaggaaaaagctgctcctctctcacagttttgttgttacttacttttaaaaatcaaagatcaatacctttaatgagaacatattgggaatatctatgtgctacgctctaaattaagcattagggcaaaaaaaaaaagatgatttttaaagtcttttcttttgaattttgaattgagatagaaaaccaacgttataggcccataaaagggcctgtaactggagacaagaagggggaaaggctgaaaaatatacctataccaaatttgaagagagcattgatagtcagtaaatatattgcagcaacattatgaaggtttgtgtaagccatgataaaaagcatagaataaaatatttaacataaaaagtagaagaggctcagcaaaaatttccttctattcacctgtcttaaaaagttaagtatttttatcttgtgtttaatgaagaagaatttggaaactaaaagttccaaaaattaataaatttttggctatgcactgttatgtccttttgttaaaaaacactaattgttgagaaaaacctgattgctctatcatctttttatattcaaaccaaatgtgcttgattaaatgttttagatgtcttattaatagacagtcttgatcttggctaaaacatctatagaaaggcttacgcagtgtgctaggtgcatgttgaactccctgtgttgttcaaactagagacataaatgattaatgaatactttatcatatgttatatgtgtattttatatatatatataaaattatagtcatgtactcatctgtaatttcaagttggtagacatttttgtttgcataattttgacagatttgttttgttttgtcttgttttttgagacagtctttctctgtcgcccaggctggagtgcagtggcgcgatcttggctcactgcaacctccgcctcccgggttcacgccattctcctgcctcagcctcctgagtagctgggactacaggcgcccgccaccatgcccagctaattttttgtatttttagtagagatgaggtttcaccatgttagccaggatggtctcaatctcctgaccttgtgatccacccgcctcggcctcccaaagtactgggattacaggtgtgagccaccgcacctggcctcgacagatgttttcataaaattaaataataaaatacaatctacatattaaagttttatatatttctgtaaattgagatatttttattgtcggcactatttttagttaggttgcttaaataaatactaaatatacaatgaaaacgaacatacctagtacagtcattctactcatcacttggtatagttgatgtttttttttttttttctttgagaccaaattttgctctttgtcacccaggctggagtacaatggtgcgatctcagctcactgcaacctccacctcctgggttcaagcaattctcctgcctcagcctcccgagtgcccaccaccacgctcggctaattttttgtatttttagtagagacggggtttcaccatgttggtcaggctggtctcaaactcctgacctcaggtgatccacccacgttggcctcccaaagtgctgggattacaggcgtgagccaccgcatttgaccaagttgatgttttatttgttattaatttcaaaggctgacatgtacttatgatttcagtagttaccagctactctacacgcagcatggtacaattaaatgtatatttagcttttggaacatttctttttaaaagttgtgcacattttaaaaaccaagttatctgaatcacgtgttaaaacatattaaaacaagactgagaattccatttcggacaagatggcataaactgatttttccctgctcctcatagtgaagaagaacaataaaacctagaaacaaaacaagaggccatcaaaagaaaattgtaaaggatagtcagagaaaagcaaactgctttgagagcctcgcgctagaggaaaataaactgcagcacattctcatatgtgcccctatccaacagaagatggggacccccacctgtcattttccaactttcaagcctagtagcagaaggcagcccagctagtttcctctctgaattgaataggagtctctcagacaataccagatgagcctggtataactggcaagggctattgaatgggagcccatctaacattaagcagctagggtaagtgcctctcctttcccagggatttaggactaccatgctctgctgaaaaatagacaagtggcagtattgtttagaggaattttgtcacagcaagtggcccaacctcggaagcctctttgtccctacaggcctaagacactctcactcactctcactcacaacaggaaatacttaggtggctgggtgcaactgccacaagggattttaccactctaagtggcctagtgcaggaagcctctttgttcctgtgggtctgaggctgccctctattgtacagagatactggggcagccacagggtactagaagagggatccctcaagaacaaaatcccatccagaaagcactgtctgttcccaataggcacagagatcttgccacaagtgtcctaactactgaagcctcttcatacctgcagaactgaggctctcttttccgacaggaagacatcgaggtggaaaggcagaaattacaagagacacaatcataataagtgacctggttcagaaagcatctttggtcatatggacctaggacttctcttccccacccagagatacctgggcaaacacagagcactggtaaggctatccaccacaaagagtgactagcctgggaagcccgttggacgctatggccatgagaatccctccacttttacccagagacattggagcagctggagggtaccagtatagggattctaacacaataatcctatctaggaaacacttttatctctatagatctaagaaacccctactctacctagcagcaccagcaccctagtctggggaactccttctgcccactcagaatgtaccatcaaggatttttgagagtaccagcatcactagataaaccaagcaggcctcaataacacgagaaatactctgaaaataaaactgtctttgggaccacagcccataaaagtagaatggcacctgtgtattgaactacgtatggtaaatacctgctaaaataaaagattgaaataagatccagattctgcatatataatggacaaaatgtccagagtaccatcaaaagtcgcctgcatactgagaaccaaaacaaacaaacaaaactagaatgagaaaagacatcgactaatgctatcacttagataaattagatgttgaaattatctgacaagaattttaaagtagaagtcaggccaggcgcagtggctcatgcccgtaatcccagcactttgggagaccccggcgaccggatcacctgaggtcaggagttcaagaccagcctggccaacatagtgaaaccctgtctcgactaaaaatataaaaattagctgggcatgatggtgtgtgcctgtaatcccagctactcaggaggctgaggcatgagggtctcttgaacccgggagagagaggttgcagtgaaccgagatcgcgccactgcactccagcctggaccacagagtgagactccgtctcaaaaaaaaaaaaaaaatgcaatagcatttatgatttctgcaaagaaaatgaaactcttacatataaaactaacaaaacatgcacagaatctgtatgataaaagttaccaagtgctagtaaaataaataaagaagacctaaatatatggagatacattatgttcatggattggaaaactcaccatagtaaagatgtgaattctctctaagttgatctatttttaagacaattcttacgaaaattttagcaatgtttttgaacttacacaggcttattataaaaattatataggatgtatagaatggcacaggacctatactagccaaaactattgaataaggaaaaattaattagagaaatcactcttactgttgttaaagttaattatatagcagcagtattctagacagtctgatactggtggtgtacagactcatatatcagtgaaacagaatagagagcccagaaatagatccacaaatatgcccaatttatttatttttacagcttaaagtataattgatatacaaaaatctgcacatatttaatgtatacaatttgatgagtttggacatattcatatacctgtgaaaccatcaccacaatcaaataacaaacatcaattccctggaaaagtttccttgtgtccctttgttttggacgaagcaggaatccagtaaggagggttagcctttttaataaatggtgttgtagtaatccaacacccataggcaaaaaacaaacaaaaaacaccttgatctaaacatcagaagaacttaaactgtaaaacttactcaaaaatagaacatatttgggatctaacgttaaagtgttcttagacttgacaccaaagtcgccatccataaaaggaaattttgataaagtgaacctcattaaaataaaaaacttttgctatgcaaaatattctgttaagaagaaatataaccgggcgtggtggctcgtgcctgttaataccatcactttgggaagctgaggcaagctggtcgcttacgctcaggagttcgagaccagcctggccaacatgatgaaactctgtctctagtaaaaatacaaaaattagctgggcgtagtggcgcacacctgtagtaccacctacttgggaagctgaggcatgagaatcgcttgagcccaggaggcagaggttgcagtgagtcgagatcataccactgcactctcaaaaaaagaaaaaaatgaaatacgagctacagactgggagaaaatattggcaaaccatatatctagatatcaagaactagtatcaaaactacataaagagctctcaaaactcaacattttaaaaatccaataagaaaatggacaaaagacaggcacagatgtttcaccaatgaagatatacagatggcatatataaatgcattaaaaaatgttcaacatcaacaaccattagtaaaatggaaattaaaaccaaagtgagatattattacctagtagtcaaaatggctaaaataagaaaatagacaccagatgctggcaaggaagcggagaaactgggtaaatcatatattgctggtgggactgttaaatggtatagccacactggaaaatagtttggcagttcattttcaaactaaaaatggacttagcatatgacacagcaattgccctcttaatcattcttaaaaaaatgaaaacttgttttcatacagaaacgtatccacaaatattcatagcagccttatagtaccaaaacacacaaaaaagtcccttgatatgtaattgcttaaaaaaaaaaaaaccctgtggtacatgcataccatggaatattacccagcaataaaaaggaattaactattggataaacctggtgtaatttatactgagtgaaaaaaaataacaatctctgcttaattttgttgttcacccaaaagtcattcaggagcaagttgtttggtttccatgtaattgtgtggttttgagaggtcctcttggtattgatttctatttttattccactgtggtccaagaatttgtttgcttttatttcaattttcgaaatttattgagattcgctttatggctgagcatgtggtttatcttgcagtacattctgtgtgcagatgagaagaatgtatattctgtggttttgggtaaagtagtatgtagatgtctattaggtctagttggtcaagagtcaaatttaatccagaatttctttgttagttttctgcctcagtgatcggtctaacactatcagtaggttgttgaagtcccccattattactgtgtggcttcctaagtgttttcgtaggtcttgaaaagtacttgatttaggacattggtgtgccaatgctgggtgcatatatatttatgatagttaaattttcttgttgaattacaccctttatcattatgtagtgaccttctttgtccttttttactttactgtttgtgggagtgtaaattaggtcggctactgtgaaaagcagtttggagatttctcgaagaactaaaagtaaggactaccatttgacccagcaatctcattactgggtttatacccaaaggaaaatagattattctaccaaaaatcatatgcactgggatgttcattacagcactgttcacaatagcaaagatgtggcatcaacctacatgcccacaatggttgattggctgaagaaaatatggtacatacacatcatgaaatcctatgcagcaataaaaaaagaaaaaaatcatatcctttgcaacaacattgatggagctggaggacattatcctaagcgaattaacacagaaacagaaaaccaagcaccacacgttctcacttataagtgggagctaaacactgagtacacatgaacataaagatgagaacagtagactctggggactacaatcgaggggagggaggaaggggcaaaggctgaaaagctacctattgggtactatgctcactacctgggtgatgacttcagttgtaccccagacttaaatatcacacaatatactcttgtaacaaacctgcatatataccccctggatgtaaaataaaagttgaaatgtaaaaaaggaaaagcaacaatctaaaatgaatgtatattgcatgtttccatttgtttttgcttgcttgtttgtttttgagacaggttctcactcttgcccaggctagagtgcagtggtgcgattgtagctcactgcagccttgaagtcctgggctcaagtaatactcctgcctcagctttctgaatagctgggactacaggcacacaccaccacacctggcccatttttaaaaattgttttgtgtagacagggtctcactatggtgacagaccaggatccctggtctccagcgatcctcccgccttgacttctcgaaatgctgagattacaggtgtgagccactgcatctggtctctatttgtgtaacatttctgaagtaacattattatggcaaatagatgagtggttgcccgcttgtgaactcctccaccttgagggctcagaggctggatccatagatatagcagaatgtgtttgtgtgtgtgtctatgaaaaggagtaggaggctgagggtgggaaaatgccatggaagcaaaatatgattgagcatgactagcttctcttgtgactgttcagcccaaaatgtccaggagtcataaacacgttgtgaaagaaatttccagggcatgcatctcataaggacgtgtctgcttgtgggttctcaggaaactgcagaccctgccctgcaagtctggcctctctcatggacagtcagagggccatgaggttgcattttttaaattgaggtaaaattcacataacataaaagtaaccattttaaagtgtacaattcaatagcatttcgtacattcacgatggtgtgcaaccatcatctctattttggtccaaaatattttcatcaccccaaaggcaccactgtatccatttatcagttagtccacactcctccctcacccagctgttggcaaccacgaaaccactttctgtctctaaggatttgggtgacctggtcttcatgtcaatggaatcatgctgtatgcagccccttgtgactggtttatttcactcagcataatgtgatatggattgggggaaggtggcaggtggcctataaaaggataacatggggtgtcttgaggtgatggtacatctaccacttgtgttgtgcttacgtgaagtgatctatgtggtaaaattgagtataactatatatacacacacacatacacacacaaatgtatacgtacataaatggtgaaatcagaagaaggtttatggattataccaatgtcaattcttttgatattataccgcagttttgcaagatgtaaatattgagtgagcctccgtgaagggtgcacaggaccttcaacctccctatacaattttttgaaacttcctgtgaacttgtagtttatcaaattaaaaagaaaaattcaaacagccttagtttagatctttaaagcctgatcctaatgaaattaaattcattttcatcccatgtatataatattgatgctcaccccaatgattcgtagattacatatttttgacaaagaaagaaatgtaataggttgttactttcttttttacttacaataccagtatcattttgctgaatttaattggggagctctatagaatacaacttgaaaaatactagtctaacttatgtcagatgttcaaattaatgtagcttagtttcgtgctctctggacttttagacttcatgattcaactaaatttaaaacaagttagaaacaaaccagagatcaaccttgagttgccattttcttactttgctaattagggcttctcaccattgtaatataaaagaaaaagaccctatcagcaccaaaacttggaaggacctgatcacagaattaaaaaatgaaataattaaaaaaaaatactccagcctcttcatgtgtttcctgtttcaccatggcctgatgtgaccgtcatcatgcactggaacctgaatttaaacgcatgttaatgaactcctcaaatggcatttaccgaatcagagaaaacttgaaagaaacttaactagcagtggtccatttgagtaaaaatataatacataaaaggaagatctcttgaattccaagcctgacaaaaatttcatctttattagatggaatactatatatcccattttaagaggtatgcatatgtacataaatcggaaatttgcaagtaatatatgtgattttaatgaacttcaaagaaaacaatcatacaattgtatagtcacaccacatatatatgattgtagtgttagtaatagtgttttctgagtgcaaatgatatgtatatgtacgtaaacatacacagagatgcatgcatatatggaatatatgtgtatgcaagtacatgtcatatgctttcccatgggcaaatgattatgccaatattttcccaattttctaggatgttaacactcagtctcttttgctcaattccatatttaattttagtcctgttgaatcattaggatgtctttcatttagtccaagtcttactaatctgagttccatagtccatcacaatcccactttttctttggaacacttcctaaatagcaaattgccaatgttaagctcccttcttctgaccttctctagcattaattacacgtacctcaggtgttgacacataattatggtatgtctcagcttgtcccagaaatgatttttagtgatacatgaacatacgctatatacttttttaaatagaaaaataattgctgacatttaaaacggatctgaacttttgcttagtattaattctattcctcacaaaatcccacattttctgcccatttttcagatgagaaaagccaaagttaaaagggcttaaagttcgtgttaactcagctagtcagtggtagagctgagatttatagccaggttttctctttcccatgtgtgactctccaccagtattcattgctaattttatgagcaaatttgtagaagcatgtattcttttgaatgaatataagaatgacatttactaggctgtaccatacactgattcaatcaaaccaactaatttgcacaaaagcttaagtgaaatctctaagatttcatgcagcctgaattttaaatttggcatgagataggagactgccctttgcttagaaaacaaacagcacaacacgacaaagacataaacttgccccaatgccattgtgcgggagagcataaacctgtggtgagtcaaggctatagaaattaggttctgtggcccatctaatttgttgcccatgtcaggggccagcatgctgtccaggatccagctcattgctggcttcctcgctatgaaggcaatagtcttaggatccttgttataaacgtttggaaaaagtttctgaggccctcaaatcttcctggaggaggcagatatacagatatagcacataccaggaatctcagtcatgggctcctcgatggcagatcccatcagtagtgtttgaaacacacagtttgtacatcataagccccaaattttgatggctagtactaaaaattattttcaaagttgtatttcagtatttacataactattgagaagtgatttcttttgagagactcaaacaacagaaccttattttagctaatgaatttgtacatgcaattccctaattttcatctccctggcagaatggtttctacactccaccttatcctatagactaattacaaattaaccttactaaatattcatttttttctcacttcttcctttgctcacaaatttctagcatgtgccttacatgcatgcattctagttcagactaagactctgacctttcatgccaccttggatcccaccttatttctcaatattctcaacatgaattttctaaatattttcagcttagacctttaaatctatcaagttataattagtgctgacttggtagtggctaatatcactgtaatacataaagtataatgaagaaaatatgtgtttaagaaatatgaacagtagaattctctaggatttaccatcaaactacctgtgtgacctagagctaattatataaatcctgagcttccattttttccagtaatagggagatgacattagatgattcttaacatactctttaatatctttgacaaaaaaaacttcagttatctgattgcttatcctacttgtgtttgttttgtattctcttatgtatgctgggaaatgtgaatccgtatacaatcactgaattatcataatgagattcatctcctggcactggtgctaagattgagaatttttgctattgatggacagagctgtggtattgtgaggcaatatttcttattatattgcttttgttgaagttagtaagtagtataatcctgaaagcaaaataaaatgtggagccaaacaaattgcctctcatatttacagagggcaggccatgcatattacttcacattatgcataactgaggttgtaaaatactgctgtagtgttttgatgattcaacagttagtgttcttcctcaatcaaagagctgatgttaacagaacttgccacaatacagcatatgctaattgcgtatggcttcatgtgggcccttcaaatataaaaagtcaaacttttagaaaccactcaataccagacattcaaaattctgggtggcagtaagggatatcatttgatatttgaagtcaagaaccggattagattagttagagatgcaggaatatttgcaaggtctgtatgacctttacataacatgatctactggaaacctgtttttctaaatgtttatatgtatgcacattgacatttaaaatgaaaacaatgggatgtaaatcctctcattaagatgggtgccactgactgattactattcttgaagcaatgttgtcctttttcttgcatggtaaatgcttcttttttaaaaaataaaaaagtcattgctatgtataaaatgcatcattcagagattataaccagggttggaagtatcatatttgaactttagcttagacaagtccagaacatgttacaacagggtcactgtttgatgttacattgttgttcagagctcaactgtgtgttaggcctggactgaggacacagtgacaccctttattgctgtattgcacagttacatctcagggtaatgcttagaggtgggatatgctaatatagtagtctaaaatgtgcaatcaataattcaataattatttagggagggtcagataccacgctatgtgttggaaatacagtggtaaacaagactatttttaccctcatggtgattaaaatccactgtttttttttaaattattttaggatttgtcaatattccaagggcctaccgcaaggaagagcaagtgactaaagcttgtttctaatctttctctttttattcactatttttacctttcattttgtctcacagacatgatttgacccagtaatgtctcaattctttcccagaacaatgtggagataaccagatcataaacagctccacctctaattacaatctgcgtcattttcttgtgtgtgtgtgttttttttttttttcattttgatgtcattaccatagggaggaatcccacaatggggcaacaatcaccatcagttcctccacaacatgtggtttcaaccatgactcttgagaaagactttagctctatctcagaatattcccaataatttgatttacttaaactttatggtgcaaataatgtaacccatttcacgattctatctgctttattcttctttcgtcctttttgttctttaacatgtgactgaattataaactgccccttgaattcatatcagtcacaaaataaccttgataattacttcactctacatggatttctctataaatacatttcctctctgatcaataccaaccaactcaacatcgtccaagttctccccaaatccaatgaactcttccttctttgaatttagaacacaaattctatctcatgtatatgcatataagatgtcattggaaaaatgggggaaaagatcttaaagggatcagggaggctgggtatggaggctcacgcctgtaatcccagcactttgggagactgaggcaggcggatcacctgaggtcaggagtttgagaccagcctggccaacatggtgaaaccctgtctctactaaaaatacaaaaattagtcaggcgtggtggtgggcacctgtaatcccagctactagggaggctgaggcaggagaatcgcttgaacccaggaggcagaggttgcagtgagctgagattgcattactgcactccagcctgggcaacagagtgagactctgtctcaaaaaaaataaaaatgaaaaagaacacacatttgctttgccactcacatggtcactattcatgttttaacttaaatcattgaatggtcttattgtgttttcttttttttggtttttttttttttggttttttttttgagacagagtctcgctttgtcgcccaggctggagtgtggtggcactatctcggctcaccacaacctccgcctctggggttcaagcaattctcctgcctcagcctcccaagtagctgggattacaggcacccgccacacacccggctaatttttatatttttagtagagacgaggtttcaccatgttggccaggctggtctgaaactcctgacctcaggtgatctgcctgccttggcctcccaaagtgctggaattacaggcatgagccaccgcgcccagccttgtgttttcatatctaatgtttcatcacatggaatgcagtgttcagagtggagattctaggatagacagatagataattgctaacagtgcttaaaaaatattcagcatttgataaatatttgcttttttttttttagttttaggtaaaattaaggatcattaattttttacacctttgatcatgttaacatataaaagattaaataataggcaataagtagcaataaaataggaagtttagtttttccaaaaagtttatgatacttttattatttaaaaagaaatatataaaataatcacttggacactatgaaaatgttggaactgtaacttagcaattagaaatgcattagatacaaatgctatacagttactttatattcaataaatgttcattgatagtaattgctaattttaagatcttcgagaaaatagatacaatattgccacaaataacacctttttaaatacaccttggaatatcagggttataaatagttctttgtttggatgacaaaagtcttttttctttagccacagctgttgataatataaataattcatttttaaagcaataaaaataaatacagccaagattatattcatttatgtttgggggccatatatatagtttatagcataaaaaagcagtgatcttatgttgaccctttctctaaaaattaatagtttattcagcttcctgtgttgaaattgtttttgtttatatactattcccttatattttgcttatatttgctctctttttctgaagaccaattattgaccataaaattagataatcttggaaggtgttaacatttcctagttgaggacgtgtgcaacgggatggattttgctgccgtctagtttcttctcaagtgtctaagctgaggcgttccctactaaaactcaccactgtctggaaatcaaggcacttaactctctgttgtgagggggttgattgtaaatgtcccaaggtattgcaaaagcagaaggacccacgtagagccatgcaaatgagagtgggtagatacattttatgagtgggtgcctcctattctcagccctggtgatttttagggtggtctcaggtgtgtctcagggtagagaggtatagagttgccattctttgtctgatttttttttttccttgtctattgctttaggataaactcagccttactttactcacagctacaattttggctctcaaaagatagtttgggaaaatgttttaaaaatctgactatttattgtttcttgatgttttcaacccttatacaataattttcttttccttgaatacccattgatgatatatgaaaaaaataaggaccagaaggtgaagtgggaattttaaaagtatcaagataaaaacataagcgttatctcactagagacataaacccaaatattgtgttgatcagggtagagtaaagaaagcattgcccctgttaaatcacttatagctacgatccacttggtaatcattataaatctgtgattatatatatatacatatatataagctccatatgattttatttattatgaccttttattttacgtatatattagactctgaagagccccagggtatttgtcccaagatctttgcaaaactccgaatttgcaaacatcactaaggcatataattctactcataaaatgcagtaaagtatggctaattacagagaccccatcagactcttgatgattgtataaacttaagtcatatataacactattaaaataaaatctactactaaacaaaccacattgtattatatcaccccaattaaatttttaactatgaacttgcctcaatctgaaaataattgtagtgagcgaataatgatacttgctgtgtaataggtgcctggcatgttttctttaaagtaggacacttttatttttaatttcaacttttattttacatacagggagtacacatgcagatttgttaaaacggtatattgcacccagatagtaagcatagtacccaataggtagcttttaactccttccccgccggtccctccccactctagtagtccacagtgtctgttgttctcatgtttatgtccgttgtgctcaatgtttagttcccatttataagtgagagcatgtggcatttggttttctgttcttgcattacttcgcttaatataatgtcctccagctccatccatgtcgctgcaaaggacatgattttgttcttttttatggctgcataggattccgtggtgtgtatgtactacattttctttatccagtcaaccattgatgagcttttaggttgattcgatatttttgctattgtgaattgtgtgacaaagaacataccagtgcatgtgtctttttgataaaatgatctattttcctttgggtatatactcagtaatgggattgctgaattgaatgatagatctgttttaagttctgtgagaaatctccaaactgcttgccacgggggctgaaataatttacattccaaccaacagtgtataagcactcccttttatctacagcctcaccagcgtttatcttttgattttttttttttttttttttttgtcacccaggctggagtgcaatggggcaatcctggctcactgcacctcaacctcctgggttcaaatgattctcatgctgcagcctccctagcagctgggattacagatgtgtaccaccacacccagctaatttttgtatttttactagagtcggggtttcaccattttggccagtctggtcttgaactcctggcctcatatgatcctcctgcctaagcctcctacagtgctgggattacaggcgcaagccactgcactcagcctttcttgacttttaaataatagccattctgtttggtgtgagatggtatctcattgtggttttgcttttcatttctctgatgattaatgatgatgagcatttcttcgtatgtttgttggtcgcttgcatgtcttcctttgagaagtgtttgttcatgtcttttgtccattttttaatattagacttttgtcaggtgcacagtttgtgaatattttctcccattctgtagattatctgtttactttgttgatagtttctttggctgtgcagaagctctttagtttaattaggtccctcttgtcaatttttatttttgttacaattacttttggggacttagccaaaaattctttgccggccgggcgcagtgcctcatgcctgtaatcccagcactttgggagaccaaggtgggtggattacccgaagccaggagttcgaaagcagcctgaccaacgtggcaaaaccctgtctctaccaaaaatacaaaaattagccgggtgtggtggcagacgcctgtaatcccagctacttgggaggctgaggcaggagaactgtttgaccccaggaggcagaggttgcaatgagtccagatcacaccactgtactccagcctgggcgacagagtgagactctgtcaaaaaaaaaaaaaaaattgccaatgccaatgtcaagaaggacatttcctaggtttgtttctaggatttgtagttttaggtcttacattaatatctttaatccaccatgagtttatttttgtatatggcaaaaggtagggatcaagtttcattcttctgcatatggctagccagtgatcctggcatcatttattgaataggaagtccttttaccattgcttgtttttgccagccttgtcgaaggctggttgaaggtgtatggctttatttctgtgttttctattctgttccattggtctatatgtctgtttctgtaccaatattatgctgtattggctactgtagtcttgtagcatagttggaagttctatagtgtgatgtactgtggtgtgaattattgtagggtgaagtactgtagtgtgatgcctccaattttgttcttgctgcttaggatggcttcggctatatgcgctcttttatttttttttttggttgcatatgaattttagaattgttttttctaattctgtgaggaatgaccttggtagtttgataaggacagcattgaatctataagttgttttgtgcagtatagccattttaattatattgtttcttccaatgagcatggaatgctttttcgtttatctgtgtttctttcaacaatgttttttaatactccttacagagatctttcagcatcttggttaggtgtattcctaggtatttcattttctttggctattgtaaatgggattgtgttcttcatttgactctcagcttggtcattattgttgtatagaaatgctattaatttttatatgttttactataaaaatatatttttatgtattgtatatcttgaaacctcgttaaaattgtttatcagttctagtagccttttggtggagtctttgggttttctaagtatagaatcataccgtcagtgaaaaaagatagtttgacttctttttctatttggatgcattttatttctttctcttgcctaattgctgtggctaggacttccagtactatgtttaataaaactggtgagagtgggcatccttgttttgttccagttctcagtgggaatcgttccaacttttgcccattcggtatgatgttggctatggatttgtcatagatggttcttattattttgaggtatgttccttcagtgcctagtctgttgagggtttttatcatgaagggatgttggattttattgaaaacttttttctgcattaaaataggacactttctgtctatgcttagcgtcttgtttattcttatctactttttacttgatgagatgtttcttcgcaattaaaaatatttaagtgacagtatagccacccatactttttattacagaaataaaaaatgcttcgtctctcatctgtcatttgatgaaaaaatccaagactttcttctaaaacctgcaaacatcataattcatatttgtattgcctccaactatcttctttcaagttaaccaccctttcaactttcactaaatctttaactcctatttgacgaggtattgaacgctgtactcaatgaaacacttttgcagcttctcttttggttatttatttttctttggttttctatagagaacataatggggttgaataattcaaaaatacaaactcttgctgatttcaacattgcacttttaattatattaaacttgtacttcctgggtcaaaaatcatctacgttgtaagactctttactttttctacctttttattgccagccttgtcagctatctttagggtagaagaagtgggagagatggtaaagcaatgagttgtgatttatttttctcaaaagaggaaagtttgcttcaaatcaaggaaatcaatacctacataaaaataaggggaggccaaggctgatttaataaagagaaagctagagtttcatcttgaatctctcactagcatagcgacttatgtatgaacctcagtaaatatcaatattctagacatagtggggcttcggtgtttctcaggaatagtcagacacatcagtatttaatctataatttaataaatccaagggtcttcttatctggaataaagctgactaaataatttagttgcttataaagcactaatatttagtactaaaatgacctgtcaatgttatttacatttattttatgttaactgaaagctatgttgctgataaagcttatattaagttcaggagttttaacgtggaattctattaatatggactcttaggactcaaagtgtttttcattaaatatcctggaacgtatgatataaaaattgagagatttatctttacgtattttgttctgcccatattggtattttcagcttattttctatcacagatttacatgggccaagactgaatcatagaatgggatattggaatttaatatagtttgttgatgctatggaatcattttttaaattatcaataacttattggatcttttattgccaaagtttcctaggatttcaattgaaatgcaaaaagaagaagtaaaagacattaacgtaaattctcagcagtttatacaaataaatttacaaggggcctatggaacaatacatgttggttttattttcaattgtagcaaaaaaataaataaataaaaggtagtttgccaacctctagagtgttgtaataatggcatcttttgacttttggagatttcatggaaattcttcaggtttccaacaagagccctccgggtgtgttgaattcatctgtacctgtgacagtcaggatctaggcaaaattcagaaaaacagtgagtacactaaatatagacttgccaagtctacagttctttagggaaaaaaaaattcctggactcagcctaaagtccccctaagttttagaggtcagtaatatttcaagtgactagaaaatctgaactaggtacatcatctttgttctcacacttagtatgattgttctcaccaagcatcattgcttttctcctttctgcataatttttccttactccttgattgccctttcactcttatgtgaccataaacctctgagtttccataatgtagacatgaaatttaatggactacattatgaaaatatttttttcaatgtcatcataatttctgtgccaggataacaagctcagaatatgggagtttatagtccagcatctctcccacaacctactatgactgtaaagaaattgtaacctgctccttatttccttcaatgctaatttctttgaaaattgattatgaatgccctccaatcaatatatgtaaaaaaaaaacctttatctttactaaaatacatatcctccagattcataacgaaggagaaaattctttggggaaagaagagtggagacccctcagtttcaattctgatccaactgactttattttgtccctagggttattttgctggttggtggcttaacattctaatcctagggtaaactaggacctgccttgccccttaacaacatgtgtaatcttaaatctggcccagtcaaaagttttaaacaagactttaggcggtaaaaactgaaagagaaataaaccaggaattaacaatgaactgataatttttgctgatgaactaccacttggcttacagagattagaacacatctttctaatcttatgacacaccaccctaggctgagagtcattctagcaccatcttcgtcacctactcccttgaaaggtacatgaagttttatttcctttcaaaattttatttttttatttttggtttcttgtttttagaattattatctggcaaggataggactttatccatggactcgacagtgcatttattttagaaaaggcgtgtatatttgtgcaatttatcctagcagagtaagttccaatatgtatatacaggccaaacaatgactataatatgtacatttttcttcattaactgtgttgattgcctgtgttctttcatccagcagaggcaaagtactaacatagaagactatccaaagtcttccagtagacttgtttagactagatttgaaagaagatcttaagtgtaagattatttttatactgttttcaacttgtatatttgtgcaatttgttgaacaaatgagaattagataaataattttaaaatataagtactttatgagtcagtttcccttttttgtaagttctgtttcccagacgtgcaaagcaatataattcttattatttcagggtataaattaaatttaacctgagcaaacaacttcttgtatgattgtattactatttttattactattatttttagagagactgatgacattctatcacttggtgtcatattcatctttttatagatatttgactaataatatgtaataatagtattatgaatggtgcccttaagtctgatgatttgcttaaggggctaaagaacaatatataaatggaaatctaaatagcactacttttaaaaagaataaacccatagaaagaaaattccatagctcaaaactaagaaactcaaaatccatataacacagaaagtaaaagggagcagttttctatatatatatatatatattttttaaaaagctctctgactctggttaaggatgcttgtgaatctaaaatgatgcatgttgataaagcactgtaatttaaagaagtctccagtcttgcctttaacagcaaaagcaagaacacattaaatatataggatctataagagaaatgaataaaaaatgttcaaatggaaatggtaaacatacagactagttcttaaagataggtcatgtatattcattttctaatttaaattgagctattttgatacatgtatatattttattattatgaaatatgtcaaacaactggaggatgactaaaaataatattaatataacattttgccgtacttgattttagaatggtggtaccaatttatgcctccaacagtagtgtatgcatcccccatttttcaaattcttatcaactagatattgacactttataatttttatcaatttgatgagtatgaaattatatctcatttgttttttgatcaatgtatcttttatattcattgaccctttattatttcctgctctgaatcatctgttcatgtcctttgccaatttttcaattgacttttggtctatttcttattttcatgtaattctttaggtattacagtttttccctttcactcatcggtctctaaataaacttggaaataatttttaggggtttttttgtgaatagtgaataattttgtgaattattttagagtaaataactgtcctaccatcattgtttaaatgtctaccttttctctattcacctgtagtgtcacctctgttttgcatcgagattagtatatacatgtacattagattagtatgtacattagtatttctgggcatctttttttgttctgttcttcatttgccaattcctgtgccagtactataatatgtctcaattaccatagatttatatttagccctgacatgtggtagggccagacaccctaacttgtttttcttcaaaactttcttagataaaccttgccctttgtctatcatcagttctataaaattatcagccattatctttaaatctggcttctctgcaattccattcattctcttctttaggaactcttattgtcgtataatattgtccatcttttatgtccttagtattttatttttaacatttacttgcctccctgtgttacgttctggatgaattcttcattagtatcttctaattcactaattttatcttcttgttcaatccagatacttaagctgtttatttctttaaaattgattcatttactacatttttcatttccaacatttatagcttttttcttctcaatatgaaattattttaatttctacatgcttttgttttataactacttgttctttttattgagttttatcttttaattttattgttgagaattctaaacatattatttaaaaatgttcttcagacatctatatgagaataatttcatctagactgaactcatggttgaatcattgtggttgtggtggtggtggtggtggtggtggtggtggttttctgccttttttaggcctttatttattcacagatttctggagcatttagagtaaaagggtttgcttttattgtcattgtgtttattatatctgttccaccactttgctgttgtccccatctggcccctggaatagctgcctagattcagatagtctactaccacgtggagtgctgtttgtggtgataattaattagaaatattgaagattcagtactcaaattcatttgttttgggctgcttctgccttcatggcgtgtgtgtgtgtgtgtgtgtgtgtgtgtgtgtgtgtgtgttcttcccgtatctctagtgtaacagattcctaacataataggctctcaggcagcaggtcagcaaaatttttaagacatttttcttttcaagaatgattgctgggtgaacttttgccataacttgtgacttcaagcagtgatcttaattctagtttatcctgtacatgtggactcttagtgaaggaatctaaatgcgaagccactacccatggggggaaaatagtctgtcaggactgcagctactgtgtctgatatgtggaggtgccaagattgtgtctaagtcctactgtgttataacactctttctttttttatattttctttcttattcttctatatattaaataagtgtcaagtcatgaaatttccatgccatcttaactgaagaggtttaaatgttttatatttaatctcccgttatttattgactttacaatgtcaaattaaaactcacattcaggcatatactactaaaatactaatagaagacaaactaggatcattatgtttagggaaaaatacacacatactatcatgacacagtacaattaacataaaaccaaacaccagaggtttctcttattaaagctgaattttaattgtttttatgtatctatattactgtctataatacaggttcttgagaattaggactgctgttgtgtgtgtaagtgtggatcgcttttgttgtaatttttgatcatacttctggaaactagcatgatagctggaaaacaggtccacaaatattaattgaatcaatgactgtttaggagacacacaggcatagatgcagcttctgtactacagtaccttacaacctatcatcgacaaaatacaaaggcaataagtactttttaaaaatatataattgtataaagtgatgagcaagaaaacagaatgaataagaatgtgtaatagtaaattaatcccatttcacttttgataggcttttatataaagctgatacaaaatactttttaaattctcagtgaggcatttgatgagtttcctaataatatttatgtaaatataatagcaagtatacaatcttctctatattttgtaacagtaatgactatccctttaaaaggtatctatttgattcagaggttattatttttctcttgtcttcgctaattttaattctctgatgatgttttgagaacacatcacttgaagatttttagtagggcagtgctgttgtctatgttactgaaaagtaactggactggagaatgtgaacatgcactcctgttcagtatttggattttaggagtgtgtcgctgattcttgaagaatttttttaaaatctttttaagaaagcatcattattgttacttaaaaatatttacctgttaagcacctcttagaatggccaaaatccaaaacactgacaacatcaaatgctgaccaggttatgtaacaacaaaatctctttcattgctggtgggaatgcaaaagggtacagcctctttggaaaacaatttggcagtttctcacaaaactaaacacacacttatcatatgatctagcaattgtactccttggtatttacccagataagcttaaaacatatccacacaaaaacctgagtgcaaatatttataattattcataattgaccaaacttgtaaacaatcaagctctccttccataggtgagtgaatgaatgaatgaacaggtacatgcagccaatagaatattattcaggacctttgaaatgagctataaagccatgaaaaaagaccaacaaatatgggggaactgtaagtgcatattactaagtgaaagaagctaatttgaaagggttacatactgttgaatttcgactatgtggcattctagaaatggcaaaactatgatcacagtaaacagatgagtggtttcagtggttgccaggggttgcggcaggaggtggaatgtatagacagattacagaagatctttaaggcagtgattatatattatccgaaatgcttgcgaccagaagtgtttcagatttcctttttttttttggggggggggggcgattttgaaatatttacattacacttaccagttgagcatcccaaatctgaaaatttgaaatccaaaatgctccaatgagcatttgctttggacatcttatcagcacttcaaaagttttgaattttggagcatttgaattttagatttttagatttgagatgttcaacctgtatgattctatagtggtggacacatcgttgaatacttgcccaaacctatagcatgtacaacactgagtgaaacctaatgtaatctatggactttggctgacattgtatcaatgtaggctcatcaattgtaacataccattgtggtatgaagttttgatggtgggggaagctgtatgttcgtagggctagatggtatatgagaaacctctcttccttccacttagtcctgctgtgaacgtaaaactcctctaaaaaacaaagtctatttttaaaaaaacatttactaggacaaaacatgtttttagcacaattttttaaacgcacagtaaagcgccatatgctcatgagcttcctttggaagcgcccatcttcaaacaagtatattaagataagttttgtccatatcatagcaggtattttattttcccattctgcatatatttaacatggtaattaattcagcctggtattactctggctgttattcaaagcctcatatatgtttgctaatttgtcacttgctcctcatacaacatcttaactatttaataagcagttaccaaagtctagacagtcctgctccagcatgagttttaattgagtatgtactacataagacaattaagatccgaacaaaccatcagcggcagatgatcctacagttatgaggaaagcttctgtaggagtgactgtgtaaaatgatgaaagcaaagggtcttggaatatcatatatatttatatcagggctctaaagacatactaggataaagtggagaaaggcatctctagggctatcttctgtcattttgttgccagtcgttttaccatcaaagcaatatttttagaaaaaggtttccatcatcatttaccaatattttagggaatctttaaagtctaagaacaaatcagaaggtaataataatattgaaaaattattccaaaatgtttagtacgttgtttgtcttgtttcatcaaaactatttgtagtagcagaacttttgttggtggttctgtaactgatgattagctttcagtgcaagtatttttcaggtaactgtgtgaaaatatttttaaacatttacactatgtttccaaaccggaacactttggtatagttatacctgtgaaataaatgacattgtgtaaaacaatatagcggatcttttaaagtgagttgacaggatgacagtacagttactcacagttcaaactaccacaatatagaatgtaatgagccataatgctattatttttcacttcagaattttaatattgtgttttgtacagttcttaaaatgtcatgcataaaacattgtgctgaaacaatagtgatttgtatatttattacgtcagtaggacccaacagtctaataacgataggaaacaatggaaatttttcctcagacttttttggaaactggttacacaaagaattgctttgggaaggatctaatgtttgaaaagcattctggcttgatctttagatacaacagtttgatcttttgtgcaactgagagcctctatataaatgcagctggagtgagtagggtatttgaggctatggcaccttcagtgatagggtgatttttgtcttactcatcctcagtgccaaccagaaaataattacattcctctaatagtgaattgaccactaactaaatctgaaggacaagaagcttggaaaaatataactgtgcaaaatggcttatcgaacttaccattttatagaagttgaacatggatctctaataccttggacttgcttctaatatggtatcacatagtttcatcaccgtgattactaatggatggagtgatatattttatttccaagtattaataaaacagcaaattatcataattgaataagaaggatgctacattgcatatttaataacgtatatgtgacactggacaagtaaggatgaattaatctcttggaataaaccaccattgaaagagcgtttctgtcaagtaatgtcatttactctccttattaacaaacagagcaattctgttggatcacttagcatggtgagcttattaggaaaatcacattggtttcagcaaaagactcatgtgacctttctaaatgaaaatagcatgatgctaaaaaaaattggagggaggaccatctctacatacagaatggtctttgcaatcaactaccatattgagaaaaaacttttattttttatgtttagaatatagaagggtttctgtttctcttttaattaaaaggaacgaaagtggtatttacattaaatgcaaatagcaccttctttcctacagtgagtgtttctcagaaatggacacattttcccttctcggtctccagaaaccccttgatcacaccaaaagagcaagtatggctttctgaaaatagaaaaattgtaggtaggttatacttacagtccctgaatttttgcacatatcgtaaaatggtgactagaattgttcaagatgtgttactccgttacacgtttacaaaggggctgaagagatatagatgttgcattttattaatactaaagaagaaactcagttataggaagtaacaggaaaaatgaatagtggtctgcatagtaacaatatcataatactgtaaagaagaaacattgcacttgccatttaataattgagaaaatctagagtgaattattttgagtaagatacacttactattaattttttctaaaatgtatttctctaactacatgttagttcaggtgaaacaaaaaatgagaatttaataaatgtttatatctgaaatataaaattaatatgtaaatataccttcttttgagatgacaggtgtacattctcggttgaaaagtaggtttctattttaaatcaagattaatgtatagtttatgattaatttaaaatataaatgttatatttcctctcatcctagaacagaataaaaagattttgaaggatttgtattaatcaaataagctagaagccacgcttttctaggaaaaatattaagagaaatgtaaccatgcttgacgctaggatggtgttaccatcaaactaaagcataatttcctctttctgtgactgttgaatactaatttttaaacattaggaattgtctattatactttattatatcatgactactcaatgttttgacatgaaattgtccctaatatatttgctaatatttgaaactagttcaaaattatctggcaagaaatttgtggctttatccatatgatgtatagcatgctagcttgtctatgcagaaggacaataattagacaattcagagaaggtgataatatttatagcttattatagaaatatatgtaaagactttcttgattgtaaacataaatattataaagtataactgagcttttgagattatcaggaaaccaaagtatctacaaaatctaaactttcactcaaacccatggtcagactgtcaatactaaattgaaaaattagactcctacacaagttgtgaagtttttctttcttcatgcatatgattacagaaaggcaggtatggatggcctaatttgtggaataaatccaaccacttttgtaacagctcagataacaaaaatcactaatagagaatgtgatattttatcaaattggctttgtttttgtttttattgtagcattgcataagatcaaagaagaaaataaatgattcaattaaaggaaaaatactgaaaggcaggacacagaaaaagagagttttagatgtggaattcttttgagagatcatctagtctgtttacagatatgaaatctggggaaacacagaggtgaattgtccaaggctttgcagttattgaagcatcaaaatcatacatatatcctgcttctaaacctccctctcagtgttcttttcatctatggttttaaaataatcaagtggtatttgttaagaagttagaattttaagatatggattatataaatccgatttatatggtcaagtttgactaatattagtaaatttgattgttagcaacataaacatttctggagtacctttcctataaaatacggatgacaatctcctttagcattgttattccgtctgggataaaaagcacttcccacatttatttagaaatgtaatggatgtgttcatttaactccaatgatataataattctctattgactacattcagtataacagtgatgtttatttggaattccccttggacttccacttagatttgttaaatatgaggtgatttgaatgacttaactaatgacatttgctcaatgtcttaagtttttcttgatagttggtaaatatctgttcatgatcaagagtgttacaccaagaatttactttcaatagagtgccatagatatcacttactgtgcattctctgtgtttatgtgtaaacatataatagatattcaaaagtaatataacctctccacattataaaataatgcacaaatataaagaaggataatatataagaaaataaaatggtgtaattgcacacgtgaggtgttctattttatgtcaaactatttcttaaaatcattcaaatatcttttaggttactaaaggagcttttgtcatatgaaaatcatatgaatagaccatcacattttgcaataagaagaaaaaaaaatttaactcatgaaatcaaaacctttatccaaaaccacctttgttcctcaatcttgtccaaattttgggtttttctaaacaagttttaataactcttattattttatatatttaccaaagcaatcagtctgtataagatttacattttagcatgctgttttttctctgatttatttctttcgaatcatcacatcaaataataaatcttaaagttgtcaattaaaattgatttcaaatgttttgtatctccccactattataagaactatattgtgaagtctatatcaaaatatagggggaaaagcctaaggtcgcaagtgaaaattttttttctaagacacattcaaaaatttgctaaccatttttgcatatctctaatttgccccagaccccaaattttaggataatgataaacttttagaatttgttaatacaatttttataattgaatatatcatatcttttttcaagtctatgttttttaataaacctgagagcaaatatttaaaatctcttttaaaagcatccaaatcgtaacaaaaagaactgtacagtgtaaacaatagtgtatgctccagacaaacaaagccttgtgatgtgaaataaagcaaatttgtgtataattaagcattaccagtactgttaaaatataggtttataaactggcaagaatatcgggaacatattctcagatattcaaatgcaaaaatggaaaatatttcatttttaacggtgaaattttctgctaactgtttacaaaataatatgtacttatatatagaaatgagtataagctattttcttttaatggctagtttctcattaaagggatcatgacattaggcatattaagagtttagtttggaaactattttaaaatattaataaagagctattgctaattaatgatgggattttccagttttatacatgaataaattactattaaaataacaaaaattgataactaagaatggggattagagtttgaaaaatttcattagtatttatggatttattggtttccctcattagagactagatgaccatcagagacggtgatatttttacttcataaccgcttatacctgttgtaaaatatcgagaggccatcagaattttgtcacttagagaagggactggaaatttttttaggtattcttttgccaagcatacttgctctatttaatggatgagaagtaaagctagacagattttcttcagttaaactttcaatatctccacagtctacagtacattaaaattcactcattgaaatttttttgtttgactctataatgataaatgtatctatttttagcattaataaaatggatgaagctttaactctataataaattcttccactttaaattctatacagcttgtctttccctgattctctagttctattaaattagtagaagtagttcgtgtcttcataatcaattgttatcaagaactaatatgtctaaataaacctgtagataaatgtccattcattattcttggtccataccaaagttccaattattatttgcagtatgtacctgacatatacatactaaaatgggttcaagtatagtttctcaataggaggtggatccttttattgatacataatagttgtacatattttgaggtcacataagattttgctgtgtttatgtaatgtataatgatcaaatcaggataattgggatactcatcacctcaaacccttaggagatggatactctcttgatgttcgatatttttagttttactttgattttatttttgtcatggcctcatttcaaactgactcataatccagaattatccaactaaatcataacagaaagtattattggctaaagtgaatcaagaaaaaatttagcattgttgctgtcatatacaaacatgtaagaagtttctttcacattttaaatataaatataaatgactgattctgggtttttcccttatgaggaaatacctaagcaacattaagctaagcaaataaatggttatttgtgtgatgatcttctaaatgtgtgtgtatgtatatattgctttaataaaaatttcagatggtatatcattttttaagtagcgaaattatcatagtgacttgtgaatagcaaaatgcaaaccaatgtggcattggatcctctccaggatgtgatgagtcacctgtcaccccccccattcaaccccaaatcccctacattctcagggaggactagttcttcctaaggctaacatgaatgccacatgttttaaagcaaagaatgtagaacatcaagttttaaatgtcatgtccattaatgagattagttaactgtccctttgcaagttcaaggaacaaagaaagccctgtggagagcagagagaagacagataggtggctgttaatgataagaggcaaaatttggtaaagggaaggcaacttaagctaaaggaagtgagtgaggtggatagaccccactaaaagacaaaaggagatagtacttaagaaaaaaatctgtcagtatctctctctggtagctgccttgtttttgttttgttttatttttgtttgttttatgctttcctgtaaatcatctcaaaatatctgactgtagcttcctctttcactcatttcattctgtaaattgtttctcaataccatgcctcttgaacacgagaaaacgctgtttctagcttcatcttcaagatatttatttccatttgtaaaaagaaagctgaaacatttttataggctacctcagagattatatactaacattttagtaacatgttctaaatgcttgagtagtttaagtattgacataaaattgctttctatttcagttggaattgtttgaatcctcagtaaatgtaaactattgtagctctaagggtatccccaactagaaagttcttatttcacacattaacatttgctgctttcttcacaagttaaactaaacatattttccttatttatttatttcactggaattcctttaagacattattttctcaagatgtggcccacaagccacctgcactgccaaccacaggttttctcagttggtatctctggggagaagaatcccttgatagtataaaaaatatccaatataccattatattaaaaaactagattggtcatatatctactgcatataacactgatggtcatatatctattgcatgtaacactatatacctgaataccagataaatgtagctcgggaaaaaaggtgaattatttcatgtagcaaggagtgcagaggtagcttttctgtcattggtttaggcatctcaatttcactccattccaggcagtccctggcagaaaaagaacaggatcaacatgattagcctggccaatcatgatttgttctttgggatgagtacattgcttgtgcacagtctcccttgatacccgaatggaattggagttctgttgacaaagaggaggaaactggatgggcaggtctagagtttatctggaatttgaattgtgcatttttagacatagagaaagaaatgcatttttagacatagacaaagaaataagtaggttttattatagtacgcactaacttaggtcagtttctatgtttctgtgactttcttaatcttacataattacctttatcttattaattaattaatttttatttttgctacatgaataaatacattcaagagggcacacaataaaatatagtaatatataattccaaagtacgggctcagcaagtagaaaaaataaacaccatgatttgaaagcattgatgtaaaacttgatctttaccattgctaattagtcagccagaaaatatatataggaaatggcttagccctacatataaaatgtgattctcattcttagggttatctatgcatcttttatctggtactactttttatatctcaatatttgacatcttttttgccccatttcaaaatataaatttatttattttctttacaactgcattcctctgcacaaataaaaaatatataatttagaatatatagtagagttttgataattatatttatattttaaatggttttgatatgaatagttacttctattctccacctgtttaacaaatttgatatttggaggcaaatttccatatatttgaataaatatgatagttaagaaagcattactttctatttgccaaaacttaccttgaattaaaaatagacaatacgtatttatatatgtgtttgtatatatgtatatatgtttgtgatttgtaatggttttgtatatgtgtgtcttctaatacaagggtccccaacccctgggccaaggaccggtactggtctgtggcctgttaggaacccagctgcacagcaggaggtgagcagaaggtgagcaaacattactgcctgagctctgcctcctgtcatatcagtggcagcattagattctcataggagagccaaccctactgtgaactgcgcatgtgagggaaataagttgcaggctccttatatgaatctaatgcctaatgagctgaggtggaacagtttcaaccccaaaccacaacccctatacccccagattttcacctcccccaaacccctgtctgtggaataattgtcttccacaaaactgttccctagtgccaaaaaggttggggaccactgttctaatacacacatacacacacatacatacatacaagtgtacattgatatatatatatatatatatatatataatgaatagtttactactatgtgggctattatacagaactgaaaaaagaaccacaacaacacaaaacaatatcgatgaatgttagcagtataatatccaaagaaaaaaataaatccaacattataattcaaaaaacccaatattaaatccaataaatttaataaaaatgtcagatggtgcattctctgagtacagtatcccttgatacctgaatggaacatactacatggtaaatatcatctccataaagccaaacatattgaaaataaaattttagtctttaggaataatatgtgtgtgtttaataaacatataaaaagaaaagaaatgatgaagaaattattcaaaactgtgttacttcatttggggagaggtagggaatgtttgcaaaagtgcaacatgattggacataggttattttcaattccttgcatttttgcaggagtaaggagtgtttgcagctgtttcctacgttgttaaaaatgggcaggccaagagtgcaatgtatctttaacataatgtcgtaagtaatatcccaatcaaatcaaatttatgtaagtatgtcttatgaagtaaatgcaataatgatatggggagcataaatgctacataatttgaatttaaatgagagcaattggccaggcatggtggctcatgcctgtaataccagcactttgggaggccaaggtgggcagatcacctaaggtcaggagttcgagaccagcctggccaacgtggtgaaacccggtctctactgaaaatacaaaaattagccaggtgtggtggcagatgcctgtcatcccagctactagggaggctgaggcaggagaatggcttgaacccaggaggtggaggtcgcaatgagccgagattgtgccattgcactccagcctgggcaacaagagcaaaactccatctcaaaaataaataaataaaaataaataaatttgagcgataataaagggtggttatttgggctttgtatggaaagttacttattttcatacagctttctatacatacaaatttctgtcaataacaagattgaagaaacatagagtaataaatacaaccctctgcattctgcaattttcctaattcaaagttacattttcacatgctgaattgcatttattggctttatgtttaatactaagcttggcacatactatataccaaaaataattttaattttcaaattgttgattttttaagttgttgccaatgatttatctaatttgctcatgattctggatcaatcatttctgggttgtttcagcaaatcgttaagaacatatctaaattagagttatatattattatgtatagctgtatcatttactgaggaattactaacaatacttttcattttctagataaaattcaattgataggataattttctcttcctctggtaattatgccataaataagcatacttctaacatttattcctgtgaaagatggagagtattttttaataactacattcatgaatgtcactttctaattttcagagtttctggtctgtaaaaaaatgacaattagttttactaaaaataaaatgtgagaataaaaatgggtgaaaaaataaaatagagcacacaacatactcctatctgtgaaacttgtttttaaaacaaaaataaaataatgataatttcctcatagaaaaaaatggaaaattaggatttttaggtgaaaaattaaaagttaattttcttagaaaatattatttattctcgcggccaggcgcagtggctcacgcctgtaatcccagcactttgggaggctgaggtgggcggatcatgaggtcaggagatcgagaccatcctggctaacacggtgaaaccacgtctatactaaaaatacaaaaaattagtcaggcgtggtggcgggtgcctgtagtcgcagctactggggaggctgaggcaggagaatggtgtgaacccgggaggcggagcttacagtgagctgagatcgcgccaccgcactccagcctgggccacagagcgaggctccatctcaaaaaaataaataagtaaataaataaataaatacaataaaatattatttattctccattatgagcatgagtcttacagtatggcaatcacttgtatttatacagaatggacataaaaatgaatattttgaataaccaacttaatttgagagtaaattttgatataacttgtcatagttatgtaaattattttagggtagttgataattgtgttctatgaattaaattcaactatcatgcaacccagtcttaatttaccaacataaaaatgcttatagcatttgttagttaataaatatacttcatttgcatctacagctgtgcataaaatcactattcaggatgagtcacatatatttttaaatatctatcacaagtagttagtgcaaataacttaaaacaaaatatattttctgaattagagtctatgagaaattttagccacattaagtagaccaatttgggattaaataacaataacaacaatgataataataatttatccattgaatgatatttacaattggttttatagtagaacaactataagatacaattttcaatacacttctcattcttctaaacatatggagtacagaagttaaatatattctaggaattgtactaacagagtattttatatttcaatctcaaaaattaaaaatatttccccaaagctaaatatgataaattttcaataggcaaattgaatgaacatgtatttgctactaaattttaagaatataagaaacaaaatatataagaaaattcaggttatctgttacattgtaatgcttgtaatggatgtgacggataggattttggttagtttatcaacccctggctgtcttacttaaaggactgattcggaatataaaagtttaactacatgtgatgtgacttgagtattgctcccaagctacctttaactggactcaaggaagaagaaaccatattcaactaaaattgataaaagttcattttcaatgtagaataattcatttatcattcagtgttcttgaagcagtttaaggctttgtttaagtactaaaacagagtttgaagaccgagataattggccgggcatggtggctcatgcccgtaatgccagcactttgggaagctgaggtgggcagatcatgaggtcaggagttcgagaccagcctgacaagcatggtgaagccccgtctctactaaaactacaaaaattagctgggggtggtggtgtgcgcctgtaatcccagctattcaggaggctgaggcaggagagtctcttgaacccggaaggtggacgttgcagtgagctgaggtcgcgccaccacactccagcctgggcaacagagcgagattccatctcaaaaaaacaaaacaaaacaaacaaacaagcaaaaaaaaccaaaaatgaaataatttctctaatttcatttaatgcctgagagaatgattcttatgtataaatttttaaatggctacttatagacattgatacaattatactttattctgttcatcagtgtcctaaattgtcaagtaacagaattcactatctctagggtaaacagtaagggccacactaaagataatatcaaagactcttggggagcagaagaattagaaatggtggcaaagagctaggagcaacattagaaacacaacacagccaggaaggcaacgatatcactggaactgtataaatgaaacaactctgttgccactgttagcttgttgaccctgatgatgctgaggactagatggcagaatggtcaccacagcaaccccagggaggcccaggtgtgttctgcactggccagattagactaaatgctcactgcctcaggctgtttagtactgtatcttaatatcacatcaggacatttgatcagtgaaacaagtttctcagatattccaccttgaaaaagcaggattcataattgagcatctatcaaatgtaatgtacgtatttaaaaacgattaggtcacaaccaatggggatatgtactacatttcattaacatatattgaatactagttcaaatacttctaacattaattcctagagtattaatgtaacatgtcagtatggaaaaaaattccttcatgaaccctgaaattaaagagtctacagtttcagttttgtagtgttcctagttacagaagctagatttttatttttttacaggaaaatacattaggttttgggtacaacatagatcatattgttattcagttttcattctgttcttaatggattacaaaaatatgttcagtttagcaaatttttctttaaaaatgtggaatcatgcaaaactcatcaacaaagttgtaaatttacaagtattacttctatgatacaaagtagagtctactgactatttagaagtagccactgcattcatttaaactgagattctagcacttcatgcaattctgttaaaattcatagttgttttggccagccagttctctagactgaggcccatacttggacttcatcacaaatcattcataacttcagcagaacaagacaacaacacagaatagatctagttcaccttctaaattttccttttattttttggtaagtgaataatggaaaaattataggtttagtgactgattattaacaaagaacataaataaatgcaacatatgtagttttattaatttcatcagttttgactattcagagtgagtgtttctattcactttccaattaactcccagctttttcctaagaatgatatttcgggtagtgatttttctttttttttttttacttttcagagccctgaaaaaatagccattaacagttactttaactatcagtacaatgtataataaactagtcttattgaaatgcattagtttaaaacaatactgaaggagcaaaaatgtctatatttaaaacctcactccagataaacagacttctgttgtaataaaagttaagctagcttattttatgtttaaaaatatggattaaatcatgaacaggaaggaagtcacatatttgaaaatgaaatatacaaatgatgtgcttttttaagtggtagcaggaagaatatgccaaaaagttgtgtttaacccatttctcatgatacacttagaaaagttatttaactcacaaataaatgctgataatttgtttcaaaagcattttatgcatgacttgaagacactagggcttgtcaatatatattaattgtatagcaagttataaaatgaagcttcattgaattctattaggtcacatcaaaatacactcctaccagataaattcttccatttcgttttgtttctatggcatttgggaagctcagctgtgctcaagaaactctgttcctgtaaacaggttagatattaatgtcttctttattagtcttcaagagaagtaaatctgagaccttgcctactcagttaaaaaactacgaatcaaatcaaacaatttattcacaattgaccatttcggggaaaatcaaaccaagcaaaaggatcatttgaaatcaaataactaaacttgcaaactcagagtagaaatagcttgagttgaactcagccttaaaaatatttattttacttttttgttatgtacttgtatttgaccaagctaacctgataccatccttatatagttctgagcaaactggtatagatatccatttacttttttcagattttatcgtaatcatattgttttcggaatcctttaaaattatataaaaagcagcaacactttaattttgctgactttctcacttattaataagatccaacttatataatcagctgtctataccagtggttgacagaagtatggcattttcttcaataaagcaagaattatactggatggggaaaagttgaaagcttttcctctaagatctggcacaagacgaggatactcactgtctccacttctattcaacacagtcctggaagtaattaggcaagaagaataaacaaaaggcatccaaataggaaaaaaagaagttaagttatccctgtgtgccgatgacataatgttatagaacccctatttttatttttaaaaatgttatttgtatatatttaaggaatacaagtgtaattttattttagggcattcatcacctgaataatatgcattgtacacattaagtaatttctcatcatacaaccccctcccatgcctccacccttctgattccccattgtcaatcattccacactctactttcaaatgtacacattattttgctcccacatgtaagtgagaacatgcagtatttgtctttcagtgtctgaattgtttcacttaagataatggcctccggttccatccatgttgttgcaaaagacatgattttattccttttgtggctaaataatgttttattgtgtatatataccacattttcctcatccaatcaacttaagtaaattctatatatttgctattgtgaatagtgctgcagtaaacatatgagtgaggtatctttttaatataattatttcttttcatttgggtagatacccagttgtgagaatactatatcaaatggtagctctatttttaattcttagagaaatctccattctatttttcatagatgtactaatttacattgtcaccaaccgtatttaagcattgtcttttctccatatccttgccaacatgtggagatttttttgtttatttgttttttaataatagccattttgactggtgtaaaaaattccaccaaaaactgttagaaataataaacaaattcagtaaaattgcaggatacaaaatcaacatatcagtagcattcccatagcaatctatctgaaaaagaaatccagacctgaaactataaaaattctagaagataacattggaaaaacccttctagacattggcttaggcaaggatttcatgaccaagaacccaaaagcaaatgcagtaaaaacaaagataaatagctggggcctaatgaaactaaagagcttttgcagggcaaaaggaacagtcagcagagtaaacaaacagacaacacacagagcggtagaaaatcttcacaatctatacatctgacagaggactaatatccagaatctacaatgaacacaaacaaatcagtaagaaggaaacaaacaatcccatcaaaaagtgttctaaggatatgaatagacaattccctaaagaagatctacagatggccaacaaacatatgaaaaaatgctcaacatcactaatgatcagggaaatgcaaatcaaaaccacgatgtgataccaccttactcctgcaagaatggccataatcaaaaaatcaaaaaacggtagatgttggcatggatgtggtgatcagggaacacttctacactgctggtggggatgtagactagtatacaaccgctatggaaaacagtgtggagattccttaaataactaaaagtagaactaccatttgattcagcaatcccactaccagatatctacccagacaaaaataagttattatatgtaaaagatacttgcacacacaagtttacagcaacacaaagcgcaattgcaaaatcgtggaaccaacccaaaggcccatcaatcaacgagtggataaagagaaactgtggtataactgtggccacaaaaaggaagaaattaacagcatttgcagtgacctggatgagattggagactattattctaagtgaagtaactcaggaatggaaaaccaaacatcgtgtgttctcactgatatgtaggagataagctataagaacacaaaggcataagaataatacaatggactttggggacttggggagaagagttgggggaggcaagggataaaagactacaaatacggtgctgtgtatactgcttgggtgatgggtgcaccaaaatctcacaaatcaccactaaagaacttagtcatgcaatcaaataccacctgtaccccaataacttagggaaaataaaaaataaatttttaaaaaatcccatttacaatagctacaaaaaatacttaggaactggccgggcacggtggctcacgcctgtaatcccatcactttgggaggccgaggttggcggatcacctgaggtcaggagtttgaaaccagactgaccaacgtggtgaagccctgtctctactaaaaatacaaaaattagcctaatgtggaggcacacacctgtaatcccagctacctgggtggccgaggcatgagaatcgctggaatccaggaggcagaggttgcagtgagcagagatcatgacactgcactccagactgggcgacagagcaagactctgtcctctgtccacccgcccccacaaaaaaaggaataaatttaaccaaagaagtgaaagacctggaaactgtaagacattgatgaaagcaattgaagaagccacaaataaatggaaaggtattctgtgttcatgtattggaagaattaatattgttaaaattcctacactacccaaagctttctacagtcaatgcaatctttatcaaaacaccagtgacattttttacagaaattggaaccacaaaagagcttgaagacccaaaataatgttgagcaaaaagaacaaaactggtgtcatcacactacttgacaccaaaatatactacaaagctatggtaaccaaaacagatggtgctggcataaaaacagacacatagaccaatggaataaaacagaggccagaaataaatccacagaattatagccagctgattttcaacaatggtaccaggtatatccaatgcgaaaagaacaatcttctcaataaatggtgctggaaaaaatagatatccacatgcagaaaaaattagacccttatatcagaccatgtacaaaaattaactcataatggattaaaggcataaacgtaagacctgaaactataagactaccagaaggaaacataagggaagtctccatgactatgatctgggcaaaaattttctggatatgacctcaaaagcacaggaaacaaaaccaaatatagacaaatgggattacatcaaactcaaaaagttctgcacagtaaaggaaagaatcaacagagtgaagagaaaacctacagaatgggatgaaatatttgtacaccatacatcttataaggggttagtagccaaaatagatcagtaactcaaacaaataaatagcaagaaaacaaataacccaattaaaaatgagcaaaagatctgagcaggcatttctcaagagaagacattcacatagccaacaggaatacgaaaacatgttcagcatcattaaacatcaggtaaatgtaaataaatccacagtgagatatcaactcaaacctgttagaatgacatcaagaaggcaaaagataacaagtgttcctgagaaggtagagaaaagggaacccttgcacaccgttggtgggaatgtgaattaatataaccattattgaaaacagtaggggctttctcaaaaaaattaaaactagaactaacatatgatccagcagtcccactactggctatataccgaaaggaaatgaaatcaacacgttgaagagatatctgcacacccaagtttattgcagcacattcacaattgctgagatatggaatcaacctaagggtccatcaactggtgaatgaataaaagaaaaaatgtggtatacgtacacaatagaatactgttcatccatgaagagaatgaaacctgccatttgcagcaacatgaatgaacctggaggatattaagttaaataagccaggcagagaaagaaaaaataccacgttatcttactttatgcggaatctgaaaaggttgattttaaagtagagaataaaatgttggttaccagaaggtgaggtagttaagagagagggaggattatgaagataacggttaaataatacatatttacagttagatatgagaaataaaatcaagagatctattgtacaatatggtgactatagttaatgatgatacggattgagtattccttatccaaaatgcttgggacctgaagtgtttcagatttgggattttatggaatgcttacatatacataataaggtatcttgggcatgggacccaagactaaacacaaattcacttatgttttcctgcactttatacacgtaactttgaggtaattttatacagtatttttagcagttttgtgcttgaaaaaaagtttgcattaaatacttatatgtccaattttccacgtatgacatcatttcagtgctcaaaaagtttcagattttggagcatttcagagtgtgtatttttggattagggatgctcaacctaatttttttcaaatgaaaaatactaagagagtggatgttaaatgataacatgtgagggaatgcatttgttaattagctagatttaaccatatcacaatgtatatgtacttcaaaccatcatgttgaacacaataaatacatacaattctctatgttcatttaaaaaataagcttgaaaacaagaattttacaagtttgattttgattctggatttttttaacttagatgcagacatattatctgatcagggcgaacagaatttagcaaatcattataaaatctttttgaaagtaataaaggaataagtaaaggtattgccctccttttttttccttaggaaatgtttagattggtccttagctttgtttcttgttacacctgtagaatatagctgttgcatacataactgtgtctaaataatctggggttcttgttaaattttagagtctgtttcagtaggtttggaatgtgcctgacattcgacatttttttttttttttttttttttttttggagacagagtcttgctctgtcacccaggctggagttcagtggtggctggagtgcagtggtgggatctcggctcactgcaacctccacctccggggttcaagtgattctcctgcctcagcccccagagtagctgggattacaggcgcccaccaccacacccagctaatttttgtatttttagtagagacggtgtttcaccatgttggccaggctggtctcgaactcctgacctcaagtgatctaaccccctcagcctcccaaagttctgggattacaagtgtgagccaccacacccggccagtattcaacatcttacttaacaagctcatatataacggcgatgctgttaattggtaagtagcaagggtgcatgcaggcaaagttttctcagtattgatggaagccctcacttaaacctagatagcatttaataatttgggttattggtgtcctatcctttacttagcagatttttaacatgtcatctggtaaccatggtaaagattatgatactaaaagcatatgttttagggtttaacgtcacaggactttaaaatctcggttatagctttggacaaaaaacttactaaatctcagttttcttatctgcaaaatgtgaataattctacttacacaatactgtgttaatggtttattcaatcacaaaaagcatctaaaatgccccacaattatcatgtgaatttagaaatactagattccttctacacatctacacacagacacacacattaacacacacacacatacacacacaaacaggggggagagagggtgctgtataaggaatccacaagatatgcaaaatgaatctggtatttctaaatatgcatgatatttgtggggcagtttagatgcttcttgtgttttaataaaccatcaacccagtattatgtaggtattatcacttgtgtgtgtgtgaatattcagacacatcttttttcaacatcttcaatgctggagcattgtgtgagctagaacccagctaagagagggaggtcttcaaagttgtaaaacatatgtgctcaagtgagtacaggcatcaaaatgaattcaagagtaccctttaaaatgctgcatgtcatatacctggttatggcttttgggaaaaattctaatttagatccctttccaagtggcacaccatagtgctttgcaaatgatagactcaagaaggaataaatgtattccggctgaaagttttgtcatgggacaattttatgttacataaatggaaattcatttggaagtgacagggaggttaattttaaatcaattcaaaagctatgaatcccttttggcaactattatgtttagtttaaaagaactctgtaggcttattatagataccatgttaagcttttgttgtgcacgtatatgggtgtgtagttcacattctcagtttttattactaaatttttcaatacaaaaattaattcattttaattgacaatcaagtacaagatatatcaaaatcgagcaatacatattttcattttgtatgaaatgtgatgtatatcgtgaaaaaattttaaatgagaacagtaaggttttctatatttttaatatatccgtgcccacttcacaaatagaaatgaaatgccataatcttcatgtatgagaaatattaagttcattcctatattcagttgctattgcccagtggtatgaaagtcctacctcaaaaaggtgtagccaaagaaagataactggcggggcactgtggctcgtgcctgtaatcccagcattttgggaagccaaggtgagtggatcacttgaggtcaggagttcaagtccagcctgaccaacatggtgaaactctgtctctactaaaaaaatacaaaattagccgggcgtggtggcacacgcctgtaatctcagctacttgggaggctgaggcagaagaatcgcttgaacctggaaggcacaggttgcagtgagccgagatcgcgccattgtactccagcctgggcaacaagagtgaaactccatttcaaaaaaaaaagagagaaagaaaaagaaagagggagggagggagggaaggaagggaggaagggagggaaggagggaggaaggggagggagggagggaggaaaccaatggcgtgcgttttatattatttggaaaccttatatttgactcctctaaaattcagaaatggttttatattgtacaaccgtttccctcaaatatttggtaatggggctgacatagtctatccttacttcaaagtagtctgggtttttgctcgctggatgcatgaacatgttgagatatttaatcactacttcttgtgtcacacttccctctgtcacagttggatggggaatgagctgataaaatatacataattaatagataaggtacattgaataatattacaaatacatgtaactggaagaacaataacactaccacccggtccttccccactagcctcaccatttgggagtttttgctaggagagaaaagtggttaatcctcactagcttctcacctcagagattacagatcattctgccctggtgtttgataaggcctccaaaataaagcaaaaagcttctgccagctttttgtgtaggcaaagtgtagtcatctttgtggtaggtggttctgtaaaggacctgctatttacgcctctgttccccaccacaccccacacccaggaaacaacttgaaagaggaaggagagtccggacgcggtggctcacacctgtaatcccagaagtttgggaggccaagttgggtgggtcacttgagatcaggagttcaagaccagcctggccaacatggtgaaaccccatctgtactaaaaatacaacaattagctgggtgtggtggtgcatgcctgtaatcccagctacttgagaggctgaggcaggagaatcactagaacctggaaggctgaggttgcagtgagccgagatcgcgccattgcactccagcctaggtgacaagagggaaactttgtcaaaaaaaaagaaaaaaaaaaaggaaggagaagccaaatattggcactcgttttgcttaatactataacggacaggcgcagtggctcacacctgtaatcccagcactttgggaggccgaggcgggcggatcacgaggtcatgagatcgagaccatcctggctaacaaggtgaaaccccatctctactaaaaatacaaaaaaattagccgggcgtggtggcaggtgcctgtggtcccagctactcaggaggcagaggcaggagaatggcatgaacccgggaggcggagcttgcagtgagccgagatcgcgccactgcactccagcctggacgactgagccagattccgtctcataaaaaaaaaaaaaaataataataataataataatataagttggccagcttggcaagttttgcaaactttggaaaatgtttctcttcctcactatgaattagattaggctgtccttgctaattaatggggacccatgggagatggcgctaatctgggaggagcagattatattctaagggtacaggctcttggatcaggctatctgggattaaatctaccattgactagctgtgtgaccttgagcaaccttgaggttgctaggtgtgtatcacctctgagactcgattgtgacatctataaaatgttgataaaataagtccctaaatgattaaactgttgtgaaaactatattgctgtatgtcattgaatctaagaaataataaattgcaagatagaccattgttgtgtgtaggactaacaaattaaaaaacaggatacccctaaacgctatacactaatgattttaagacatattgattttagaaatgttaaaatgtgaaatgtcatctcagaatcaattaaatacagtagttaattctgatgagttgcttagatcaatacttggcatatagtaaatgatcaatgtttcctattatggggtggaatttccctgaaggaaggcagtcatttctagcttgaaaatggaggccttttagaaaggaagcccatagccttcaataggaaagagtaagaataggaactggtgcgtgctcacaaaaaacgttgtgtaggggttaattttttcctgcttttctgctacacaacacaagaccaagccattgttagtatagagtttggcctttctccatcccttaacgtaattctcttagttacccccaatcccaaccctccagtaaaggccagtattcctacagaactctctgatggagttgtggggactataagggtgagtagtaacaggaggagagcctgttccatgtttggtgtggggctgaagcccatgctgaggggcagcagcacactaggaagagccattgtccagtaaatggacaattgtccagtaaatccatgtggtgacaagcttagcgaacagtggcctgggcgaaagaatcactgagagtggccaggagggatctaaacccagagaagtgattacccaatagacttctgacttaggagtaaatgtgagaagcaaaatctcttttcccagaattttacaaaaaatcgactcttggaatggcagcggtggctaatacttaggtcacgtagatgataaaattataagacaatatacataatctagactgctgttcattgaatcatgtcagtgtgtttgccacatttcttctaaaagaacatttttcatattttatcatttctgcaatcagtagtagtaataataatatctaacacatacaacttagtatgttctgggtggtattctaagtgcattgtcgatattaagtcatttgtaactcagtgagttagcaacagttgttatccctcatttaacaattggggaaactgaggtgtgaaaaattttcttctccaaggtgtcacacattcacaaatacacacagacacacacacacatagacgcacacacaaacacacacacacacccatctattaagtggtagaggttggcagcatgatcctaaccgttgcatgctcatactattttacaagaccatatgatctaaaatctattggtagcttagaatttatgtaccgctaaatatgtacatctattgtgtactcacaaaaattaaaaataaaaaaataatttaggatatctgttatggtggttaaattgtgcctgcagtgcaattccaatctaccttcctgcgtcctgggaactctgaggaccggtatagagcaatgacaggaagcaagggctctggcttcatatctgcattggaatccaagctctgacacaagctaagcaagcttgagaaactttttaaaagttaaacattttattttcaaagagttgtagagttaagaacagttgtaaaaaataatataaaagatcctatgtgaaatatcctgtgtggcttttgctcggttatccccaattgtaatatcttgcaaattatattcaaacattataatgaggattttgttacaattaacctctctaattcagattttcccagttttacctatactcatgtgtgtgtatatatttagttaaatgcaatttttacacatgtagattagtgcgtccaccacgacagtcaaaatacggatgttacatgaccacaaagatctctcctgttgacctttaataaaatcatcaagcttcctcttgtcaccctgtcccatgcctaacatgtggcaaccattaatctgttcttcatgtctataattttgtcatttcaagaatattatgcaaatagaattgtatggtatttaatcctttcgaactagcttttttcagccagcataattgcttaatgatccatctaaattgttgcatattgcaatagtttgttactttttattactaatatatgttgctgatttatttatggttgtggacatcctacagtttcaccattcactgactgagagatattgttgtttacagtgtggggctgttactaataaaattgctgtgaaccctaatgtacaggatttgtgtgaacataagtcttcatttctctgggataaatgcccaggagtgcactttttggactataatggtagtctcatatgtcgtattgatgttgtcgtttatttttaaatttctttttcattgacaattaatatttgtttgtatttataggttacaatatggtgctttgatatatgcttacaatgcagagtgattaaatcaggttaatgaatctgttacctcatattttttttgtggtgaaaatattaaaatccactatttcagcaattttgaaatatatgatgcattatgatatattatagtcaccatcatgtacaatagatcactaaagcttcttcctcctacctaactaaaaattcgtaccctttgatcaacatctttcttttcccggtaggacccttccgccatttctgtggtaatcttcattctaatctgtatttctatgagttcaacttttttagattctgtccatcatcagatgaataaataattaaaatgcagcctccacctgctgggtttaagcgattctcatgcctcagtctcttgagtagctgggactgcaggcgcccgccaccatgctcggctaattttttgtatttttagtagagaaggggtttcaacatgttgaccatgctggtctcaaactcctgacctcaagtgatctgcccctctcggcctcccaaagtgctaggattacaggtgtgagactccgcacctggctcctttagcttttaagaagagaaagaattgaaattatgattacaaccaagtgaagttgaacttgaactcctaattagaggatggttctgatgttaatttacgtaaaggaattgtgatttttgtttttctgctcccactccaatccgttttttcccacacagaatattcccaactcttccttcttgaacctttgtaacattactggcattcgtttctcttatccataagctctaatcatccaatgtttcttcttgctgttattatattgaacaaatatttattagatcaatcaggaataggaagaatagataattttgttttactttcattttttccttctctaatgtacttcctttctttatgtagatctaagtttctgacttacatcattttctttttctctgaagtccttcttttgacatttcttgcaaggcagatctactggcagcaaattccctcagcgtgtttgtctgataaagtattcatttctcttttacttttgaaggataatttcaccaatacagcattttaggttggtggatttattttttctctctaaattttaaatatttcagtacactcttttcttgctggcttggcccaatccattttatgctcttttttgttctgctctgtcactgtgaagctgacccctataaattgcatttccttagctcccttgccgagtagtctcctgttggttttggccaatggaaggcataaacataagacagaaaggcagaaagagagcagatctgggacattccttttacattgacctccactctctttgtgccttatttcccaccatggcagcttatatctctaactatcctgttaagaatctcctctatggctctatctcttactggatttagaaaatcctacttccttcacttgactcttcaggcatggtaaggctgggaaaggtatatcacaattgcctactggaggttgtctctaggtgcctcgatagccccttttggtttctttaagcccattcacacctctgaaagtagttcctttgtactgttttattgaaccatccatgttgaattctatttcttgccagggacatggctgataaagggagataagaaaaatcagtaacttctccctttgaagtaacaaagtataagatgaaagtaaatgaaactcatagttactttaagaaaatgcgtttgtgtatatataaacaatttctacttttcatgactctatctggtggtttttagtataaaatactcactagaacgtgagattaaagtttgccactccatactgatttgcatatggactgttcgctcaagaagtaagggttgaagaaattggaacgacttatcatttaaatcaggaatcatatgacaattcaactggtgacaatgtgccctactttctaagagcccaagttgtacatatgattgcttgtgtatgtatgtgtaagtcactccacgcacatatgcacgtcacccttgagttctgagtttacaaaactaaactaaattcagttactaaaaatatcaaatttgtgtaattttcatgtatttctatgcaagcacatcattactgaaaggccctattatactgttgcaaaatactcatgaagtaccaaggtgcctgattccaactgttatttatttttttttttttttggctattatgttcctaacatagcacataaactagctcattttctcatggtacttaactaaggatacttttttaaaatctagagtattacagggtctttgcatacctacctcttaaactgatttgttttggattctggaaaacttagcacgttggttaagtggctgtgaagaaattttgatgtatacgtccacctcacatagacctaatagctatgtgtttggctagtattttgtggaaacaaataattaagagcaagaaaagttggatttccttaagaacactgaatcgcatagagattgggtaattactggagacaaaaaggcctgtcaataaaggtcagatatatgcaactccctccttttgctgaaaatctattattccatgttgaattagatattaaaagaatattatactttccaataattatattgttataatgcaggggatatatttctcaccaatgactctacatccacaatgtatgatgaaataaaatatatatttatttttaaaaatgcctttagggttttaagatacttaagaattcatttcttgttcacttttaaatttagtgctcttagttctaagagtttgtcatctgttttatgatacaggttaatactgcaatataagcaaggaccagtcttcattttacaacatgtatcataaaactgtaggctaaagaaaagtaattaaaaaacactctgatgcatgactttaatgtaattaaaatatattttgcattcatgaaaaattacaggtctctatcaatccctctataaacaattataatcttattacttaaaattatttcaacatcatacacatatggtgtatatttagctatagtcgtttaggtttttaaaatctgctttcttttctaaatcataattttagaccttttgctatgttcgcaatctttgtgtaatcacatgcatagcagacaatagcacattgtaagtatattagaaatatgaaaacacagtctaatctcaatgcaaaacactgttgaaaaacacagcatgataaaaaattaacttataaatggagagatatactctgctaatggattggaatactcaacatggtaaagatgtcaattatctccaaattaatctatagttttaatgccatttctactaaaataccagcaaggtctttttagtagacttggatcagcttattctaaatttatacggaaaagtacaagcctgataatagctaatacaatcttgacaaagaagaataaagtggaaagaatcactccactaaatattaaggcttattatgtagctacagtaatcaagacagtgtggaattgggggagagatagacgcatagttcaatgcaatagaatagagattccagaaatagacccgcacaaatatgtgcaaactcattttttaaaaagttgtgaaagcaattccaaggaggaattttaacagcctttccatttctatagccttttcaacaaatagtgtgcgttttttctaagtgagtggtgtttgagcaagtagacatctaaaggcaaaacaaacaaagcccacccataaatatataagtaaataaatagagcctcaacttaagtcttatgcaaaattatctcaaatgtcaaatataaaacataaaactacaaatattttagaaaaacatatgggagaaaattttgtgactgaggcaaagactttttacactttacacaaatagcacaatccataaaaaagaaaaactgataaattggacttcgttaaaattaaaacttttgatctgaaaaggatcctcttaagaagtgaaatacaaggtacagaatgggagaaaatatttgcatatcagttgcaaaaacagggactatatacgaagaacttagaaaactcaaaagcaaaaatccaaaaataaattaattaggaaatgagccaaaggcacgaagagacattttactgaatagtatatataaatgacaaacatatggaaaagatattaaatatcactagacatcaagcaaatataaattgaaaccacagtgagataaaactacacatttttcagagtgtctgaaataaaaaatagtgacactaccaccaaataactagcaaaaatgtggagaaatgggatcactcgtacattactgaaaagaatatcagtctggaaaatagtttggcagtttgttaaaaataaacaaacactgtgtatgtttaccactccagcctgggcaacagagtgagaccctgtctcaaaaaaaaaaaaagctgaagaaaaatttttttaaatggggaatataggtggaagtgagagcctgatagcctaatatactttatcttttctaatgtatttaactgctgctcttatcattgcttctatttaaaaatgtattatatttttgctaaccaaccttctaggagccaattgtactctcagatttccccgttttcatactgaggttttatcgaagtagcccttctccaagtccctcccctttttattttaaatatagagattttaaactatttctaatcttactctcttctccaagttcctgaaggtattacctcagaatatgaaaacccttaaatgtacctcatttgctaacgtggagagagagacatgtaccttggaagataatttgtgatggaaaaagcatatgcctacacacacacacacacacacacacacacacacacttaaacttgggttcaataacatattaaacttgggttcaataacatcatacttctcaatattccaaataaagttaactctaaagattcaccataagattttcaatattttaaaaatgtttaaggaaatataaatgctttaggttgtttaggttgtttagacatctattaaacccagaatatactttaagcactaatctttaatatactatagattaaaagctatctttcaaataaccagacttcacaatgtttaaacattttataaaactgaacagaattttgagacataaaccaatataaaactttttttatcctcctctaaattcaatccatttgtgaaacctcatttaaattcgaatcaaatattttctctgatttccattaacaggctctgactctcaggcttcagtgagtaagtatattcattgtggggctcagaaaattttgaaccaaattataaatggtgtttatttgtgttttctttccatttctttttaaggcattctgtagtgaggtattcaaaacaggatgccactcaaagactctctctctctctctctctctctttaaaaactattagagaaaatagcatgtgcagcttcatctgctacataaatcctctcaaagcttctctcctttccagatgatttgagttgtcaggaagcaaatgaagcttaagcttttgggcccctttatttcatagaagtcttcaaaaatatgtgcagaactttcatataatcacgtgctcgaaaaatatgcacaactaagaatagcctcgagctttaggcaccgcaatcgttggatcttctgttcttatcaattcttaccaattgtttcttaggatgacacattaaaccttcagaaaaaccttatcaggatgaaaacttagccttgccatggaaaaaaatggtggttttaagaacagagtaaaaaaataattctaacagggaggggatttttttcttttgcttttttaaagaaagaaattaggaaaggattttaatttgagcctacaagtttgctgaagttgcactctaaaatgtcatccacatagatttatattgttttctttactctttcttgtgtagtaataacttggtctaggctttcaataaataaacttatgaaacagttttgagtattaacaataacacaatggcactgagagcctgtttttacaagactctaaatattttatttaaacgatacccagaattctgatttgcatatttaaaattttcctgaattagataattcttttaagtgtgttacgttatataatctagttgcagtatccttttaacaaaaaaaagcaagtgcaacagtgttaaacatgacattgatgccacctaatctccatcaggcttcacaatgtagttttatcttatatttatttgtatgcacgaatgtcagtgtcgtatggcaggagtctgtaaactttggctcataggctaaacccagcccactgtcttttaaaaaaaaaagatagatagataactgtaaattcacatgcagttgtaagaaataatacagaaagatcctgtgtgccattttacccagtccctccttaaggtaaagtcacagaactatagaacaatattacaacaagatattgacatcagcacagataaaatacaggatatttccatcaccacaaggatcactcatgttgccctttcatggtcagacccacttttttcctgccctcaggcactccttaatctctagcaactactaatatgatctctatttgtataattttatcatctcaaaagtgttatgtaaatgaaaccctgtattatgtagctatttaggactagccttgttcactcagcataattctctggagattcttccagatttgtaatgtgcatcaacaatgtgttcctttgtactgctgagtagtattccatggtatgaatatgccagtttgattaaccatttgcctgttgaaggacatctgggttgtttccagtttctgcctattacaaatacagctgctatgaagactcatgtacagtttttttatgagcaaattttcatttatctgggattaatgccatggaatgaaatttctgggctgtaggttagttgtatgtttagttttttacaatgcaccaaacttttacagagtacctttaccatctcatgtttccaccaacaatgtgtaagtgatctcatttctctgcattcttgccagtgtttgatgttgtcactattttttaacttagccattctaatatgcacagagttatatcgtattgaggttttaattcgaatttccctaagagccaatgatgctgaacatcttttcacaagcttatccgccatctatgtgttgtctttggtgaaatgtctccatgtcttttgcccatttttctaatggatttttttgtgtctattttgtttttacttttgggttacatgaattcttcatttagtctagatactagtgcatggtcagatatatggtttgcaggtatttttctcgatgtgcagcctgtctcttcatcctcttggcagcatctttctcagagcaaaattttaaaattttgtatgtcaaatttatcaaattgtgtcttttaaggcacacgattttaacgtcaaatctaagaactcctcctagcctttcatcctgaagactctcctgtatgtttttgtaaaatatttattattttgtgtttcacatttaaattcatcatctatttgcattttattttgcataaggtgtaaagttatgtcaaggttctttttcttcttttttctttccattatttttgtccacttgttctaagacccatgtgttgaaaagactatctttgctccactgaattattttgcactgtgtcaaaatcagttgagcaatttgtgtgggtctatttctgaagtctctattctgttccattaatctgcgtgtctatcccaacaccaacaccacactatcttgattactgtagctatttaataagtcttcagtctggtagacttattcctcttacttcattcttccttttcaacattgttttagctattctaaatccattgccttttcacataaattttagagtgccttttcacataaatttttcctacacctaaattccaaaaatattgctgagattttgataaaaattgtgtaaactgtgtaacagtttgggtaaaattgacattactgtgttgaatctctcaatccacgagcacaatatatttcttcattaatttagatgttctatgatttacttctaaaacttttttttgctttcaccatgtaagtacatggcttgttagatttatatttaatttttgtgacatagtaaaatatactatattttaaatttccatgtccatatgttcattattaattcacagaatgcaagtgattgttaatagactttatttttggagaacctttaggttcacagcaaaattgaaagacagagatttcccatctacccattgtgcccgcacgagcatggcctctgtcattattaataactctcaccagagtggtacattcgttacaataaatgaacctacgtcaacacatcattataactcagatccataggttccattagagtttactcttgttgttgtgttttctgtgtgtttggacaaatttatagtgatgtgtatctactatgataatatcatacagagtagtttcactgacctaaaatatttgtgctctgcctagtcatgcctccctgccaactaacccctggcaaccactgatatttttactatcttcataattttacctttcctggatgtcatatagttggaatcctacagtatatagaagcattttcagattggcttccttcagttagaaacaggcatttaagtttccttagtgtattttcatgtcttgatagctcatttctttttagcatctatagtctgaatgtaccagtttatttatccattcacctactgaagaacatcttgttgtttccaagttcaggcaattatgaataaagctgctataaacatccatctgcaggtttttgtgcggacataagttttcagcttatttgggtaaataccaaagagtctaattacttgatcatatagcaagagtatgtttagttttgtaaaaaatccttaaactgattttcagtggttgtacaagtttacattctcacaagcaatgaacaagagttcctattactccatatcctcaccagcattgggtggtgtcactgttctgagtgttgaccattctaagaggtatgtagtagcatcacattgttgttttaatttgcaatttcctgatgacatatgatgtgaagcgtcttttcatacgcctgttttccatctgtatatcttctttggtgagttatctgttaaggtgttttgcccatttttaaaatagagttgtttgttttcttattgttgatttttaacagttctttgtatattttggataacagtccattacctgatatgtcttttgcaaatattctctcctattctgtggcttgtctttacattcttttgacaatgtcttttgcagcatagaatttttcaatattaatgaagtcctgcttatcaattatttcttgcataggtcatgtctttggtgttatatctaaaaagtcatcaccagacccatatagattttctcctatgttatcttctgtgggctttatagttttgcattttacatttaagtttctgatccattttgagttaatgtttgtgaaaggtgtttgcatgtggatgcccagttgttccagcaccatttattgaaaaggttgtctttgctccgttatcaaacatcagtcagttgactatatttatgtgggtttattcctgggctctctattctgttccattgatctcttcttttgccaataagacactgtcttgattaccgaagtcttgaagtagagcagtctcaatcttctgactttgtgcttgtccttcaatattgtttttgtttgtttgtttgtttgtttgagatggagtctccctctctctgtcacccaggctggagtgcaatggcatgatctcggctcactgcaatctccgcctcctgggttcaagcgattctttcatttcagcctctcaagtagctgggattacaggcgtgtgccaccactcccagctaatttttgttgtttttagtacagacggggcttcatgatgttggccaggctggtctcatactcctgacctcaagtgatctgcccaccttggcctcccaaagtgctgggattacaggtgtgagccaccacgcccagcccttcaatgttgttttggctattcaaggtttcttgcctttccatatcatttttagaatctctttgttaatatctgcaaagtaactactgagattttgattgggattacattgagtctatagatcaatttgagaataactgacataataaaaatattgagccttcccatccatgaatatggattatcttctatgatttctttcatcagagggttgcagttttcctcatatagatatggtatgtattttgctagttttagatctaagaatttcatttgtgggaggtgctaatgtaaatggttacaatcaatttttgtatatttatcttgcatcctgctaccttgatgaattcacttatcaataatttctaggagattatttatagatagcttgaaaattttattttcatgccatctacatataagggacaattttatgtcttcctttcccatctgtatggattgatttaattgtcttgcctcattgcactggctagaacttgtagcagtacgtgaataagagtggtgagcgtgtgcattcacgccttgttcacaatattaaggggaaagcatttaatacttcactattaagtatgaagttagctgtaggtttatgtagatgttgtttattaagttgaggaaattctcctttagtcctatttttcagacaggttgtttcaagattagatatatcagtttgtcaaatgcttttagtacatttactgataacatcgtgtgatttttcctctatgacctgttaatatggtagattgtagtgactaattttcaaatatcaagccagatttacatcctggaaataaaccccaagtgatccattagtacattgctgaattttatgtgctgaaattgtattaataaattttccattaatatttgtaaggaatatggatttatagttttcttcttttgtactgtttttctggtttgggtatcaggctattgctggactcaacacatatactcagaattgttttcttcccttccatgttctggaaaagaatgtgtagaattggtgttaattcttcacaagattggcatacttttccaatgcagttatagaagtttgcttttgtagaagtttttaaattatgagttatatttccttaacagttatactcattatctagtatatccaaattactattaaatagccaaagtctaggccattcaaattatccattttatattcattgatttacagtagtttgtgccttttgaagaatcaatctatttcatctaaattattaaatacttatgtgaagaattgttcatagtaaacccttactgtctttttttttctttgtattttccaggcctgtagtaatattccctacttcatttctgatacgggtaacttgtgtcctctcaattttttctttgtcacttttagcacattgtcaattttattgaccgttttgaaaaaatagctctttgttaatgaatcttctttactgtttttctgtttttattttgattagtttttactctttattattttcttcttgagatgagaactttgattattgatctgagacttttcatcttgtctagtgtatgcgtttgggagcagctttttaaaacgcaatgcttaatttaacctaaatgacaatattttatagtaggcagtgcatacggtgttatctttaaaacctggtcttgctattaggtacctctctgagacgaaagtcttcaagcttattgaagtttatcaattagcaggtcgattaaaatgtcaacttttcttttaatatacccaaggtataatctatttgagggcagggacctgaagttgttagctcatatctttaatgcagaaaatctggccctaataaatgtttcataaataaatacacatttattccacggcccagttccattgttttaaatgagaatttgtcactatggtcatcccatagtaccaaggttcataatttcttttagcatacactctcaaagagatttggtttgctactctcaaacattcaaagtttattttaaattttatgatgatctggatcataaatttctttatttccctctcttgcctgtttccttttttccaactgatatcactaaactcctattacacccaatgtgcttttgagagctaaagttatcaacataatataaatagcaattaattcttaatatcaagaagtttacagctgagtagtaaagatgcattcatattgttagacccatctatgagtgggagtgaggagaagctaaaaaaaataatcttcataaagtaaatttaaacaaagcccagaagaatgagggagcatataatacacaaaggatataatacaaagaaattgcaagtggagacaattttattcacacaacaaaatgacaagcaatagtgataaagcaactaaaaaggaagacacaactgttttgatggagcttgccttccatcaggtaagaaacaccttaaacatacacccaatttatttatcacacatgcaaaaagggagtaaagctgcatgctcagaaaacatgtatgatgaattttttaaataatctgagatataatagtaggaaagcacataacataactcaaggaagttcagagatgtagggttgaaaatgaaggcaaaggctacattgcgtaggatctattcatccttgatcatattttctacaaggtatcacactagtactgagtatccatccaagactgaaatggtaggggtgagcctgcttgctaaaaattcttcagttgtattagtggcagtggctccactcctcgctaccacacccattttgcaattctctgccctgttttttgccctggaaagcttgtctcttcatttgtatcaccaacgcctcttgtgcactaacttttaggaaattatgtgacaccagctggacatcagagggcaagggaaaaaaaggtttggatatttgtgttccacttcacatatgcctcactaaggtcctggtagtgactgcccttttctattgctattccaacattattcctttaccttgacatattaggcctggaggtagaaacaaattacctctcttgctgcttgctaggtgactcaccatcccttatttgttctcatcagcctgcctatatgtttgtccatagttctttcaccgaattattatctgttaaatgcttttgaatctgctacctatatttcctaccaggatcttcactaataccccataagagatacaactattaaaacatgttactgattctcagctcactagcatcaatgcatttactatctttgtactcataatacctttcttacattcagaaatctttaaaaatcttcattaatccctgtacatttacctcataaaacagttgggaatcaatccacaaagtgaggagtcattattttcacaacacaggcaaattagttttgagttttgcttatatttggtaagcaaatgttttctttcttgactctatagatagtactgatatgtagtaccaagtcctgaaatcacatcgttatgtgaatgccatgggcttcattgtctatggaaatgtgagttaaagctctttttttttttttgtccagtggaaaaaaaaatctgaacatttaaaaatgaactcacaaggttccagatatctacttactaattttaaagggaattaagatggtgtcaagtaaaatttatttacagaacacacacacacacacacacacacacacacacacacacacacacacacaataatctctaaagtatcaaccatagatggagtggggaaccaggaccttcactcccacctggcaataaggcagcacacttctacctctatcttccaccagaacagtcagaaggggacgagctaaaatagatttaaataagatccagagtctgataatgtaatatcccaaatgccaaaaaagaaaatctcaactggaatgcaaaaagatagtagtcacttatactgacatgacaaagatgacagaattatctagcaaggatattaaagtagccatcccgaaaattgttgagtaagctttttaaaacattttgcaacaaataaaaaatgggaaaagtcagaaagaaatagaagacatagaacgacatgacattttagaactaaaaatatcgtaatcaaaaaaaagttcaataaatggtctcaacagtagaatggaggtgaggagacaggggaaatctgtgtgcagaaagataggacaatagaaattacacagtcgtaacaagaaggaaaaaaacgatttttaaaatgaaaatattctcagttgtcctatgggattataataaaagatctacggtttatgccatcagagtttcaaaaagggagggtgttgttgaacaagtactcaagcacataatgattgaaaaataccaaattttgtaaaatgcaaaaccctacagattcaaggagctgagtatacaggataaacccaaagaaactcatgcttagacgcatcatagtcaaatgtctgaaaactagttatattttttttttaaaaaaagtcttaaaaacagtgaaagagaaaaagacactttatctataggcaaaaaagttcaaatggcagaggatttcttatgtgaaaccatgaaagcccgaaggaagaagtatgacatttttcaagtgatgaaaggagagaactgtcaacttccagaaaatagaagaggaggcaacacttccaaatgtactttatgaggaagaagtattttgataataaaaccaggtaagcacagtagaagagtcaacaaattacagaccaataaaactcatggatatagagacaaaaagccttaacaaatttttacacattatattaagaagctaaagaagaataatcacttgatcatatcaattgatggaggggaaaaaacgtttgacaaaattcagtgccccatttatgataaaagctctcagaaaactaacaatggaggagaacgtcctcaacttggaaaagaataactacagaaatcttatagctaacattgtaataataatgaaagaatttacacctttcttcctaatattaggattaaggcaaagacggttgctttcagccctactattattcatagtactggaagttctagctagtgtaaaaatgcaagaaaagtggataaaagcgtacaaatcaggaaggaaaagttatactgtctccatttgcagatgttatgatgatctatgtaaaatcccaggtattctacaaagttactcttagaaatgatgagtttgttaaggtcttaggatacaagatcaacttataaaagtcaattgctaatcaatgaatatgaagtttcatttatataagatgaataagttctagagatctgctgtacaacatcgtatctatatgtaacaatacagcattataatttaagaatctgttcgttgggtagatctcatattaaatcttatcacagtaaaatgattattaaaaattaattgtatttttgtatacaagcaattaactactgaaacccaaaatttttcacatagtatcttgcagtcactctgaaacaatgaaatacttatgaatctaataaaacatttaccagatctatatactacaaactaaaaagctaaggaaataatgcaaagacttaaataaacggagatatatactgtattaatggaattggaggatacaacatagtaaatatatcaattcttccaaaactaatctatagtttgaatgcaattcctatcaaaacatcagtgaaacatttttgtctatttggacaccctccaaattgcttgaattctatttgtcttattttttctggtcctagtgcctataaactcactcacaaactagcatattttcccattggacttaactaaagagattttttaaacacctaagaaatatatgccttataatatgggtaacatttcaaccaatatggatcactgtggaaaaaggaagtagaaatgatccataatgattttttccctaatcaataaatttgtgaattttatataagtatattacctaataagcctgtttctcttcaacttatttgtcctgtgaagctgcattaatcataatgcttggaattatattaaataatcaaacaagttgggaaaatgaccctgcacttccaaagtaatataaaataatgcctttagggtttccaattatttaagaattaactccttgttcactttacgtttaccatattcagttctttctaattaatatgccatctatttaataacacaaggatgactggttaatattggaatataatcatgggccagtcttcattttacaacatgtatcatctaagtgtagacaaaaaaaagtaatttaaaaaaatgtgtatgagttcactgtaataaaaattatgctttatatttttgaaaaatgtatgtctaattaattcatctgtaaacaattgtaatttcattaaaattttaacaaaataatttcaactttcattttgaatcgggggtacatgttcaggagtttgttacaagggcatattgtgtgatgtggaggtttggggtactgatgatccagtcacccaggtagtgagcattgtacccagtaggtagtttttcagctcacacccgcttccctccattccccctctagtagtccccagtatctcttgttcccatctttatgtccactgtgtactcagtgttttgctcccatttataagtgagaacatgcggtatttggttttctgttcctgtgttaatttgcataggataatggcctccagctgcattcatcttgctgcaaagtacatgatttcattctttttcatgaccatgcagctaaccaaggaggtgaaagaactatacaaggagaactacaaaacactgctgaaagaaatcagagacaacacaaataaatgcaaaacatttcatgctcttggattggaagaataaatattgttaaaatggccatactgcccaaagcaatttacagattcagtgctaatcttatcaaactaccaacgtcaattttcatttttcattttcattagaaaagactaatccaaatttgtatggaaccaaaagagcccatagagccaaagcaatcttaagctaaaagaataaagcaagaggcatcacactacctgacttcaagctatactataagcctacagtaacccaaacagcatggtactggtacaaaaacagaccatagaccaatggaacagaatagtgaacccagaaacaaagcgacacacctataaccatctgatctttgactaagtcaacaaaaataagcaatggggaaaggacttcctattcaatagatggtgctgggaaaactggctggccacatgcagaagattgaaattggacctctacttttcattatatacaaaaatcaactgacggtgaactaaaggtttaaatataagacctcatactgtaaaaaatcctagaagaaaacctaggaagtacccttttttacattggtcttggcaaagaatttatgactaagtccccaaaagccattgcaacaaaaacaaaaattgacaagtggaacttgactaagccaaagagcttctgcaaagcaaaagaaacatcaacaaagtaaacagacgaagaatgggagaaaatattcacaaaatatgcatctgacaaaggcctagtatccagaatctataagaaacttaaatcaacaaaccaaatacaaatacattcattaaaaatgggcaaagtatatgaacagacacttttttttttttttttgagatagggtcttgctcttagtccaggctgaagtgcagtggcacagtctcggctcactgcaaacttcacctcccctgctcaagcgattctccagcctcagcctcctgagtggctgtgatgacaggcgcctgacatcacggctgtattttttttagagatggggtttcaccatgtcgccctggctggtcttgaactcctgagctcaaagcgatctgcctgcctcaacttctcaaagtaatagaattacaggcatgagctaacacacccggcctgaacagacacttcttgaaagaagacatacaagcggccaacaagcatataacattttttaacaacgtaaacatttttaaatgtgcttctttttacaaactggccgagtgtggtggctcatgcctataatcccagctcctggggaggctgaggcaggaggattacttgaggccagaagttaaagaccagcctgcgcaacataacaagaccctgtctctaaaaaaaatattaaattagctgaatatggtggcattcacctgtagacccagctactcagaagattgaggcaggaggatcacttgagcccaggagtttgagactataacgaggtatgattgtgtcgctacactccagcctggatgacagagcaagcctccatctcttaaatgaaaatttcttaaaaagcaaaaacaaacaggaaaagaacgggttttggaaactctgctgttttcctttttttgtgcaatcacatgcataaccgacagtagtgccattatattagaaatattaatatatctaatcacaacacaaagcactgtgtaaaaaagccgagtatgatgaaataaattaaagataacctaaatattggacatatgtactatgttaatgaattggaggaatcaatgcggtaaaaacatcaattcttccaaaatgtattcataattttaatgcaattcctatcaaaattctacctgaaagatattctgtagatagatctgtagatctatttgtagataaacttattctaaaatttatatggtaaattataaccacactctgggacatgaatctagaggaatgaaaaatgaaaaactacatgattgttttgcagctttatttgtagtgaccaaaccctggaaacaacgaaaatatcccacagtatgtgaataaagtaactatagaacatccatgccatgaactactactcagcaataaaaggaaataagctattgatgacaacttaaatggatctcaagtacagaatgccaaaaaaaaaaaaaaagccaatctcaaaaggttacataccgaatcattgcatttatctaatattcttaaaatgacaaaattacagtgatggagaacaaattgattggtaccaggctttagggatatttagggagggtgactgttgtgactgtaaaggggtagcatgaggcaaatctctgtggtgatgaaacaggtgtttatttgtggaggttgaggttacacaaatcagtgatgaaatagaaatatgtatacatatcaatgtcagtttcctggttttgatactgaattgtagttattgtaggatactgaattgtagttattgtagttaatctttgggagaaactgggtgaagggtacatgggatctctgtatactatccccgcaaattcctgtgaatctataagtatttgaaaataacaagttaaaataaatttttaaaaattctgtgacagttattaaaaatggaaatttgagcaagttcctttattatggggctaataagacctacaagatgtagttattctgaggactaaaggagaaagataagtgattaagggacacaagaaagtactgtggtgacacagtctgaactggagttcaatttgttcggtctaaattttattttacgtgcctttcacttttccagttattgtaagcatatatttgcacctggattataaaatcttaagggaagtatatgcattccacacaatgcagaaatcattataggtgccaaataaattctgattatcaactaaggctgaatggcaattaaatgtatctcagggcattcagatctatcaggatttggtgctttagacattacccaggacacatctttgttacatttagaaccacggttgtttttagaaacatacactttagggtttctcaaagttgaccatgcattagaatcaccggtaaaacacagagtgctgtgtcccaaccccagaatttctgacttttgaggtctcgtgtcaacttgcatttctcagaagttcccacgtgatattgatgttggtttgggaccgacaagttgtattcacgccttggcctaaacaagggtttatgtttgtagaaaactcacagtgcaagatacaaagggcacttatactctgggcaatattgtacctcacagcatagagggacactgatgctaacatgcagacttagagccaaatcagccccaaaacaattttttcattttttctatgttgttttatgaaaattttgcttatatgcatatttagacaaccacactgagaggaaaggaggtgacctagggaaaagaatgttttaaattaaaattaggccttatgttttatctcatacaccttttgctggggaaaatagcaatgttatgacaataatattctaaaacacaaaatgtacaattaactattaaggtaaacatcacagtctgactcaatatttttttaatttttatctattactcattgcagtcgcaagcagttgaatgtttgacatagaaaaatgagtctgtcactttaacaaatggtacaataaaaacactcaaacaaaaattttagtagggattattataactataaaaagaatatctttctttaaaaaatgtttccaatgttttctatcaattttgggctcgcctgttgcataaaagtaataaggaacaagatgaagaagctttctattggcaaagaatgatttacatgctgaatgacataatacaactgtattcacttaatacagaaaacaagcctctattcagaaccattaaatgatcattaactcaatgtctaaaaaaatggtgttttaagaattggcaccagagaaatggaagaaagaataatttgttagtaaagaagttttagcataattcacaactgaaatttaggatttgagaaaaatttctttcctgcattataagagtattctttattttagcaggaaaacatgtcccatgagacctatacacacacacattctgccttcagaattcagctgctgcattctgctgctgcttctcttattcagactgttggcatcatcaatacataacttttgattgaatcccaaggggaaaaaataactttggtagacagtggatacataacaaatgcatggattattctgggcattcctttttatttggtagagtgaaatttttggtgttgttgagaggataaaaaaggcatttaaaagtcaattttgaatccggattttctgctctgttaataaattcacatgaaagttacagaaagtattgttatgcttttgtactgaatagtttttgtgtttagaaggctttaaaagcaagtactatgtccactgtgctattctggtttggatattaatcagaacacagttgagcattgtttgaattcacagagcttgccatgctggaagcacaaccttatatgtagtgaccatggacagtcctattatgggaaaccaacttgagagagaaggcgggtcacttgcttgtgcgcaggtcctggaatttgaaatatccgggggcctctacagaatcctggcatcagttactgtgttgactcactcagtgttgggatcactcactttccccctacaggactcagatctgggaggcaattaccttcggagaaaaacgaataggaaaaactgaagtgttactttttttaaagctgctgaagtttgttggtttctcattgtttttaagcctactggagcaataaagtttgaagaacttttaccaggttttttttatcgctgccttgatatacacttttcaaaatgctttggtgggaagaagtagaggactgttgtaagtacaaagtaactaaaaatatattttactgtggcataacgtttagtttgtgacaagctcactaattaggtagattgattttaaattatcacagtagtttgcaaagaagcataaatgttatatatactgcatatatatatgtatttattcaggaatatatatttttcattgggaaaacttttcaacagaaatggagtgtaaaagtttttctttgcgatagaactaaacacatgatttcttgattaacaaaccactgcagtaatagaatatgcagaatgtcatttgactataacagatttattttgattgctgtgagatagtttgtatatctgagttattattttgattagttgatacttccgtatttagtaacagttacataaaggttactgacctgacatatattctcaattgaactaactactgtataggaactacatggaggcctaaaagttagaaaaagtttctctgacacatcatggataaaataaagaataaaatgagttgggacggataattgaaggatgtgaaaagtattgataaagatttaattttaatgtttcttactcacatttactatttcaaatgctcttttctgtagcatatcatgataattatttcaaataatgatgtgatctatgctatcaaatgatcagatgatttcttgggtaaacgacatacaaacttgaggaactcctaattatatttagtagtaaagtcaccttgttgtttcatgtctattatgagccagcttttcagttcaattttttagtttgtctttcatatagaaatacaactatttcgtttatttttaagaaagtcatgatgactaatgaaggatttaaaaatggactgtggcacaacagtaaaaataatatatgataaggactgtgtgtcccgaagagatgggagtttatctcttccccacccatctttgacttgtggagtgtagttattctaaaatagatatgagggcaatgcctataattaagaatgaaaaaataaatctctccaaataagtaatgctccacaactactaaaaaaaaaggcagaagttttgccactgggaaaactttgtggaaataagttaacattgtccatgtattgagtcacattaaaagctaccagactttataatacaatatttacttacattgttggcttgcttcataaatttcttttggtggacatcattattacttttagattgaaaaactattatatttactatcattacaaatatatgcatggcatatatctgttgtttgcaatatacacacacatttttattttttgtttttatttctttgatatatgtaacataaataccatcaaaatcactagtgattttatatatatatatattctacataattaacatcatatacaagtatatagagcaattttgaaagaatatatgcaattctgctgaaattaagcaaggtaaatctacactctgctttgtcatagatattcaaataactttcaattcttagaatgcgaagaaaggtaatctttttgggacatgccctgtaggattttttcacgctgcatttaaaaaatcatcaagtaatgcctatgcaacatgacaatgagtttggtaagaaaaaacggagatatactcagggctatattatacattaaattttgctgtttgacaacatactgctacttggatgtttgacatttgaatccagtttgtaaatttgccgtagtttgataaacttacaaaagtacgttttgttgttttttaaccaaaacagttaccctttaaaagagatcactgtattgtcaaacatattgtattgttcacttttagaattactcaaataatgcattgtaaagaattattcaaatagtgtactgcaaatagacatttcatttgaatatatttaaatgatgtaagtcatctgaggtctaataaaatcaccttttagaatttcatctgcagaatcttttaaagacatcttaactacgaaaaagagattgctgatctaaattgatgatatactgttaatacaaagcttttggtgtatcttacatgacataacattatgaaaaatacaatagagtatgtcatatagatgttactctaaactttaaaaaaagactacaaagtgttctatgcataattacattatttaaggggaaaaaggtgttggctgacactattccagctagacagtactgaattgcaaattcatcatttgggcacagatattaatacagcttcctctttattcctatagcattcatttgaaatccctgtactccatgtcatttgctacatatgaaacaaattgtcaagtttttaaccacttgtgtagtttaataaaagagattaaaatcattgtcttggaaacatcaggtgtttttcaaaattctattttattatctttcatcaaaattttatctcaagagtaaaacaaagtcatttcccaaactttccttctccttccaccttctattgtaatattttcctaacttattaaaaatgatttatcatactttttcatcaactctttatttcatcacacatacaagaaacacagtattttggtatgagtatatatatttatatatatgcacatttatatgcattcaaatcacagggtataaagtttcctaagagggtctaattagaaattaacctttctttaaagataattttctgttcatttttctaaattttctattttaaacacacatcattttttaaggaattgacaaatgagactaatgtacattccctgtctgacaacacagaacgaaccaggaagaaaggatttatggggcctgaggttatacaattgggggtgctattttaagaaaaataatagaaaattggatacagccttgggaggggcccctcatgtaagtaaggctttaatagtttcttgggaaatcacctctgtatgaagagatgtgttgacatttaatcttttcccagttacattttaaaataaaattgatgctagttatatttctttagagcatttattatttctcaaagacaaccttttatttaatgcagattagagagttaaaagaatttataatggtaggaatttgacatttctgcctttcattctgaaaagatacattgattaaagtgatgtcaaactcagttaatggaggcggtgcagttatttgaaatatacagggtatataatttgaaggcacgccaaatcacaatgacaaggaataatgatgaccttggtttatttttatacagtacattcaggttttgattggattcagagagaggcaatggttttctttctcacaaagtcctgctatagtcctaggaggtttgtgttctgttatcaaggcagttggttcgtattggaatattttctggggaaggtcatgggctgcagtgtgggaaataaacgtttttattaaatgcaaccaggtttcatgaaaatatttccccttgtagagtgtgctcaatgcagtatactgatcttcaaaaaacaaacaaaccaagcaaataaatagtttgtagtcttcaccttttccctacgtaaaacatctattagttagacttccttggggtttcatgctataaaatattgacatatgtttggagttctgaagtttcattttaatacagatatcaaagttaaaatggcaacaccatgggataatttattattttaccaagtttggagggttttttctatttatgtcacttatagaattgtccctaaaatccttgcaaaatttcaagctccctctacttaatactaaaagtgaatgtgtcttccagagattctgataaccccttcgaatgggagagtaactctgctatttgtgaatcactcctatactaaatatagttccaagattaaaagctaaaatgattttgtttattttttcatgaaattttttcatgaaaggcttgatagtataaaaagtctgtttccctcatatattacagcatattatagcattcaatgtgccttcttaaaccagatggctcctctagagattatgaaatactttaacacccagggcatagcctttctgtttccccattcaagattacttccttgaatatggcccaacaaaaagaccaaaaaaatacatttggctccagcgttttaagggcatataaattttcttaagcacaattctgataggcagcagacaaatgagaatgaggaagggaaatggctctgctgtcttatgcttaaaagtgtcctcatatagagagaaacaacacaccctggggcctttcggagggtagagggttggaggaggaagaggatcaggaaaagcaactaatgggtactaggcttgatacctgggtgatgaaataatctgtacagcaaacccctatggcacaagtttacctatgtaacaaacctgcacttgtagccctgaacttaaaagttaaaaaaaaataaaataaaaagagtcctcatctcacggccatacaacctctacctcattcccattaaaaacacaaagatcagtactccctcttttatagctcacatcttctgtttaggctgccattttaagggataatttctattcaactctgagctcgatctttattttaatctgatatcactcgttcaaaatacttgggaatttcagtaggcaacggaacacacagagcaattttctggaggcctacaacctctgaaggtgactttgcgtagtatatgtaatgatagtaagccctgagaaaaccaatgttcttagtagtctggatttggtttagaaatcaatgtattcctgctttcttttgtgatcttttgccttctccctcaatgcctcactttcactctgtcattatgaaccccattcctcactaatgggaactgggggagaatggacaatgatcctttaattgaaatggagttgtcatttccttgccatgctgataaaatgttgttgctgttgttgtttgttgttgttcttaaatgactctttcagaatttttaactcagtattttgattacataccattttaagaaaataattgtccataaattaaaaatgctagcaaattgatgaattgattttctcatgccaatttggaaatctgaaatatatctaagactggtgaataatatgtaggtctaattgccatttgaataaaagaatctgaggaagagctttgcctttatttttgtttattattcattttagtttagttatttattttagtagaaaaatgtggttgtgtcaacgaagaggaggtacattaaaatgcattattaaagccaatgcttatccatgtaatgaaatgagaatgtagatggcttaatgggttttggagaggattaagataattttaaagaaacttcaaaaaatcagatgctcgaatcatgatgttttttgtttatatttaataaatatgaaaaccatacatgggcatatcaacaatgaggaattcacatatatatcacgaagtctcttgctaatttgtcaacttttaaatgtgttgtcttcactatcatgaaaattttgatttttaaaaaaggtcagtgttagctgagcacaattaccattacggtgtcccatattatttccaattatgggcaaataaaatgcttaccctttaaatgtttttaccctcttcttggcttttgttttgttttgttttaaagcgttctcccttcttccactctgcttttggctaagactgtcatggaatcaggactataaaagggcataaacatcagtagcttttttctcattcctggcactcatctttatttgcactcaacttgtctcttcctttatcagattacggttgcaatagtaccttagcctgagctaagtgctgacttaaagggcaagggagtcagtacactgttacaagtgcagattttagccttggaagctgtgtgaggaaaaattaaagaaataagaaagaaaaatcacaaaatcagaatggcccacgtattttcatcaaaggcaaattgagtaattcctttttatgttggtgcttaagaacgatgtattagaaataaattggtgactaagtgaacaaaatattaataaactagttgagtaagtgaaaaaataataatctgtaaaaatgatgaatcccaatgactcacatgttgcaaaataactaggaagcaaaagggaaattagactttaaagagcgtaatcagatgcaagaaatgttggcttgtaggtggttaactaaaatcgcttacgggaagctcagacagctggggaatcctgatttagtagacgctgaagggcagggcatgagccatgtgaacagctgctgaagagctagaggattcctttggattaggtgtacacaccccgtctctaatgggctgtcagagagcaccaagtgttatcacagaggttcactttgctcaagcctatggcttttgcagtgttttactttaaatgtctgaaaatggattggctctcaaaataaatccaaaaataaaagtatcaaaataagtgactctctaaaacttgtattgtgtggttttgggtgaccacagtttaaagaagggacttacagctgatgatttgttatccatttattgattcatttgtccatgtaacaaatacacatattgagtgcccattttgtgccaggtactgtgctatgctctggcgatagtattctaaacaagtgaactcaaagagagactagcatttcaaggaggatgtgcatattaaatacacacacacgcaaactacttgcattggagataagggctatagaataaagcacacattgtaataagaatgtataatagggagagttagaccagtcttcgaaattggggaaatacttctgagaaaaaaaaaatattcaaagcaaggcaaagaagaatgaggttagagtatagttgtccaaaagaaaagagggagcaaaaatgtccctgtcagagggagcaatgtttctgaatgtggaaaatggtatggagaaagatctaaaacaagtacagctttcctagagtacagtgagggcagaaaagtgtggaacaagcttgcatctgaatggccgactggggtccaatcattcagagccttgaaggttatagaaattatttttctctttatactaagatcaatggacagccttatgggtttcaggtagaaaactgatgtaaacatatttgtattttttaagactatcactctgttttgtgtgaaagagattggcaagtgcctagggtagatgaaggactatcaatctgaagcaattacggtagctcatccaaaagaaggtgatttggactagaatggggacagtggagatgaaagaagtaaatctattcaagatttgtatatgagatagaatcaataggaattggtgttgtattgcatgctgtgtgctccatgaaatgcacacctgggtggataatggtgccatttgcaaggagattggaagggaaattggaacaacaggaaggattaggggtgtggatgctaaggtgtttgttttgttttgtatttttatgtagcgcgtgggtattgtgcctagaaatgaagtcattattagggatttaaatatgcaactcatggagtggatgagaccagctagaaagataatagagtgtgaagaggagatcggaaattcaataaagaagacaaaagcactaaaaaaaaaaaatcagagaagacacatctagaaaaaatgatgaaattctaaggaaaataatatttccataaagaggtctgttcctttcgatctccaatttaatgacttcatgaatgaggatcccacttttagcattaggtgtcttggtttccacagtctctaccatctatttacccctaatttcctcccatattgctatttctgtgaatattaccaaaatgttgccttagtagaaaagcttcaataaatatttaaattgtataacgtattcagctttttcctgtactctgcacttcctaaaaataccttcttcggaaaccccatttcaactgactactgtataatgaaatgagccttcagtgtaaaacatttatcatagtctcaatttcaattgctcagtcagaattgttgagtaatatgaaaaatcatcctttagagaatacagaattgcatagttatgacaaggtaagtttgcactttatttaatgctagtttagttaatatagatgcttattggagaaatgtctaaaaattctggaggaccgttagtgaaagtgattatcccaatatctgcaaaaatggtaaaaatacctagaaaacattgacatttcagtttaaataaagccagaatcacaataaagagatagaaggcatttgagtaattcaatctaatcatggatgaatgtaatgtacttatcagttagctttggaggaagtaagactcgatagaatagtaatatgatattgagcaactttttttaacattaggtttttaattgcttataactcaacattgttgaacacctatgttctctttgctttttatgagacagcaactctaagtcagagaacagatacacacacatatgtatatgcgtacaactactataaaatatcaagaaagttataaagcatggtacaaatcaatcataaatgattacttatgaatagtgtgattatggacattctcattgaagaatccatttttataaataggcataagagtatggacatacagagatgtgaattagagaatgattgcaagaagcagtgaggcaaaaaggattaatgaaacattgatctgtcttacatacacagctattgacagtaccttgtgtgtgcatagcactattctagattcacctaatcttcaatgataatactgtatttaccatttaacaagcctgtaataagtgtcaggcacttctctgattacatcacatacatatgtgataagttccatattaactctagaaggtggggaaacataatcatctaaatttaccagatgaatatgtagaggtacagggagattaagtaatttgcttaaggtagctcagctggtacgtggtagagtcaggattttaatggtggcagcatgacagtaggattaaagattcttaaccagtcagttgtcacgatctctcagattttaatagaattctaaaaaggatagaacaaaatataaaatggcaggaatcatagtatcttctaacaagaactagacatgtcccattgaggatgctctttaaaaataaaacccattaaaattttgggttgtttactcaaagcctatagacattggcatattatattttcttagataaaaactgagatatcctaaataactcatgcccattctctagacttgcatagggagctgtctatgataatatccataacagttatcttgtttcacaattttattactatctcactcttcttactttgtgaagatgaaaaagatcaaaaataaaactaatgcagccctggtttgtttgtaatcatctacagttagccatccttagagtggtctcactagttgttcttttagagtttatttcagttatgtacaggcaactgtgctacatgaacaaaaagctaagaactgggctaacctgaacatgatttagtattgtaaaaaaatggtttacatagattaacgtgccatactattctgaatagtacttggcataaacagtaggttatttaagttactataattactgttgcctttttacataaactaatttttctcttatcttcattatgttagtcatccacagtgtgatatttagttgcatacattcatatagtgtacactgtacaattctagagtgtaccagtaacgtggactattaatattatgctatgaggtaaatgacacccctggagttaagcaatgtgcactctgtacgataacgtcaacattggcattctcatatatatgattagaaataatactgagtttctctgacttcacaagcaattttattctctcatctcataaagaggtaatgaatgcacacatatctacatatttaaaaataatgtcagagatcgtgatggaacagaattattcaagatgtataaatgagggtgggaggcaaagggaagtcagaaatactccccaataatttatttcaaattaaaagcctattggttattggctggtcgcggtggctcatgcctgtaatcccaacactttgggaggccaaggcgggcagatcacctgaggtcaggaattccagaccagcctggccaacatggtgaaaccacatctctactaaaatacaaaaattagccagacgtggtggcgtgcacctgtaatcccagctactcaggaggctgtggcaggagaatcacttgagcccgggaggtggaagttgcagtgagcggagatctcgccactgtactccagcctgggtgaaagagtgagactctgtctcaaaaaaaaaaaaaaaaaaaaaaaagtctattgattatcatgtgcgtttccatggtatcaattgtttagtattgtccagtaactaactagtatataaaactatcaggataatataaattttaacatttatttaaaatgcatcttcttaactgtaaggttattgatctttggataagctatagaaataagccttaattcagaaatatatttcggagacccagtaggttaatttgtagcactactctttaatattaaatatacaaatatacattgtttttataacttactgctataatgacactaagatgtgtgattatataaaaataagaaattgttagaatttattttattttaatcaatgctgatccatttttctagtgtatgagattagatgaggttgtatgagataccacttttctaggaaaaaagaaagtctttatgacagtgtgatgaatgaagtaaattagctcatttctttcaatattactagtgtgcatagatcttctctttttgtctttctgtctatcatacatacacagaggcacacatacatacacattacttggaaattaagtggtttacgtatgaaagtttttggctttactgataagatcagtaacatgataaataatacaacactgaatacatttttccatttgaaaagtgtaaagaacactacaacacggttgggaaaaaaaaacaacttattatattcaaatgtcattcccaattgtaacaaacatataattatttatttcttaattaagaagctattaataatagtactttaatattcaacattagcagtaactttgttggtttcttttttgataatttgtttaagaaaattagattataaattctgttatggtaaaaatacaaaaataaagcaaagtattatcttctttctatctcttatatgcatcagttggacaagatattgagattctcttttcttttaattgcatgctttcattatttttctattcaagcttcaccctgctaagttcaagtgaagtagaggacttcatgtctctagaaccaattaatgaaatttcttcgtctttcttgaacttgcagaaggtcaatagtgaccattttctcccttcttaaaaatgttgtcgtctttaagatctgtgcactgtcctctcatggcttcactactactttggagggtgtttgtattcagtctgcattgcaggctgatcctctcttctcagcctttaaaaattaggtttccttgggatctagtcctagcataattctcttctcataatgatctcttcctcgatcattgcacttatgtccacagctttattaacacttatatacagataactaaccaagttatacctctagcttagatttctccaatgaattccagaactgtgatttcaactgcctgggtggcatctccattcttatgtgatagtcacctccctctaaatgccctaaacagaactttctcttcaccgcacaaaacctgcttccttctcattgtttttcttatcattgaatggtgcaaccattcacccagtttcacaagccagaaacatatctcatccttgaaactctgatcttttttacccagttatttctaagtcattgccagtcactgtgggttttatcctctaatatattttcatccacttctctttatctcctctaccatcatcctagcgcaatatattttctctcactaggaatacagcagcctttcctttccagtttctctgcattctctttcgtattcttgataatccactctctaaacttcatgcagccaattaaattcgaagataccaccacttgttaaatcatgttagtagtttctcttggttgctaggaaagccaaacaaaacaaaacaaaacacatttaaaaatcaaagtctagacactgcctacctctcctatctcatttcccatcatgtttcctttgcctcgcccccttactggctttctttttgttccctgactaggtatagctttttttttttatctacagtacttttgtgtatgcttttctatttgtctagaacctccccgtttccccttttttaccttgatgacaccattttccacctacaagcttacctctggatagacatcaaaatcccctaagtacatcaaattcctctaccacgtaacatctgttcataacacatagcactgttatgattccatatgtatgtacgtgactaattaatacttgccagtcggattatgtggtaagttctatgaaccaagacacctcaactgttcttgctcaccactttattacctggaaccaaacacattaggtttccccatatatatttttaaataagttacttgatgtgtaatgctttaatgaacataattacagatgtttacatataatatgttataataatgatattttgattgcattttatgaaaattttatatgacaaagcactttcattttggttaaagcttcatatataaatatataataaagatttgctttttgtcattgggtgctgttcccttttttgatttcccatactgcttttcacttgtggttcttgattttgttttttactgtttttaacccatgtcctttttctttccttaatctatctttgtaaagtctcaaagaactagtatctagaatatataaatatcactcaaaactgagcactaaaaccacaaataatctagtggaaaaaaatgtgggaaaagccttaatagacatttcactgaagaggatatacagatggtaaagaaatgcataaaaagatgttcagcttcactagccattaaagaaatgcaaattaacactacaatgagttatcactatacacctatcagaatggctaaaattaaaaaaagaaaaacagtgacaacactgaaagctaacagggatgcaaaggaactgggtctttctaatattgctgatgggaatgtaaaatggtacaaccattctagaaaacagtttaggagtttcttctaaaattaaacatgcagtcaccatacagcccagcaattgtactcttgatatttatcccagaaaattgatgtttatgttcacccaaaaaccttgacatgaatgcagtagctagaaacaagaaacagctcaagtatccatcaatgagtgactgttaaacaaactgttatatactcataccactaaatactacacaacaatttaaaggaatgaactactgatactcaatattcacaactccaatggatgtcaagagcaccatattgagcaaaaaaaagtcaaaggttaaatactgtgttatttcttgtatataacattactgaaatataattatagatattaagaacagatattgatattaagaacagatattggttgccagaggtcaggaataaggcagagggtatgctatataatggtgccacaatggagccttgtggtgatggacctgctcaatattttgattgtggtgtttgttacacaaagctacacttgataatgtcgaatagagcttcacacacaaacacacacacacacacaccagagtcacacaagtgcatacttgtctatctggtaaagcccgaataagctctatgaattatagcaataatttcccagtttttatattgtactatagttatacatggtatcaacattgggagaggtaaagtgaagtttgcacaagacattgttgcatatttctttgcgacttcctgtgagtctataatgattgcaaaataaaaatttgaaaaatacagcattagacctttaataagctcttggttttctgaaggctagggtatcatcaccaaacctaatcgaggataagtcttgtaaattaataagtctatcactcaaggtacaaaggatggtttaatgctaatctgctagaatgcaatccatttctattatatgggaacgtgcatcactgattgaataaaatatcatgatgatggaggccgtattctatatgtcctactttgtaaggtgttgtgtttcaggttgtttatgaccaaaaaccctatatgacaagcgctagaagttatgctggtccacgggcatggtaacttgacaatgcctgagactacctgggttttaaacttgcctctacctacaaaggcaagtaatcctggacaagccaatatttatttaactagtattaattgagagcctaccatatttctggcactgagctgagcatgtctactactgtcctcaagaggaaattaggaaaaataatgccccttcacaagcttacttattgttggctttaaaagggggatatataaagtttcttggtgagggtcaaagtgttgagaataatttttctttgtattattttaactattattgttaatcacaaataactaatgtatataactctaaaagataaatgtacatttggataccaacttgtataaacagatacatagatcaaaagactacctctgattttatgtttgtgcgtgtgtgaatgatctccttgctttcaatctggtcttcagaaaatcccaccttgtaattgctgcccccgttgagtttctaaaacaaataagattgtgtgcctccagcttaacgtcctttagagaatcttctagcttcagggtaaaatccaaggtcctaacgtacaaggtctttcacagtatggcatctgctcatgtctctcacctcctgatctgctgttccccaccaggaacacttctgtctagatataaaattactttggttcagcaaataaaataactttggttcatgtaattttgtgtctatgacttgttcccacttcttggaatgttctcccaaaaaccactatcaccatgtctcttccaccaatgactattaatattatttttatctttccttatagaatattgtttaaaagaattccttactaccctaggtcagaaaatggggccccaatatgtattcttattgtaaactcactatggataattctagacaagcaattatatcccctattttagctgtcagtttgcttctcggcttctgactcactctcttgctccttgaggagatagcctgtgcttattatatgtggattaattgtgcctaacagcttgtaggtacacaaatgaatgactacacagcatttatctgactattgtttagccattacatcactgtatacatatttgaaactcaggcatcattcagattggaaaagccttatgaatactggcatgcattattttgtacacacacacacacacacacacacacacacacacaaaatagaacaggatgggataatcctaagtagatacttttttgtccagtgtactcaatatattgtaaaaattataaatcttagactaaaatgttggttgcttaatttggatgattcatataatctgtcgtgtttttggttatctgtgtactttgttttctctttctttcttagtctcaaaggaaatgtccaagttaaaaaagagccccaatttgtggggattcctttgaggagttacaaagctgagatatcttaggagatgccaaattgatgcaaagtggtggagaggtgagcagagtagaaatttggagaatcacttctgctcctatagtgcatgcatgccagggctgctgtcctttgaggtgggcacaggagctctaagtccagtgggtgtctgaggacagattactgagaaagtgaatggttggcttggactacctcaaagacaagtgtttgctcctgcttgagctattgttggaggtttcctgaaggagacttagaacggaatgtccattccagagagtattcagtttcagtttgctgcattcctaagcttattttccaccctgggagctggccacaatgattggaaatctttcatctgttttaatctgggattgagctcatttataaaaggaaacttagtgtctggataaatatgtgtgcacaagcatggagccccatacaagtatgcccaaattcaaggtgagaaatgtttattgcatgactcaaatacatggaattgaatggactctgaaaacaaaaataggatctacagagccagtctaacaacctattcatatttattatttttgcacttaaatgtttgtaatattttattgaccagtgaatatgaactatattttgtatattacgttaacatattattcatgtaataatgaatttttaaaaactggtgtcttgaaccctttcaatttccaaagtattacagaaatccacagatctggtatgcacaggcattttatgagaaaacttagcttgagtgatatcattaatttactgaagtagtaggccctctgacctgcttttataataaaattaagtttctgtaaactaataagaccatagtaactttttctttaatattttatctttgaggagatttgttaaagaggcttgtatgtgacatgacaatctattttgacttataaaatttcaaccaaagaaaagatgcgatatagtatctttgttcttatctatgacaatttttatgatgatagttccataattaaattttttcttaatgaaagtgtatattattgtattatcttcaactaaattagatcatataacccaattttgatctccgtatgccaaaagcagagaattgaccagccagaaaaccatccaggccttatataatatattgtgcctagatgaaagcttataagcattcttctgcctggggctcacattgtagaaatgtggtgtgcaattttgaaagttgaaaatatagactctgattgagaaatggaaaagagtagagttctaattcatgacatctagaaatcaagttctaccactgaaaaattaatttgcatatattcattatcttttatagtgaatgataatgataataaagacaataaagataatatacatataattggttttataaaaactatggcaaaaaatatattaccattctcacttgtcagatgaggtaactgagtctatattatttgaaatataactttaaaaattatattatctccgctactagattatatactcctggatgccgcaaaccacatcttctatgtgtttatattctcatagagttttgaatatttccttgtactaggaagaagttttataaatgtgttttgaattaattaatatccaaaagtgatggaaagaattataagttacttataaatttcttttgtttcaaaccattagatgatgacacttaattttttgggtataatatgatatggaaagactctcagataacttcaaaaactagaattatgcatacatacactcagatttctaaaaataacatgctatcaattcatcctgcctgccaggtatacaattcatttgagttttgcatgcgcgtttcaattgttcacattaaactgtattcatagatacaaattcacttttggaatcttgggtacttaaacaaaaacatagcctttctaatagaagtataaaaaggatactaattgatgaatataccaagtatctttccaattgcaggaaaccattaaaattgtgtctatacactgtatctcttttatcaaagactgtaacaaaatcaattgctatacatattgaaatatttatgtatctggtatgattacattagcttcagagtggttccaaatttaaattcccattggagaaaaatggagtgagaaatttgtacataagagagaagaaatgttttcttttttttgagacagagtctcgctctgttgcccaggctggaatgcagttgtgtgatctcggctcactgcaaccttcacctcctgagttcaagcgattctcctgtctcagcctcctgagtaactgggattacaggcgggtcccaccatgcccgcctaatttttatatttttagtagagacggggttttgccatgttggccaggctggtcttgaacttctgacctcaggtgatctgcccacctcagcctcccaaagtgctgggtttataggtgtgagccaccacacccagccgagagaagaaattttacagttagaatttatttggacacattttagaaatttttttcctgtaaaactcaagtttcatagtgtgtacgtgaatgcatctgtgtgagtgaacacctgtgtatttgtgtgctataaaaagatgaacacaggaatctaatagcataagtcgcaaggtaagagtattgtccaactaaaatagctaacttcagaggtatgaattactttttgttggtgggtatgattttaacattcccttgaatttattattgtaatatttgccactaaaagaaaaaaatcatggcttagaaataaatttaaagtaaccaagatcattgctatataaaccagaatttaaattgagggtttttgaaccattagggtatatttcccctctggcttaaatttgaaaactgatgaaattttagatctcagcacatttaatatgtctaaacaatactcatttgactgcaaaacctgtatatgtaatttccaaggcccagaagttcagtatttgaaattaaattgttgcatattactgagaaatattatcttaaagcatctgctccttctgctgttctaagttaggtgtgtatttctcgttagtgctcagtcgatgagtacaaataggcatgcagcatgagagcagagcattcatttcattgactgcaattactaacatgatttttgacatcttattcattgggagagtgtcttttaatgttaatttgaatgaatgggaatactttcacattcttaatgaatctgctcatagagtaaaataaaacatgactgttatgctttgaagatcaagaatcttcttttacacaaaagggtaaaaaaggccaaagaaggtgaagtgacactcttcatgctagttccaacacgagtattttgatgaacaagaaaaaaagccttctttagatgtaggtgaactgggtgatttggcattccttcctctgaattcccagggtattttgcctgtttttctttaactgcatgcaattcttgtcctttatccactgtttacaggtctgtttctcacaataggcggtgagtttatttacacagtgactgctgttacatatcacatgtactaagtctctagtgattgttgcttaacgatgactgaattgataggtcctagcatggctgatctctcacattattcttgtttggtttgggtttgggtatgaatggtggaaagagaaatggctggctctgagcaacatattacaatgggtttctagcatctactcctcacctagtactagcttagacagtgagcaaaataaaaccataaagcaggccaggcatggtggctcatgcaagtaatcccaacactttgggaggccaaggcgggaagatcacttgaggccaggagttcgagaccagcctggccaacatggtgtaaccccgtctctactaaaaagacaaacattagctggacgtggtggtgcacacgtgtaatcccagctgcttgggaggctgaggcagaagaatccgttgaacccaggaggcagaggttgcagtgagccaagttcgtgccactgcactccagcctaggtgacagagcgagactctatctcaaaaaaaacgaaaaaaaagtaaaagtaaaaaagctaagaaagcaaactatgtgttgtcaagaagtgtttatttttgcatcttgaatttttaaaggaggaggttcagatctatttgttagatgacacagggtttgtgaaaactcttgcagaccaatgaaatcagaacatacaggcacaccaagtgcagattgtgtttagagccactgttctaaaagcaggtgtaagagggttgcagttatatcccagataagagccttagggcattaggaatgaaaaagacaaaatgcaaacaaaagatatttagatatttaattagtaaaacttatttgcgcgggtaatgaggagagagacaaaaatagtagagagcaaatcatcaatactgacttcctgatttcttactagggcagtataggtgtacactatatatatatatataatattatatattatatatatatatataatattatatattatatatatatataatattatatattatatatatatataatattatatatataatattatatattatataatatataatattatatattatatatatatatataatattatatattatatattagtactacttccttttataaattggacagaaagcttatatgtatagaaagaaagatcaggctgggcgcggtggctcacgcctgtaatcccagcactttgggaggccgaggcgggtggatcatgaggtcaggagatcgagaccatcctggctaacaaggtgaaaccccgtctctactaaaaatacaaaaaattagccgggcgcggtggcgggcgcctgtggtcccagctactcgggaggctgaggcaggagaatggcgtgaacccgggaagcggagcttgcagtgagccgagattgcgccactgcagtccgcagtccggcctgggcgacagagcgagactccgtctcaaaaaaaaaaaaaaaaaaaaaaagaaagaaagatcaatattttttcaaatgtccagccaattgtttaagtaagttaaggtatgtaatctaaacttataatttaagtttaaagaaaaacattagaccaaatatttagccattttgatgtagccaagtttatgcttcaggagagttgcatagttatgaattgagctcacagaaatacaaatacacacgtcatcatagtgtgatatccagcatagatggggggcagttatcataaatcctgtcctaggctgggtttggaatgtgagacagattttataataataatatttcatctacataaaacagtccatttcctggactataaggatcatgataccatttgtttatcatggctacaaacagaacaggaagtagtatccttcaacagagaagataaattataacagtcattatttagaatatttgcaattcctttgtgtagggctattctttgttagctgaaataaagctctctgccttgattacagttatcattttgtgaaaatattgaatgagtttagattcctaaaggaaattagaagttgagtaaaatgtacattcacttagaaatttccttgcagtgaaagatgctgattactataaatgaagacagggaaatttcattcatttaaagagattactacaggtgacaagtttaaaattagccttaacttaaaagttggaaaatattttttcctgctagagactaatgccaactccgtgatgtatgtaaggtcatgttatcaggacccagcttattgctgctacctcctctcctacccttctcctcatctcttactcctaaccctttagccaaaggctcctatgtgcgggcccccaaactaccatgctttcgtgttgtcagggataagtcttcctgaaattaccctccttctccttaccaatcacttaattaattaaagcctggtttccacttcatctcaggaaaaattatttcctaacccctctcaccaatctccattgactccgccaatggaggttaggtatggttttaaagtgttctcatagcataagttcatcaaaatgcacaatatctttcaccatattttgtcaatttatttactttaatatgagaatacaaatatcttggcatgtttatcagtgttacacggatactgttattttatcatcatgtttcccacctctcccccatacctagagatgagcataaggcttaatatataaagttatttggttaatgctttttttgaataaacaaatacatatctaagggcatgtgagcaacagagttcattgtaacactatgcttacagttaatcatctttttgttattgttctagcagcaagaaggatatatatctatatatatatacaaaggggagaatgagaatgatctgaattcaaatataaaacattacaaatgaataaggaatgtattattttgctagcattgccataacaaaataccacagtagactgggtttcttaaacagaaatttattttctccacagtagtaaaggctaggtataatcagggctgatttcttctgaagcctccctccttagtttgcagaggctgccctctccatctgtcttctcatggtctttcctctgttcctgtctgtgttctaatctcatctttttataaggatactaatcagattggattagagctcaccttagtgacctcatttaaccttaaatacctctttaaagaccctatctccaactacagtcacattctgagacaatgggggttaggacttcaacagacgaatttgggaaaggggcaatttagcccataacaaggagccctgtcaaataaaacagctttgagagcaaacaaaaattggcatctgagtgaaatatgtgggaagaggaaaataacttggggctttgctgttctcttcccactcttcctgtgacccgactggttccctgggaaatggtctttggatccccactgctgcttaagagtctgttttttttcccctgagttactgaggactgctgtcagtatgattgtagtgcaaattgatcctttgtgggaagtacaatagcaactggtaaccacaaagtaccagagggcaaaagaactgtagacgggtaaataaaaggtgtccgaaaagagcaaagggctggaagaatgggaaaatggagaaagtaagatatgcattgagaagactgatgattttttaaaatagtagatgttagatagatgatgagagagacagagagagagagagagagagagatggttaaaggaaaactggtatttggtctgcagttttgctgtttcaccagcttaacaccctacagtgaataacaaggtcatagatcatcacaactgcagaaaacctggagaatattttccatttcctcattatatagatgtggaaagtgagactccagttctcagaaacagttagatacaaaactaagacccagctagttctcagccagtgattttcatatcataccacacgctatacagttgtaggtttagaaaaaatctatggtataagaggaccatgtagtaccttacaatgcttctgtaatacccacagcatcataaagagtaataaatttaattattgcaacttaatgattcaacaattgtatatgtatatacgtaattatacatatatatgtgtatgtataaaatctaccaatacatatgtaatgcacatgtataaaatctaccaattttctatatatgcagaaaacaacaacaacaaacagtattagagaaaaccagggaattaagtcaaaatcatcactcccagacctgaaataaatttcaaaagctcttcgttactggtcctttatttgtccttcctacctcattttttgccccactcatataccacacattgcaactatgctaaactaccttattttttttagaaaaggacatcctcctcatacctacatttgtacatttcctttttatttgcttttttcctctcctgttgccacagtaaattcctaagttttctctttaaggatctgtggcctgctttggatacagttgagtgtagtgatattgtgccttgcacatatctctagaacaaaagttattctgttatagaaattacttatttactatcacttaagatcatttattaccatttactatcatactctaattcacagaaggcaaaaaataaacccttgaatggcaagaaatgtttaggcaatgttgggcaaattgtttatgaatagtgattgcaattaacatagagcttcatacttactggattaaatattgatacttttgagtcatatctctactcttagcaataatattggtgaatattctgtgctgtaagcaatgtaaatcataaaaacattctaatgtgtatatgggtattgaatattcaatgatattaaatcaatgttcaattcatatagatgattcttttggaaattaagaaatggatcccattttaatgagttttccccaacataaactatactttgttaagttcaacttgacaatttacaacgctcacatagctttcagatgtatacttaagatatatggaaatgaaaagcaaaatgttgtgaacaggaggtgacaagatattttaaatttaatcatcatatcttttataattaaccttttaaaacatttaattggcattattgttagaaaactttagctctggaagctaaatctttagaattgttgacttgtagacaagtcaaatatccaaaataaaatttcacccatcattagcagtagatgtatctagggtgaaattacacgctggattacttcaatattcttatatttacatttttatttttttcaaagtttctccagtgagcattttattgtgaaaatattaattatattttaaacttatttttagtttaagatgagaagatagtctttggggtagataaatacttttaaatctttcatttagaagttcctggactaatattatccaggtcccacttccttaaaaaaacctaatgtaacctttcccatataagcattgactgctatttcttgtttcacaacatttatgtggtatgtctatgcctatggtattgaatatatatttgaactctgctggcctattcccatctctcacagatcccaagacaatagagatcatgtcttacccatctttgtatctcttacagaaaatagatctcaaattctacagaagatattgaattgagagtttgagatgttagaataagaaaaggcagtgaaaggagagcctacatgtagcctaggccagatttacaaaagcagtagctcagaatgagatagggattcaacaaggagaaccaaattatttggtagtaagttgttgctaaattgtgggagatgaggaaaagggaataatgatagcagactccctgatattaatcccccaagagtgctctatggcacagtaattattcattatgggccccctctgtttggccccacgcccccaaaaaagacttctttagtcataaaactgaggggaatactacatactaaatccccttagagtttctcaatgtaatgcatatgcaaagatgctctggaatcctgcaggaaagacagctgtttaacttttaacctagtttcccaaactcatttcaccatggaacttctttaacatgcagtcaataaatgcccatttatctaatgtttaatgaagcatatgttggaattcttaaaattgttaatagctaatcaccgtgaggaactggtgagatgatggtaacattaacagaagtagagaaaccaggaataggatcaaaattggaggggaaggggaaaagggccttttgttttgagacatcaacttagaattgttgatgggctatccaggtgggtagataataaaagtttttgtgggggaggactaaaactaaagagttagacttaagagagaaatacttgagaatcacttacatggagatagatgatagttgaagttaaagaagagaacgagatttctaacggagggaatacactatcaaggaaaggattagagaaccctgggggagtgtgaatatttgtgcctcatttaattttcagaaccagatcatgaggaaagaatacttcccattttagagattaaaaaacaaaaccgaagcacagtgcttaagtaactttctcaaggccatataactaataagtggcagatatgagattttgagccctactctaaaacttgctcctcaatttgaatgtttacatatttatgtaaataatatattttacaatattaaaaacgtttttgtagagatacaataaccatataattttacaggattgtcttttttatttacgtttttctttggagtataatacatttttaattattggcctgagaagaagatacaatagattatttttggcaaatggtgcactcattcatgagagacactgtattttctaaagcaggctgatctctgcataatactggctccctgaaaataaatccttgctgggccgggcgcggtggctcacatctgtaatcccagcactttgggaggccgaggtgggagcatcacgaggtcaggagttcgagaccagcctgaccaacatggtgaaaccccatctctagtaaaaatacaaaaattagccgggcgtggtggtgcatgcctgtaatcccagctactcaggaggctgaggcaggagaatcgcttgaacccaggaggtggaggttgcggtgagccaagatcgtgccatggcactccagcctgggcgacagagcgagactctgtctcaaaaaaaaaaaaaaaaaaaaagaaagaaaaaataaatccttgcaatttatctgccatattgaatttgttctggaataatggggataaaatcaaaataggaaataaagtatcaattttattccactattattttatttattattttcatcttagtcatatggaattatatttataggaacatgttaaaatgcattttcaagataattattgcacacaatttaaacaattgttttgagtgactttttgtagaggtagaacagttctgtaaaattaaggtttggctttgctttgtttgacctagattccctattaatttcaaaataaatgtgccttatatttcaaaatcggatttcgtatatgaaagctcatgtcagttcacaacaaaaaaaaatcattaaaaaagaatagtgcgttattttattactgttttgatagcaatacctgaggataccgtaaatgtgtgcatgtacttttgtttacaaataaaaaacagttatgagaagacaaaaaaatctaatgtagaataatttattccactaaaacccagctttcctcatggaaatcatgcaacacctagtgagattatgctagcacatagggaaatttcacaaatgcacattcttagacatattaaccttctggatcagcattcaacaaaggtaaaataatgtacgctattgatatcagactccttagctccctattctggctcccttttaactatcaaaacacagtaatctgtgttttccttctttgtacatcagttattgtacctgccactctttataagcattcacttttctcttgtttttaagcacagtggtagcaatggccatgacttagaggcttaatgaaatgaaggacagattataaacaaattaaacccacactgctttctttatagaagcagctgcagagtgttctgaggtttttttttttccttgttgagtaaaggaactaataaggaaaatttcatggcttcaaggtctagagataagaaatgaaagttgtaacaggagaggagctgggaaaagcacagaaatgtagatttcgcggatcatgatgaaagccacaggtgacttggtgaccacagaaatgagaacacagggttgggtgtctaggcaggaagttgggaggctggtggagtcctggttcaactctaaagtctcagttatctcagcacatgctcttgtggtgctgctgagatttggctgattgcctaccccaaacctaaaaatagccgagcctcattcttttgtagtggcagccagaggcgcagctgtgtggggactggctatctttttccttagctttgacaaatagctgagagttggtgggcttgagtgtgcacctgttgagacagaaagtgctgagtttagttgacaacactgctgaaggtaatttcacactttcattccaattgatcaccgaaacttagaaaaattttctccttttctaaatccttctccttgcccatgaatatatacatacatatatttttctcgaactgtttgagagtgattgttaccaaaggcaattgtttttaaatcagaataacaaatctcctgtttgagtggctaactcaaattttattttcttatttaatttagtagaatttaaaagatttaaaatagttttgaaattaggaaataatatttttattcccataagtctaaaggtacaatctagcccattacatcactataaaaaatcatctccatatttattagattacaggatattccgctttaaactagaatttgcgttgcatacatttttgcagaaaaactcattcttaattttttctaaaacagtagattggatatgtgttaaaggttcatgttctagtacttctttaaatgcttattgtcagctttataaaatcattttatcacaaaaagttagttttctgtaggcttattttccttgataggattccttctcttacaaactggttatatgaattaaaatgtaaatgttagtgaattgtcatatcttgtaaatatactagggtagaactgatatctttatgcaaattagaaaaatattttacagtatcagttatggagttttttttctactcttcctttttctttgttaatattggcatgtgatgaaatcactactttataagtttgctactttgattaagactcagaaatcagagtggctgggtgtggtggctcatgcctataatgccagtactttgggaggccaaggagagagaggatcccttgagcccaggagttcaagaccaccctggacaacagagtgagacctcatctctacaaaaaaaaaatgaaaagaaatgagccaggcatagtgacaacacgcctatagtcccacctactcaggaggctgaggcaggaggatcactggagcctaggaggtcaaggctacagtgagtcatgatctcaccattgcattccaacttgggcaacagagcaagattatgtctcaaaagaaacagatcaatcagagaagtaactttaaatattttaatataaaaaaaggcaacatctcttagcaaataaaaatagcgacgtccttctctttctgtaaatctatccaagacatgagtgctgttatcgattcggtttagggttttgttttgtaatatttttttcccctttcacagcaatacattttggggtatggtttgctgacaatattttccacagtaatcagtggcttagctgtaaatagaggataagtattgcatctggggaatacacattagaaacaattggtatttctggttcatataaaggtggaaaaatacttggccagatgggcacttatttatttattttcctgaccagaaataacaggcaatgtgtgagaaagtgtggaaagcactgggttggccgtcaaaagcaggatcttacaaaggttgaaggaagctaatctgctgagaggttttctttttttaatgactttcacatagtatttttcaaagcctctgtgcattaacactcacgccaaaggaaatgatttgttttttcaagcacttggtcagtgcaatagctccgcagctaataatgacatatggcaaattttgagtacttactttgtgctacgtactgtaataagagctttgtgtatattatgtgagtaaatacttaggacaagcctgtgagagagctattattgttcccattttacagatgaagaattctgagttagaattagactttgaaagtcaaactttctccttccctatcccttgctgttatccaccacatcatgctacctccctgagctcagtgattacctacaatgaggtttaccagcttgtcctatagttacctgtgttataactgccatgttcctgaaataaattaactataaaatggtgcccatcgactgatatagagaccagtcattttttttttatagttttatctggcctggggttatcaagatactaggtttaatagaacttacttccagatttaaatgtctttgttcattcatgaaaatcaattgattggatccaatgattttagatctagacaactgtcagtcatgtaatctaactaactcattgtttaaagaggcaactgaggtgctgaaactttcaataattggattaattttatctttagtcagttatatcattagaacctaggtctctatttcttaatctcaaccaaaatatacatacatacatatatgtgtgtatgtaagcaccatttctgctaatttacaaaaacctagcaaaccagtttaagaaaaaaaaaagtttcctttgctcatgtaacgaaaaagtgaagaggtattacttacttcagatacagttagttttgggatctcaagtgatgtcacctagcccagtacctctctcaccctttctccactgtgttttcaaaggctcttaaaaaaaaaaaaaaaaaaagctcttagacattatctctcgatatgggacccattattagtcttagacttatatcattgtacctcaattccaatagaaaatgaaaacaccattctctccaacagaagacctaggattacttgtaattgactctgaagaaatcacctacacattcctgaatcaatcaacctagttcaggagtacagtgttctgattgggcaggttccatcagacacccactcctggaaccagagccaggtaagttcaacccaaaactgtcagagaggagcaggggtgggtaggccacaacgaacagagatacaacaagacaaacagtgaagaagaagatgaaatgggtagcaggcataataagattataaagtcttgtaggtcccaaactctgtgtgtatgtgtgtgcatgtgtgtgtgcgcgtgtgtgtgagtaaccctcaaaagtatacaagtattgtgcttcctgtaatgacagacacccttctgttgataataatgattcatgtagcccaagaatataagaaagtattctgtttgtaaaataaatatttagaatgggaataaatttgtataaacagaagcatgtttgattttctttaaaaagtgcgtgataaatatgatgatcccaggaggtttgttcgttatttaaatgtttaaacatgtgatatgtctctttcagaataataaatagtagggaatagcaatatagcacttttcggccgggctcagtggctcacgcctgtaatcccagcactttgggaggccaaggtgggcagatcacttcagatcaggagtttgagaccagcctgaccaacatggtgaaaccccatctctactaaaaatacaaaattagccaggcgtggtggtgcacacctgtaatcccagctactcaggaagctgaggcaggagaattgcttgaaccctggagacggaggttgaggtgagatcgtgccattgccctccagcctgggcgacaagagcgaaactccatctcagaggaaaaaaaaaaaaaaagcactttttaaaaatcataatggatttctaagattgtaatagttttggtatgctgattggctttatttttggctacatttattttagaatctctgcattatcaatgaactttcattcaatttcttttctttctttttttttttttgagacggagtctcgctctgtcacccaggctagagtgcagtggcgcgatctcggctcactgcaagctccgcctcccaggttcacgccattctcctgcctcaggctcccgagtagctgggactacaggcgcccgccaccacgcccggctaatttttttgtatttttagtagaaacggggtttcactgcgttagccaggatggtctcgatctcctgacctcgtgatccgcccgcctcggcctcccaaagtgctgagattacagtggtgagccatcgcacccggcccattcaatttctaaattaggcataaaaacaaaattatttcgtaacatttctacaatgacctcctttttctgttaagtttctaattctgaagacccaaattcaattttatatttcagtatctcacactgattattctgatagttacattaaatccctcgtttagaaactgatgcaagttactgttttcaaatgttcatgctttgaaagtacatgtttgtcatctgatttcaaatctgcatggttccatgctgattattttagataacttcaggctgtactccaatttttttctgagagatctctgaagtaagcttttcttactctgttacaattttaatgagatacattctatgtattagagtgtgaaatatctctttaggacaaaatttaatcatagtcagtgctccttatttaaaggctaaaggcatcatcaatttggcaaaaaataaacaacactatctggctgcctgagggtccagtgactgaccttgagttgaaatcccagctgcctgcatcatgtgaccatcaacattctgtttttatcccagtggtaataaataccttatactcaaaaagacaagagcaactcagaagagagatttggtacttttcaaagaaacgcagcagtaaaagttgcatgatgcttttcatttcaaagcaggcaaacagagctttattatggcagagcagtccaatttaattttcacttgtgtgatgaaactattccacacgtttgcattaatttatgagcctttgtctggttttaatgtatttaataatacatttatacactctttgttttaaaaataatgatatgttttgacaatgcactttttcaggaaaatctgaggtgtaacaaaaagtgataatggtaagatagttcccattttgagtattaaaaaatgagtgcatcaggtaggattgggtttggctgcgtgtatcagaaatccagaaatagaagtgtgttaagtaagagagatttgttgccttgccacatgagtgagctccagctggaagcagtacattgccggtagagcagggccatggtggtcaaggacccaggaaccttccatctttctgtgcaactttcggtcttcgatgtaacatcattgtctaaaatggctgctggacctccagcctctttccaggtgtcaggaaggactccagcagagtgaaagggtttgtccaatttaagaagcgccctttacacagctttcctccaaatcccactggatatttctgcttactttcccttgcagtggattatgtcaaaatagtctaattccttcttttataacaattggagttgaaagctttgtttcaatctctagtgacaatactttagattctgattcccattctctgagggcatacatccgtgttactaggttgttactaaatatgcatgaatcttaactcaagttttttaaaattccagtttggaacccttggagaaatcaatacatctgttcgtattttgcccaatagtctctatgagtgctttatctaaaaatcataaattcagatacatttttaatatcatgagactaaagaaaatatttcccgttgtcaacagatatcaagtttcagttataaaaaatgagtaggttctggatatctgttgcacaacagtgtgcctgtagttaacaataccgtattgtatacttaaacatttgttaagagagtagatcttatgttgtcttcttattataataaaataaaataaggtcgggcgcggtggctcacgcctgtaatcccaggactttgggagtctgaggcgggtggatcatttgaggccaggagttcgagaccaacctggccaacatggtgaaaccccgtctctactaaaaatacaaaaaattagtcgggcatggtggtgcgcacctgtaatcccagctactagggaggctgaggcaggacaaccacttgaaccagggaggcggcagttgcagtgagccgagattgcaccactgcactccagcctgagtgacagagtgagaccctgtctcaaaaaaataaataaaacaaaataaaataaaatttccgtttgtatactgtctttaagacccaaatcaattctctctgactctagtgggcactgatatgttctactgaagtccccatcaccaggtagcacacccatcccctagctgctgggagtgcttgttgcccacagctgcttccttctccagagacttgttcttaccctgaagaaagccaggagcctgaaaggccatatgtgccccacctcaggtcagtttgcaaccaacgactgaaagtacaagagtccaacccatttgccacaaggtgagatcagctctgggatgcaatttgccctccagagctccctgtgggatcatgtggaaattggtctctaggtgagatcgcattcttgttttgttttccccaagccctaaactgtccccttcacacagtttctcttttgagcactttctctttttattttattttttgagacacagttttgctcttgtagcccaggccgcagtgcaatggcatgatctcggctcactgcaacctccgcctgctggattcaagcaattgtcctgcctcagcctcccgagtagctgggattacaagtggagcgccaccatgaccggctaatttttgtatttttagtagagatggggtttcaccatgttggcaaggctggtcttgaactcctgacgtcaaatgatccacccgccttggcttcccaaagtgctgggattacaggcgtgagccactgcgcctggcctattctaattttcatcccttcactcacaaatgctatgttccatcaacagcttgagtgtgcacatgagcgcacacacacacacacacacacacacttctgtgcttgctttttcgtggctgcaaacctgctctcttgtgaatccctgaatccacgtatgaagccgaagcttttatttcattttattttttagttgacaatataattatacgtatacctggttttttttttttttacattaactcttctccttatttcagctgagtttctatttatgcacaatatttattgttccgactcaggggaagtttcaagacacaaaccttttgacagcctaaattagttcaggtctaattcagaaacagaagtttccagattagaaaacctgaagctaaagaagtgcttgaagaggaacagggattcatgcaaaactagactaggtaacagagttactcatacacaagaatcttggcaagggttgaagtgggcatgtggaaggggctggcttgaaaatcaggagggtcagagaaagagctgttattgttaccctttgttcctcctcagatgtctatgcgaaaggctctctgagatgagagcacgatatagctcatgccggttcagccacttaatcttttttgatttgactgcacccaggtttctttaaatctgagctttagtttccttaactgtaaaataatggaaaaattcctggcccctcctcacctggttgctatgaagattaaatgagataatatatggaaaagtcttagcatataataaggtctggaacatgatatacatttaataaaataatacattttacttattattatcttatacctttcatatgaatgttaactgcaaaacagcatagccggtatttgctccttcacaatagaaggtaatatgcttccctgttttactaatcagaaaactggcctcgaagaggttaaattcctttcttagaactattaagaggctaagccacacttcaaactcaggtgtgtctgactctgtagtcaatgttcttttcacttcatggtgcttttttcctgtaaagtgagtataatatttcctaaatcataataaagctttgtgcattggatgacataaatataaagggcatagtgtataattggtactcaataaattattccttttcctccttccctaggcaagaactaattttctttctttgtttagcccctgtattaccagccaagtgccttgggcataatatacgtaaataggcctagtatgttgaattttaggcagccatcttgatttttgtaacaaatctagttctctttaaactattgcttagctcttccaacaataacaggccttgtagttatcccacatggggtgatttcaaagccacagagggaagattgttcttaagttactcctgcatgcagtgtcaagctctcacaactttcacaagaagttaaaaactacaattttatgtcagtctctcctccagtaatcagatagcttctttgattgttctgataacccaagagggaatccttctgatacagaaggtggctatatctcatatattttgcaactcctcccaaaacatagatcgatcatctcaaagaactacatgggaaacttgatagccttttggaggctgagaaagaaagctaagccaaccttgaaggaagtcaacaaattgtcaatggcattttgaaaaactgcattgcaatagacatctacactcatacgttatttagctcccttagggatatgattactcttggggtccacaagattcgatgcatgatcatttgagaatatttgtggctactattattttttaaacagatcaacaggcatgacagaatttcatgcatgaatttcatgataaggcattctcaattttatgttttcacttaagtgattatctctaatgttcatctatttccttcttatttcaatcctaccctagtttcaacccatccttttttatttttttcttgtttgaagtttaccctaatttcatgactgagcttctctaaattccttaattaagtcctccttgtccatcccagtacaaggtgtaatcactttcccctatatctggattgttcatctggttgttatgtattgcattaagttaatatatgcaaatataagccttgtaaatacagagaccaatgcagtccaattttgggtagatgccacattcaaaacaacaataacaaaaattaattaagtagtcacacacttaaataactcaaaagtgttaaaacagatatgaagaaatccacagcaacatttattataaaattactctttctcttccttggttttgcggcttctcgagttcataggagactttcagtttccagtgacctggaaactcaccattcctcatcaccatcctttactgtagtaacttccttttacctgaccaccctgcatagtcacagaagatgcactcctgacaagtgatcctcaaaacaggtagtaatctctttgagaagtgtgaaatgtcttttgttctccttgtcgttcccatgattgtcagctgtgaggacccttgtcattctaccctcaatcccaattctgcagggtctggggattctggggattcttttttttttttttttttttgtagttaccaatcttatatagatacaataatttttatgtgtattgatgtttattgacaaccagattttaaggtccttagaaattggagttaattattatttatcatccaagctcctttccctctgccctcttattttccaacacagtgtcttgaattttatcactttatcgtttagttattaagggtgatttggtgaaatgtagaacagactatatgaattacctcagcttatggtattatatgacataataacagaaacataaatagactatcataaatcttaactttttctttattctttgtaatattttattagtcttatccatcttgcttggattgccaagttcttctgagaattccagtaataatgttatcattctatcgagcttattattcccaactgatcttctattaagccagtatgaattagctactgtttatgagattagattatgcactttaatctctagaagaagcaaaagtaatgaatacactgaatctgccactgagaagacactttaaactgaaatgtttcattatttttctaattcctctctcttttgaatctgagtatgtttttggggtacgatacagtgtaaaggtttttgtacatcaagtcatagacttggaaataaaacacaaacaactacccttttgatgaaaatacataaacatcatagccatttagccaacttttaaatttaaaacaataaattcatgattttagttggagggtaaacatgcatctttttaaaaatcaaatgtaaacacagaatctatactcatgatgtacacacatggacataaaatattgcatatattttgggagattcaaagaccactggactccaagttaaggatatttttctctaaataaacttagtgattgaattatagaaaaccacaaactaagttattgactgaagtataggaaaagtatagtgtattaaaataaagttttggactaattaacatgattttactaatagtgacaagaggatttaccaagttctgattttttctaatgtaaaaaaaatttgttaagtaagatctttcaattagtaatttctgaaaccccctctaagtaaattaaatttttatatccttgaagaaggatgttgatcagtctcaccttatggcaagtatctcaatatatgtgatctgtcacctagtcttttctctattttattatttctgtgtttgttgagaaaaaaattatttgtatacaagtgcatgtactatttaatgtcatgtaattaaatccctttgatagaaacagttaatgttagactaataatgtttttagctactggtgaaatacttcctcctaatgcgttaaatgcaggataagatcttacttgatactaccacgggagtgtaatctctcccaatagtgtttgtttcatcgaagttggctcatttaggtagtttgagtggccagagttgtataagtatgtttggcagtggtggatggggaatggacagcaccaaaccattctttctctctgtttcgatttttctcctttgtctattgctagttgcttattcctgagatatccttcacctctctcaagaggcttggtcacttaacttcattccaactctacacctccattggtggaaatggaaagatggatgaaattttagcccctgtttatggccagcatccgactagtccttctttcaaaaatgagtaaataaaaacttattatggtatctttgaaaagttgcctgtctatgctctaggctttaactcaataaattattttaatggaaactgtgaattcaaaggaaataaaagtatggcggggaattatgcagaaaatactgtaatatatgttgataaaattttcccaagttaccacacctccagtacctagaacatagccagccatataatagacactcaataaaggtttgttgaatacatttgtttaatattcctttttactcttttcctcccctcttctttcccatgcatttctagttactcacatttataataatatattcagtacattttttgtttgcgtcaagatgcatcatgagggaatcacctgaaatttcaagtcaggatgacctggttagaacatcagttccaaaactgaatatttagagatccttttcctatctataaaattggatcacaaaatatctctcaaagggtacaaagcacagcaccaaccatatattaataataaggcactgttacataaatgtcagttcattttctcatcaccttcttaaccattttgctctctcttctgtttcaagacagtaaaatccaaatctctgtcagtaaaagtatatctgaccactctaatttaataaaatgcagcaataaattgcatgactcatttctcaattattttgcatgacttactaaaagtataagacagggtacctgagggatctgtgagggaaaggaagcaaaaatcatatacatagaagtggttggtttcaagtgattaagaataacctacgagtaggtgaaaaaaagaatcaggacaatacaatagactgcaaccaaaggtggaaaaaactgtaaaagaaatagctttagaggtctcaaatctgctttcagaatgctaggatctagttttcgtaaattagagttctcagtaaatgtaggacaagtcccagctgtactactgtagcattaacattaaaactaagccatatcttgaatctccttttctcttaaacccccagaggtttcaaaccagagaggtggtcaaaatagattcccctactacttcccctttctcaataagaagctctcatctgttgaatttccattttgaggcatttagacagctgagagagagagagagagtttaaaggagtgttcaatccatctggtctgttttttccccaaattgcggaagttatcatttcagtaacattatatgttgttaagcttatacaataagatctgattttaaaacttaccacataaccacagcaacaaatattgtgttatattgtcagaaggattgacacatagatcaattgaacagaataaagagtctagaaacatacccacacaaatatgcccaacatatttttgacaaagtttcaaaataaattcagtggaggaagagtagtgttttcaacaaatggtgctggatcaatgggacatccacggacaaacaaaatgtacatagacctagacctcatacctactacagaaattcacagattagagtgagattatttttctctttcttacagaaatcacatccatattgtctacttctgtgaagttcagtatggtagccacttgccatctatggccattggaatgtagctagcatgaattgagaggtactataaatgtaaaatacacactggactttgaagacttagtgtaaaaataatatgaaagatctcaataataattttatatgcgttgcatcttgaaatgatagtatttgggatctgtttggttaagtaaaatacagtatggatgttagttttacccatttctcattatttgtaatgtgggtatcagacaaattaaaattacctatgtggcttggatcatagttctattgctcatagctagcataatctataatttccagtttcagtttctttatatctgaatgagaaataaaagatatttgtgaagcaatctgcacatagaactaaagatttttattatttttaataaaattttacatttgtctgtccaagcatttgaatcattttgcaaccatatttattgattatttctacaacattcagtttagattttgcataaataaaaacttttgtaagtgtatgacttaataaatattaagcaggatctagtctagttacttgggaacggcaaagccctcgtcttcatggagcttacatttttcagttgataatctttatgtaactctagaaataattataactggcttaactaagttagcttttgggtacatactcaacttgtgagagcggaacctcatgggtctaccaatgagttgagtattacctaaaagtatccatcttgccctgggcattagccaatgtacttttcagaggaaatgcagggtgtttgttaatctggcaaattacctgagtaggcattggttacatggaagtctattcagagattttcctctgtactacgttgtattgactgattgcttttctgactttctccctagattctgaattcatcaagagttctaggaggggggctagcgattaaaaaaaaggacacattaggtacaatataccctactcaggtgacaggtgcactaaaatctcagaattcaccactatagaactcatttgtgtaacaaaaaaccacttccacccctaaagctattaaaattaaaaaggaaatacaaataaaaataattttaaaagtttttgctgcgtgttagcacctatgtcagtaattggtaaataataagtgtaaataaaccaactgatggatgaaatattttgagagaacattaattcaaaatttaaaccagtcaatgtcacattcaagccagattgcccaacctagtatatcatgaccattgacttcaatctttaatatggattgtctaagtcattggctggaagggagcatctgtctttgttttgtcctttgaagcaaacacttgaaatcagtttagactctcatctagacatttttgttgtttagaaatatatttaatggaatctttaggctagattcagaagagaagtaagctgtcattacccaaggattgttaaccttatcaataaattcgtagccctagggcataaagatcatttgtattgtttcagaggccttcgtgtctagtaaattttctagctattgatttttgcaaatgtacaaaattaacaattgtgagagagcttttaacaagcttgatttcagttgaaataatatgaacagtaattgttttttttctgttcattgggtaataaaagcatgtatgtaattgggaggccccaatactgttgaaggtaaatctgatgagaaacaaatattcaaagactttgtgcatgcaagagaatcaatagaggcaaaaaaaaaaacctatcttctagagagttgacaggaatctatcttatttggaaattcaaaaggtattcatgcatttctgtgttctgtgccagttacattatttatataataaatgcttttccatattgctttttatttgaaattctcaatcctataactaattattttacttagggaatataactgtatcctttacgccttctctttgattttgtcaccatgatcatcaaaagtttctccccatcaataatccaggtagactcccagccacactcaaggcatcatcaatgatctcagagtactacattggattaattactaatttttcctcattgacttctgttttccacaattcaatatttttctaattttcatttatctgcttgcttcttcctaaagaaggctcatgtaagtttgtatatgtgacaccaatatctctttaatatgtttaatttccttgacgtttctaaatagggttaatttaaatttaccttaagacccaaattatctgaatgcaagtttccaaaaaaaaaagctatatatcaggaattttctaggattcaatttcaaaaacaactttcagagtatggctaataattcaaaggtcaacaaaacacctgagcccactacaatcccagtaccatacaggtcaaaatcaagatttggcaggattgtaggatcccaacgttctttctgatgttaaaaaatatatagtaaataaagttattttttgttcaacagtattttggaagtagtaattgccacattgtatatatgtttgccattagccataaacgtgattttaccaatttattttcactacattgtgcagaattccggaaacttagataaaatattttaacacctaaatatatacacacacaaacacacacacacatgcacacacgctactcttccatgcccccaatctttctctttatctcagagttcaagtgtagccatgatttgacattacaaaatagaaagagtactgttggtttacctgtcaaattacttttatcaagccattaatggtgcttactgtgtgccagacattttttctaagcactttataaatattaactcatttaatctttataaagcctttaaatgatatatgataatattctctctttacacaaaaggaatttaagacactgaatggttaatgagcatgctgaaggccacaccattcataagtggtaaatgggaagtgactctgggccattttgttcccaagtccaagcttttaaatattttcctctgctcttactagacatgatattgctgagaaaagttttggtcccctgtgcttgaatataagtataataattaagtcatcttcttttccatgctcaaattttactctcaaaatcatttttctgtgccacacacattttaacagtttttcattatatacttgttcttctgagtagaaattgactctaaaatacagacaaaaagaaattatatttaagataaagtaaaaaaaaattctgggtgaaggatacattagaatatgtgattcaatttttacaactttcatataagtctaatttctttcaaattataaagttaaaaatctttcaaataattactagtcgaattgaagaatatgaattgaagcagtaccatttagtgcataaattcaaggacacaattttcaagttatattttctatgaacagtcctccctgaagttgtgcaaggagaaagacctaaatcgaagttagtttacctacattaaaatgcataaaataataatagaaaaataaactgaagcaaggacaataatatggattactctccagctttcataactgtgtttttaaatgttcttcagcagaaattattcaagcgttgtttcctactacagaaagaattctcaggacttctcagaaatacgtcagtttttaataataccaatacctgataggagagcagggacaatttcagtgtcattcatagatgttgtcccagaaccaagacagcatctgctccatagtaggtacttaatttgtggaatggataagcaaatcagtgatacatatcgatggtgctttttctactttaaaccacttttaaatgtgttaatatcccattaatagccttctagatttatttgagtagaaattaattcttttatttgatagactagtaaaaggcagcctagacagtttaaattgctcattcaggttcactcaatgaatacacactgaggaaaaaaaatatatatatatatatgtatgtatgtatattcagaaataaagcccagccatgactttttgttcaaggttctttgtactatattccattctttgaactgaaaagaggagaaattatagaagaagcaatgttttaaaaaatagacataaatgcataaatcaggtaacacacttttttggatacataccccacaatacctgaaaaagtagtaagcaaagtcactgatatttaatagaggaatgatctgaaaactttacaaatcaaaataactttgcgctttcaatttttagaaattaagtatttctccttactgaattcatccgtatgtagaaaattatgctgtattatttcaccataagttttaatttaggagtatgggttattatttggaaagggaaatgtttctcaaatttacttccatgttttaaagaataatcctgttaatctctttctcacatcttctcatatatcttatttcacttttaatttcctgtaagcttatcattcctgttaaattactccttgccttttctcagcgatgattgataatgatattgttgagctgtgtctctttctaacacctagactactattcaaactatatcaatcactccattatatttttaaaacctagaatatactactgagatctctcttgacctggtattcctgtatcctgccatctccgatttcccacactgagcacctttccttccttcagcatcctttccaatcagttcagaaagctgcccttaatctgctattctgttgccaaaacaacatcattaatcactttcagttaccttctttgcttcctatacatcaaaacttgagcgcttcctttaccctcagttactgctccactagagctttcttgttttaacgccccatcttcttgtcctgtgtgttttggttttcttcctcttcttacttgatgcccttgttttctttttgtgctattattaccttcattttattttctgtgcatgagcattgcaaattacaaaatcatctctttccccctttgtttactacttatttggttccggtacttcttttattctgtttgtataaatatgtactgaaagcaactgcggaaaaaacacctagatgaattgtgatcctatgtcgtcccttagctgagaaacatttcattcctgagctgtattatttgtcttttctctgaatacatttttttttcatactggctattctcctgtatattctaaacacacctttgtgtaatttaggtgaaattgttggaattataaattgtttagttagtagttgtgaatcatgcttactacagacatgtattatcaaaaatttcacaagaaggatagcgtgatactcaggcactccccacatttcctcaagccaccaaagagttttttgatggatgttcttgtttattggatgctctaaaactagacagacagtaaagattatcttttcctgctgctgaagtttaagtcatttttcccctaacttttattcacacttccaattatgaacttctaacacataaagaaaattgagatttttgtcatgcaatgctgaaacccaaactgacatgtaggaggaaggagcagcagttctgtgggtttgtcaggatgctaaggacatgttgtttttcaaattcgttattagagtcagtgagtttattaggctgaggtagaaaactgtatgctattagtcaaatttaaactaaattcctaaactcaagtcccttatagctcaaaatctgtagattcaagtaaacacttctagaaatgtcctaatatcacattgaaggagatgttcaatatgattttaatttagctgtctaagtctgtatgcaaaaaaaaaaaaaaagaaagaaagtaagtaaagcaaagcaaataataacctcaagtgccaactctaattaattggtagtatcttcttgaactaaaatgtggagaagtcccatctggcctctgtaggagagtgcaatgatctattagccatgctaatagatcagcccaggagaaggaagagaacaggattgttgattgcctgtggaccctgttgtgctagaacatttttcgtatgaaagtctgcatttcaggtgtggtaaattgtttatcagaccacttattttctgatgtgttctactttatttctgatacttgattaaaggtatgctgtgaaagtagtgtagtaataatgactcctaaaatgagtttatgcctctgaaatatagacacacgattcttcttcaataactctgcttatctgcttttagaaagtaagcccggaagtttacggactattgcaatattagattttaccatgtgtgtttattattgataatctaaaggtgaatttattaagctctacattggctaaggagccaaggctaaggattacaattaaacagctcaattatatttagcaagcaaataaaaccttaaattataaagcttccaatgatagcttaaagctcagaaatggccagttttttaaactaagcaataaatatatttttaaaatatttatttctagtgttacacagatgaatttggcacaagcttttcacttccttttgtgaaaaacttgttttgtgcatattccgtccactattttgtgtgtaatactctgtcatatcaaattcgattaattaaacaacctttatgggcatgaaccagccttggtctataacaatttgcaacttcaaagagacaaagtgattttcaaattactgcctaaaaatctatttaatatatataaataagcagaaaaaatatctatagtctttactggagaaccatgcagtagggtggggggagcatatggattttattttggcaagtgaagaaaaaagttattaagacatacaatacaataaaaaagaattcacaacatttagcaacagattggctgtgggtagcagaggctcatgaggagtcgacaacaactttctaagatattggcttagaaaacatgagtgggttgacttacatgttgttttctggagttgagaatgtttttactttgaagaacttttaacctcctctacaagactttttagctacgaggtccccttatcactatgagtaagagaggaatgcaattctgagcagatttctcctaaaactttatatagatagatagatagatagatagatagatagatagatagagatagatatagatatatatagatatagatatatacacatatacatatatatatatatatatatatacacacatatatatttttgagatggagtctcactctgttgcccaggctggagtgccgtggcacgatcttggctcactgcaacctccgcctcctgggttctagcgattctcctgcttcagcctcccaggtacctgggactacagtcgtgtgccaccatgcctggctaattttgtatttttagtagtgaaggagtttcaccatgttggccaggctggtctcgaactcctgatctcgggtgatccacctgcctcggcctcgcaaagtgctgggattacagacttgagccatcgtgcccggcctgtatttttaaaagttgtctttactgaagaggtctgttctaaacacgtattctgtgaggatttgattccatcattttcacacctgttactggcctgacatatcacaatgttttatgagaaaatagaaatgttatgaattcatttttaaattgtatatattgtacaaatttgtattaagcgaagccatggcaggatagcagtctattatttgccttctgtgcactgcagagttccagcagaggtggactttcctccagtttattagagaattttaaaatgtcaaacttcagtcaatagtttatgctgtttctagacctaatataacaaataataacctaatattgcaggtcattttcagaagcagtaaaatgctattatcctactaaaaatttttggagcacaatcacatgatatgaatttcttacacaagcatataagcaataaaaattttacagaatcttaagtgaggaaaaatttgaaaatgctaaaaaaaaaaacagcataaaaacagagatcagaaagtggctttgataattcaacatagaacagcctttagcttttgggctatggctctcaaaatatccaaaaccagttatttttggtgtgtgcgtgtgttttctgattctatttgctcccactcttccaacagcagtcccctgactcttccaatccctcagactcaaaatctttgagtcagtttcaagtattcgtccctttttgtcaattcccattaaatctgcttttgacacatctattcacttttatctttttctaagtgctatcatcctagtgtagggcttcatctccattttcttactaattattttttcaactttcaaagaatcctagaagtgtacacttattaaaatgcatttcatgctttggccctactttaaagcctatactgcattgatttgaatatacacttcggcagtcaacgtccctaaccatctgatcataagctaattattaaattggtatttgatattttaatggcacttgaaaatttcaaagtttccacagttattttattggattttctacaaaaccatctgtgccaggtagtttttattacctatctcttatccaagaggaatataagattctttgaaatttgacaacttacagactacaaatctagcaggtgttagctgtggaacttgaactcatatcctcagattctaaaacagtgtcttagtcacactacccccagtggcttccctctctatccaactctcactgtccagatcatgttccataaccagagttacagaacaattataattaccttccccatccaaaggcttactgtgccacagctcatttctagctgaaattatttcattttgagagatgaacttggacaattaattttggaaatatgaatgcaaaataacttagtaatttaacaacttcagattagtgtagggatagtttcaggagtaaattaaatgttgttgactaaggaagagaaagagaaataatgtgataaaaattattgaaaaggggtatacggtaagccttgtgagataaattctctctactcttgggcttattcgtggtagacatagagctcagaataggttttgtgagatgggaaggaggaattgtatgagctgttattgagagattaaaggttattctgggaagaatacatgtttcagaaacagcaaaaggtgggctcgattcctggttgtcactcattagtcacgtaaatttggttgtgttgtttaacctttctcaacctcagatttatcaataataaaatgggaataacaatatcaccctttctggttcctaaaatactgaacataatatatataaagagttttgtaagaaataggcactcatacataaaaaatggttttattctctaccagcatttgaccttgggcacattatttaacctctctgttcctcaatctacctcttctgtaaacatggggaaaataacagcacctacaccttgttggactgttgatgattcaaagagcagccgccatttgtgatacccttagaacagtgctcaataaatgatataaatgatgtgactaattgataaagacaaaagtcttgtgtttcccttagaaagatgatctaactatactgagactcaatttcctcatctgtaggattgggacagtaatttttcctttaatgttttgctttagtatttaatgagatacgtgacgtatttcatatgcaacaaaatgctattacaatgcaaagagttctggaatatcgaatatgttacaaaatttggggagaaattattagagtaatagagaatttttaacacctaggttggacatttaattcattgatagagttctaatttaaataagattaaaggtttaaaaatccttagttttgtctttaaattttgttatactatcttaaagtttgctaaaaaattgctgtgtctataagtttactagatcatcaccggcaggcaagaccaagattatcatctggatgagttctgtttgttagagatagtaaacacgtgatatctactcaacaccctttgagagaaactcacatttcctcttgataaatgaggtcagatattggtatcatatttaatgtcttcttcaaaagatcgcaatctaagatcactgaaggactttagaatccttgctggcttttgaataatagatttctaaacttaactttgccctgccaaatttatgtatttgttttaatggaatgtatttaagggttccatgtaccattgtgctatttttgcatgcccaggcatgctcggctgagaaggcaggtgaggactgaaatccagccctttgtaaaggcatccaagacacactcatgggattgtgtctgccctgaggaagtagagccttccttcacataaaggcagtgtccctgactaggctgtggccctggtagctgagtccaccctagaggacactttgcctctatttttcctaaacgcgttgctgatatccctcgacttacagtggggttatgttccaataaacccaccataatttgaaaatattataagtggaaaatgcatttaatatacctaatctaccaaacatcatagcttagactagcctaccttaatcatgctcagaacactgagattagcctatatttgggcaaaattatctaactcaaattctattttataataaagtgttgagtatcttttattcagtactgtacttaaagtgaaaaccagaatggttgtatggatacttgaagtgtggtttctactgaatgtgcactatttcataccattgcaaagtcaaaaaattgtaagtggaaccattgtaaatcggggattgtcattatatactttagaggtaggcctgaatgtgatatagataaaaaattgattgtatttttaaattgtatttaaaaattgaggtatgcaattcctcaaggatctagaaccagaaataccatttgacccagcaatcccattactgggtgtatactcaaaggattataaatcattctactataaagacacatgtacacgtatgtttattgcagcactattcccaagagcaaagacttagaaccaacccaaatgcccatcagtgatagactggataaagaaaatgtggcacatatacaccatggaatactacacagacattaaaaaagatgtgttcgtgtcctttgcaggaaaatggatgaagctggaaaccatcattctcatcagactaacacaggaacaggaaaacaaacaccgcatgttctcactcataagtgggagttgaacaatgagaacacatggacacagggaggagaacatcacacactggggcctgttggtgggtgaggggctatgggagggatagcattaggagaaatacctaatgtagatgatgagttgatgggtgcagcaagccaccatggcatgtgtatacctatgtaacaaacctgcatgttctgcacatgtatcccagaatttaaagtataataaaaaaaaaattgaggtctgcaacaggcaaagccactaaagaaactcagatatttttcattgtaatgttgaaaaagttatgaaatttcactaagcccgtgtctatgaagtgggaaaataacagtgatatgaatattatatgagaacatatttgtaaaatatttgttgtatgatagatacctagttttgaatgttagctatcatttttggctcttataataggttattggaaggtaggtgtgactcctatcttttaagcatgcagaatactgaagtgataaatttcatcattaattttcagacctttgacacttacttcggtgtttaaaaatattgatgtatgcagacagtttatctcctaaatatgagggaatgttatcatgatcactcaaaggatataccataactcatctgacatttaaaatgtcagtttgattgataaatgagagtcctgggtagatgaatgtgatttaaatggggtttggtttgcatacagaccaaataaataatgattcagttctgaagactggctagactagggctagggcaattaattggggtgctgggacatgatatctgagcaacagatgctaggttatgctgctttggtcaccaacaggcctgctccataacaggcaataggtacatagacctgacatttaagagcagttaatgtaggcctcaagaccttgaatggtaattaactaacatgaagaaatggaacagagtgtcaggattatctattatggcacaatttcctattctgagcatgcccagtggtgggtcagaggggaggtcaaggaacagatgggatcaggaagtaaagagagctctttccagctaggacaggcctgaggggaccgaatagacaatgcaaggcagagaatgagtcacaaggaacaaagaacctggcgaaaaccagagccacactaggtttctgatgaagctggccaccatgggcttctctcatttaagacactctctcaatccctcacgttcttcaggttggcatatgactgaacttaaaggctggagagctgcagcctacatgaggctagcaaataattaatgcattacagagcacttaaaatatgatacagaaatatacaattctgcatgtaaatccaagtattatgaaggaccaacacagaaatatataggcaataatattatgtgaggccataagataatgactttttattataataattatgcctgatctaaatgagctatgtttgatttctgtgtactttcatagctttatagccaagcatgacttctctgcccagaaaatcctgcctgatttactctttagcttctctctaatttactttctttttttgagatggagtttcactcttgtctcccaggctggagtgcaatggtgcgatctcagctcactgcaacctccacctcctgggtttaagcgattctcccgcctcagcctccagggtagctgggattacaggagtgtgccaccatgcctggctaatttttgtatttttagtagagatggggttttgccatgttaccctggctgtggtctccaaccctgacctcaggtgatccacccacctcagcctcccaaagtgctgggattacaggcgtgagccaccgctcctggccctactttacttttaccagctagggactgtttctcattcaatacatatatttgtttgtctgctaagttggatgtagtagttgagtagtggagttgaaaactgagagattgacagcagtcagttcattgaggattgtgttatcacgtgcactgggttagatagtgcaccctcaaaattcatgtcttttctggaacttcaaaaatgtggtttttgtttgcaaatggggtctttgcagatgtaattagttaagatgatgtcatattggagtggggtgggcctttaatctaacatggctgatgtccttataagaagaagagaagaaatacagagaagacacacagggagaatcccatatgacagaggctatcccgagtgacgtgtctataagccaaagaatggcaaggattgctggcaataccagaagctaagaaagaggcacggaacagactctctcctagagtattcagtgagagcatggccctgctaatactttgattttgaacttctagccaccagaactgggagacaatatgtttctcctaaaaaacaaacaaacaactacaaaccctacccagtttgtagtactttttaacagcagccgcaggaaactaatacatcatggaaatgaatttaaacatcttattatctataaagaatgtgaactgtcaaagcttactgttccattggacatcagtttcgtgtatcttttatcgtataatgcatgactagagtaataatttcaaaggacattaaaaaatacagacattttcttgaaggtacccaaacgtttgaattgtgggtcaggccaatatcagcaagggcatttgatagagtttctcacaataaccttctgtgcatgtaaataactgtatcttctcaatagatttgttattgtatatttggtcttgtagacttacccgaggaagtcagataatagcgtatttcgatatactgtgagaaaaataggtacacactaaataggagtatgaaaatacacaaagaattacccatcagcaagagcacattatatttgtttttcttgaaacacccattctttcctccttctactttgttttatttttaatctggctctcttgcttatcttcaaagttttatctcccccaataaatcttcctgccatggtgaaggttaaatgtaactcttccatcatccacgctagcacataccatatgcatagaagttataaagtccttgaagacagagactctattttacacatctttgaattcaaagccctaaaatatttgagccctgaagaagttgttaggacattttagccaccagtgcatactctagtagtgacggtagtgatgtaagtacattcctcagcttttctgaacattagtgaagaattccttttaataaagagcaagattttccattgatactcagatggacaagttttggagtattctcagagatgaaaaaggattatttttcatttgatgtacatgtattctgtgattttgtgaacacaatggatgcttgctcttttcattattattgttattcctttgggtaaggcctttatgttgtcaaaaacttctatttaaaaaaagtgaaaataataaaacattcagccatttgcagtcaattattcttgccactggttagtatatttatttaccagggttcttaattaatgttactgagaggctcaaagatctgaaaaacagcattggttccaagtggctgcatttctttcttattcatttatttattttttagaaatgaggtcttgctctgtcacttgggctgaagcgtggtggcgcgatctgctcactgaagcctcaaactcctgggctaaagtgatcctcctgtttcagcccatgcctggttaatttttttttttttctttgtagagatggcatctccctgtgttgcccaggctggtctcaaactctgggcctcaagtgatcttcccaccttggccttccaaaatgctaggagtacagatacgagccaccatgcccggctagctggctgcatttctttaaggcccagagcctcctgtggtagcatctggatttgaaatgctggctgggtgcagtggttcaaacctgcaatcccagcactttgggaggccaaagcaggtggatcacctgaggtcaggggttcaagaccagcctggccaacatggtgaaaccccatctctattaaaaatacaaaaattagctgggtgtggtggcgggcacctgtagttccagctactcaggaggccaaggcaggagaatcgcttgaatctgggaggcggaggttgcagtgagctgagattgagccactgcactccagcctgggtgacagagcaagactctgtctaaaaaaaaaaaaaaagagaaaggctcataaacattgtctatgtctaagctgcaacaatgattgatattgtgaagattattaatagtgtgggtcaactgaaggggaaggaaaacaccaaaggagaatttttccctcccaaatcataaaggcattcatttttcagagaagaagagaggaatattactttcattaaaagaataggaaaattaaaattgttgttattagccacaaatcagggtagagctgtgtgaatccatggggagaatgtaagattataagcagaaatcaaggttagttttgtcttgtacttctggaataagaaagatgatatgtaatcagaccatgtctctgataattttgttaaattagatgaagaaaatcacatggataagaaaatgtaattaaatcactaaaaataagaatgtcattgttttcactttcttttgctaagtaggaggtgaggaaaataaccttttactctgtacatgagtaattccaatatcctcttagaaatgacaattggattgtaaaatgggcttgcctttgaccatattctgaaaggataatataatgagttggcaaaagaccccatgaatagagtttatgtagaaagcaacaaaaaaacacaaatataaagaaatgcctacaaccaaaggtcagtataattgatagcaagatttcaaggggaaaaattagggtcagggaagatataaaatttctgtctccttgttttggtgatttttaatctagaaataaaacaggaatagtgaaatattccatagtatatctaaatatccatctttgtggcagggagctagaaagattcaggattattatttataaaccaatttagactaaattcaaagactgaggagatacacctaatttagaagaaacaggagctctgagacctgactttgcatattactactaatttttttcttagtgctcgttttgctgcccaggctggagtgcaatggtgcagtctctgctcactgcaacttccgcctcctgggctcaagcaattctcctgcctcagcctcctaagtagctgggattacaggcgcccaccaccacgcctggctaatttttgtatttttagtagagacagggtttcactgtgttgatcaggctggtctccatctcctgacctcaaatgatctgcctgcctcggcctcccaaagtgctgggattacaggcatgagccaccgtgcctggccagggcctttttaagtattattttttcttctaaagttactgatgctcaaatgaaacctaattttgaaaaatagaatgtttgaaagaaatagattgaatgaaaataacacagctgatatttttagcaagattcttggatatagctttagaaataaactagccagaaggagcagtatggcaagattaccttttctttatatcaattagacatattgtatcgtatgacttatttagtactgaagatgtctgtgcctttctgcagttgtttttcatctattaaaagagaaagatactatctatgctatcttttcaagatccctgtggatttgaattttcaagtgtatagataaaccttgattgatgaaaaattgatggacaaaattaattttataacaaaggtaaagaagtgagtattgccttcataatgtgccccacagcttttaacagaatttctttaaacaatatttaatgtatttttaaacaattatatatttcaatattaaatcttaagtatgtttcaggaatatcttctttaagataattgatatatcccagttttcatacgttttaaattttttacgtctacagtattatattttcttttgaaaaattgcgtaacattaaggtagtaaataaaaacaaaaatagtttaatgtctcttgtgggaaatacagttttgttttgttttgtttgtttgtttgttttgagaccgagtttcactcttgttgcccaggctggagtgcaatggcacgatctcggctctccgcaacctccacctcctgggttcaagtgattctcctgcctcagcctcccaagtagctgggattataggcaatgcactaccatgcccggctaactttgtatttttaatagaaacggggtttctccatgttggtcaggctggtcttaaactcccaaccttaggtgatccgcctgcctcggcctcccaaagttctgggattacaggcgtgagccaacgccccctgcctagttgtttttgaccacatattttttctctgaaatataaatgatttgtagcccaaaagtttaagtctgaatcaattgtctgtagtaaatgctgcaccatctacatttgttaatgagaacaatacagaactaacttgaaaactgctcaaattttcccttgcataatgctcagtttttaaaatgtattgccttctgtcttctcaatgggattgctgctttttaaattttcattaattcctaaaccatattccattgtattttttttgtacatttgctttaagtgactgtctattggaggaaaagaaagtgtaggttttctggtgaattataatagcaatatgattcctggaatgaagcagcttttctcgtttggaatgaccataaaatggcaatacacttaacagtaatacccttgtctgtgttacagcaatgggtcttaatggttttccatacgtgaacttagccgcttgcctacagagaattactaagtaactagtatattccacatgtaaaaatctccagagggcttccacacactttaatacacgctgatatacaatataaatgcaacgtatcctgaagaaaaaaaaaaatcacaaactccgtgtgtggctctcaacaagctactattttctcattagaaaaataggaaagctggccaggtacagtggctcacacttgtaatcccagcattttgggaggccaaggcaggcagattacctcaggtgaagggttcaagaccagcctggccaacaaggtgaaaccccttctctactaaaaatacaaaaaaaaattagccagtcttggtggtgggtccctgtaatcccagctacctgggaggctgaggcaggagaatcacttgaacctgggaggcagaggttgcagtgagccaagattgggccactgcactccatcctgggcgacagagggagactctatctaataataataataataataataataatagtaaagctaataactatacaatatcttacctaaatgtttaagaacacctactaataatacttaaaaataccaaaatataaaaacaaaacatacaaatgtaaagaacatacagtcagtagtacagcaaatctatttgattacttttttcaaaattctattttaatttttttgctaattttaaagcactgttattaaaagaaaatattttcaattggttttattctcattgtatcttctagaaatactagttcattttaggaaaataaaaatagtgagagaaaacttttagctctgaatatggaccatgtcccatgcctgccactttgttctagtttttgttatttaattatcacacactataaaggagttcttaccaattcttttttttcttcagaaataattgattcttcagttttttaaactgctttattgaggtatgattggcatatacaccaattctcttttataggcaatgaaattggagatcagaaaaaattgagtaacttacctaagactacaagtaagtggcagagctagaatttgaccccagacaggcttcacatacaagttcacagggccatcagctgcctgaaggcagagaccatgatttgtatccatagtatttatgtatctctcatatctaaataaaatctagtcactattcagatttaattgatattttcaattacctttgtatttttaaaagaagacacattatagaaatttgatactaaatgtaagtattcagttctttagttaaattgaagaaaagcagaaataatattctgtattaatacattagtgaaaagtcagcagctaaaatgtaagagatgtttggtgacacaagtaaaaatggattgtatactttttgccttatactacctgactctggcatttagatataacttgttccagagacctgtcataacttatatgtttcagacaagaaaagctttgggttacctgaaatagtgtagttaaaaatcaaacgctgtactcatctagagggactttgtttatccattcaaaaatacatgaacagggctttatcttggcctatttgaactccatgccagagggcagcataacatagcaaagcatgctgacctctccttatcactgcccttgttgaaaaccttgagttcttcttaatagtctggtatatagttttaaaatgttgatattttgttcacagctatatgtgatctcctaaacctttgcttcaaaatagtctatttctctgttgtggtttgcttcagggtaaaagccctctgatttcccacaatcaggacagtaatttggtaggttaataagttatgttgtgtgttagtgaaatataagtgctaaggaaaataaaagtagtagggcaagggaaatcaggaatactagggcctggaaaagagcatgaaataatgtgttatgatgagttgcactgagcaggttaaatcagaacgagacaagaagccaactagatagagaagattgttccaggttaagggaatgagtggaaaaaaggctctcaggtgagagtgtgttcaaggaatagcaattaagactgtgactactggccaggcgcagtggctcccacctgtaatcccagcatttttgggaggccgaggcgggcggatcacttgaggtcaggagttcgagaccaacctggccagtatggcgaaaccccaactctactaaacatacaaagattagccgggcgtggtggtgcacatctgtaatcccagctactcaggaggctgaggcaggagaatcccttgaaactgaaggcagaggttgcagtgagccgagatcacgccactgcactccagcctgggcaacagagtgagactccctctcaaaaaaaaaaaaaaaaaaaagactgacttttataaggaagaaagtagtaagagatcataaaatcaagaggatttggtggtacagattagagacttgtacgttttcgtttctgtgcagtagagaaagaacacagagacatttgcaaaacaatttaagaggggattccttcaatacttttctaatatccctctcccaaaggcctgtttattcttcagctaatttttactgataatttgtattttttagaaagaacgcatctctttattttatagtcatgtatcatcaaattatgtagtatataattatattagatcattacatgagcaggaatgggaacaatcacagttgattcttgctatgttccggttatctattgctgagtaacaatttattataaaacttaatagcttaaaacaccagtcactttttatagctcatgattttgtgggtcataaatttgagcgtgggtcaactgggtgattttccactctatgtggtatcaacttgatccctaaatgatactcagctggcagatgagctggtcagcagaatccaagacagctgtactcatatgtatgttgctttggtggagacgacagggagacttgggtcaactagatctattgactctagtacctacatgtggcctcttcagcatggtagacccaggattgttgaacttatcacatgggagctcagggttctagagtgaatgatacaaaagacggaaaatataagtttctggtatcttcaggcctaaccctggaaactagaacagcagctctttcactgcaggggtccccaacccctgggccacacaccggtacccatctgtggcctgtgaggaacccagctgcacagcaggaggcgagcggtgagccagtgaagcttcatctgtatttacagccacttcccattgctggcattactgcctgaaccctgcctcctgtcagatcagcaatggctttagagtctcaggagcacaaccctattgtgaactgcacatgtgagagatctaggtcgcatactctttatgaggagtatcaggcaatctagtgactgatgatgtgtcactgtctcccgtcatgcccagatgggaccgtctagttgcaggaaagaaagctcagggctcccactgattctatgatatggtgagttacataattattttattatataatacaatgtaataataataatagaaataaagtgcatgataaatgaaatagtctccaattatcttaacactatccctcacctcccccccactaaccccagtctgtgggaaaattgtcatccatcaaaccccagtctctggtgccaaaaaggctggggaccactattctactgcattctattagagcagccacagaacccacccaaattcaagggaggaaacaaagactttacctccccagtgaagaaatgtcaaaaaaattcgcagctatctttaatccgccaaagcatacgatttatctctcatagagagatttctagttaaggtttttcagcaggtcatcttgatccatagtaaatctaacaaagggaatggagagctttggttaatctaatgattcagttaaatggagatccattaaaatagattctactataattccattcattatttttcacattttttctaattttttattattcatagtgtttttgtccaatgacctttaaaatcatgaacatttaatatataggaatggcatccatctgaatatggcataattataaatgaatttactttaatatctagaaaacattcttgttcgttctctaacttttagataaaagccatcccttcttttatttaatttaactctactttaaggctttaaaaacctgactgatagggaaaaagtccaaaactgggacgctcgtgtagactatttactgcaataaatcattgtgaaaaatatgggcagtcaagtgctggatattctatttctgtttgaaccctaagaaatatcaaccgtcttctcactggcttttagcacatctgctccatttaaaactatggcagggaggtgtgtaagattgaattgattgtctcttggagtttactgtgcttctttcgaaactttgtttttcagtaaaggcaattgcttcttgagcagtactggttattccacacccactaattatcatgcagccatttagagttgaaatggtaatcaaaccaatgaaagcccaagattagcagcgttccttcttcatttctggtagagagattcatctgaatatctataaaggattttgtggtgcattctctggcagatgcagtaaaacaagtgcaacatgaactttaaaatacagctttgagttttaggttgaattttaagttgaacatatttcaaattttgcaatttaattataggagttaaatgatcttaaaggatcattctaggtctgaatagaattttaagagctagattttattaaagaaaagatatattttaagtgataaaatttatatattttgcccttcagaaattactggttgatgtttctattaaaattattaagatctaaatatacaatgatactcgagaccaattctcatttaaggaatggcatactgtatgacaggatgtgaggtgttaagagataattacatgcctagaaggtgtagtgaatcatatgaccaaaagccaagaacatccagagaccaaaattcacagtcatttcaaatatcattactccctggtgtgtgttattctacttagaaaattgcatgtttgttgtttgtaaatttagagacaaaaaatgcttaaattaattttttcatcatttctaaaaatttgctttaatatttactagcccagtaaaatgtattcaaatcataattataaatatcagggctattgagcaggggaatgtgtcaactgccattccggaccttcttctggaactaattttgattgccagcagaataaaatgcatgcaatgaatacaatgaatgtaatgctaaatcaaataatcaagtgtttatgtttatgtattttgatccccctatacatttaaaataactctgttttattagaagttctgtatttgagataaaatgcacctccctctcatttttcctggtttgtatgtgagaccacagtatttcacagtagatatccagggaaataacagacaaaagaaaggagagcaggaagaatattttaagatttattggccagcggcggtggttcacgcctgtaatcccagcactttgggaggctgaggcgggtggatcacaaggtcaggatgtcgagaccatcctggctgacacggtgaaaccccgtctctactaaaaaataaaaaaattagccaggtgtagtagcacacacctgtagtcccagctactcgggaggctgaggcaggagaatcgcttgaacctgggaggcggaggttgcagtgagcagagattgagccactgcactgcagcctgggtgacagagcaagactcgtctcaaaaagaaaaaaaaaagatttattaatttgtcttcaacaaaatactaactctgcagtgccctcaccttgattccttacttattgaggactaagcctatttttgtggattgaaatgatgttaattatctgcatccaaatacccctcataggggcgactgtgagcacgtccctctactagtaacacaatactcaggtgagagctggcaaacacaggaagactgaaaagcccgacttggaatcctgacttctacattttttaactgtgtagttctgggagtttcttaaactcgtgtgcctcagtttttccatttgcatctgtagaaagattgtaatagaaactaccttctctgttataatgattatatgagctaaagcatgaagaaatataaagcagctaaccctgagttagctctcaagaagtattttattattaacttgttaataccttcaacttataaaaatttaaaaattatgaaattttttaaattatgagatttacataaagttttcagaatagtctaatcaatacagacagaaagtagattagtagggcctggggacgtggagaaaggagagtgattcctaatgagtatggggtttcttttttgggctgacgaaaatgttttatattagaaagtggtaacagttggccaggcgcagtggctcacacctgtaatcccagcactttgggaggccaaggcaggtggatcacgaggttaggagatcaagaccatcctggccaatatggtgaaatcccgtctctactgaaaatatatatttaaaaaaaatgagctgggtgtggtagtgcgcacctgtagtcctagctgctcgggagactgaggcaggagaattgcttgaacccaggaggtggaggttgcagtgagccaagatcgcgccgctgcactccagcctggcgacagagcgagactctgtctcaaaaaaataaataaataaaggaaaaaagaaagtggtgacagttgcataactatgtgaatatactatatatcactgaattgtgcactttaaaagagtgaattttgtggtgtgtgagttatagctcaataaaatgattttaaaaaataaaatgagaaggatgagagaccggtatatttcagaatagtgcacttaaaaaatttgtttacagaacactaattgttcagcatactttctactggacattactgtatatatatatatatttagtattatataaatacattatatgataaccatatctgataaatattatcttactttatagatgatgaaactcagatcttcaatgatggaagtgacttatctattgttgagttgtaattggatcttatatatatttccctgctcccacagagcctacatttctgaaaaagaaattatgtctcttgtgataaataaacaagaaacatatcagataaaagtgttgcattgagaacaaactgagttgagatagtgagtgattgggtagttattccagcttcagtagtaaagagaatctttgctgaagaggcatgtcagctgagatatgactgtctagaggaaccagtcatgtaaaaactgaggaagaaccttccagaaggaaagaatagccagtgctaagacactgaatttcttatattttgtgtttagaaatgctagggttatagttagcaagatagcctggaaggagccttcccatgttttctcatatatgaaataactaacatggaggattattgtgaagttacaaaaatacatgaataacacctagtatagtatctcactcgtggttggtatataaaaaatattgctgttctattaattcctcaatatatagctattctatacaggtcttatgcaaaaaagaaccttagtgaacgtatttcaacttggtaagagttagttacacatgggctgacacaatcataagcatggaaaatagacaatagattgaaagcattaacaatggtagttggaacttcagaaaaacccactctttcttaatctatgatgaaggaaatggtgggttttccagtggtattgaaataaaaggaaactttttagatggtggagtaaggtatgcaaaggtagcgagcgtgtgcatctatggctggagagaaatccaaagacaagatagaatcacccttttgctctctgtgaaaactctgattttcctttcatggactaaggtctacactctccaatcatcttagttgcatacactattaattcatcaatcaagctacgtcatcctttgtgatatgttttgtttttctttcttctttttaattattgtgggtacgtaagagttgtacatatttatgaaatacatgtgatattttgatacaggcatacaatctgtaataatcaaatcaggataattggaatattcattacctcaaacatttatcatttatttgtgttgggaacattccaagtctactcctccagttaatttgaaataaacaattaattattgttaactataatcaccctattgtggtacagaacactagattttattcctactagctaactgtatttttatactcattaaacaagcccctcttcatcaccccctccccactacccttcccagcctctggtaacaatcattccactttctacctccatgagatcaattttttagctcccacatacgcgtgagaacatgcaatatttgtctttctaggttgtgttttgattagacaacctcttatttctaaaatttgcttaaattatttgagtacttgatccttcacattactgccaataaagcaaaccacagttgaaacttgatttttttctaatattttgaatgtatgctgtgtgcaaaggtaacaaagaggaatccatttaacagaaaacagattgctaatatcttcatcatttactttagattccagtctttggatatcagatttttctctggtcttcatatttatttgttttggcatcagattgcattttcttgcttggtttaaaaaaaactgtatttttttccctgtattatcggtgttgatttcctctgttcttattcttcaaattatgcagagaaatgtgtacaaagttaggaggagttaacgctatataaaataaactatctattaatatcattcggttaattttcaaagaggctgtaaatagatcatggatataggcaaataccagatgccacataaaaggaaaacctcaaagacattttttcttttattaaaaccatcaacagtaagaactgtgacagtaggttttgggtttttttattgccaaggttattatcagccctctaccctaaataagggaataaaatgatttctagtttttggacactgtgttatattattctgtaactacaggaacataatataatgctacagtcaaaagaataagcttagaaatcatctaagtttaaatttgtcactcattttctagaaggatgaccttatactatctatttaacctttctaagactcaattgccttataaataaaatgattataataaagacttcataagttgccatgagaaaagtattaagcacagtttctgagataaccaatattgataataatataataatcatcacaaaacattacctttctccttgtaaaaattataacgttaatggttttaaaaatgtaattctagtaccaaagtgaagtttgtattatgttctagttaatatatataaaaatttaaagaaaaactaaaatacatatagctgtgaaaatactcactaaaccaacatagaaaagcatttgttttgctctgtaaatctaaccttgatgattatgataataaaaataatcactgttaggttattttacttgtgattaacttctatttatgtaccctccctctattgatgtttaacaatagttcatagctatgactatttcatttcatatggctgttcctaaaatcatactgaacatctgactccatattcttaagacaacttgggacctctatctcttccctgcaacaatatttgtgagttgacaaacataaaagcctatgctttagcacgcacaagagatgtggaaaggtaccatttaaattagtaccataaattttcctttttatgtttcctaacctcatatttattgaaatgcattaaattaactcagacatctaaggatataacatttaatttacaataatctttatggttacttaattccattaaccttatctttgaaaggcgtcaaattaagaaatacagagcctgtcactttcatttattcgggggaggctgtgaactattcagatgatgtatctttgattgagggaaggaggtgcccaagaattagtcaattacgcaattaaaaaccccaaacctttcctttggtatgtttcacacaaaatctccattgctgtgctagattacactggatgatgaatcactacttgaatcacttcagttttgattattcaaagtaaaaattgaatggttggcattttcaccaatttaaaagcctcgccgggcacagcggctcacgcctgtaatcccagtactttgggaggccaaggcgggtggatcacctgaggtcaggagttccagaccagcctgatcaacatggtgaaaccctttctctactaaaaacgcaaaattagccgagcatggtggcacatgcctgtaatcccagctacttgggaggctgagacaggagaactgcttgaagctgggaggcggaggttgcagtgagcggagattgtgccattgcactccagcctgggcaacaagagtgaaactccatctcaaaaaataaaataaaataaaagccttaactttcattttctcaccagattttagcttgacaaaagctatctttaagggttgcttaggcatttcagtttgaaatgtttatgttcttgctataaaatgtgtggacatgtgtgtccaaatatatacacacaagaaattttaggtactgtcatagtgttgggatcattaagaattgtgttttcatggcgagtaaattaatttcctctgctgtgagtcactttttggtagtgtatgcatggtttaaatgaaactcactgaactgtttttgtggattcactgcttggttgttttactaccctagagagcaattaggtgtatgtggagtgtgttgaacctataaaattttacttgtgtgatgactgcaaagaaaatgaaagtagtgtcatgcaatccatgaaaactctgctgagtttctagctagtctcttaataaagtttacacaattcaaactctccaatcatactgaatatcactgaggctcttaagacttgtgaaaatcagatattttaaatttttaaattgtcatattatgtcgccaatttccatttctactctatatttatagtacttttttgcattttgagtgcacaagtcaacccgtttggccatacatagcaagacatgtattggtgagagcagcaaaaaatatgtaactgctcgtttacaacttttgaccagtagcgaggtcacactgagagtaccgctcaggagaattgagtcaagttttaggctactaaaatttgctgagctctgtgacctagggacatattcctgactccagcaggcctttgaagaaatcacgctggcaacctcacaatagatgaacaagaaaatggatgaacacaaccatattataagaagcagttatcagacgcatgggttctggagccaggctgtttgctgagttcgaatctcagtgctgctatttaatgactgtgaccttaggcaagttgcttaactctgcctctcttaattttggaaattaggaaaagaactacttacattttaggtttgttggaaagatttatatcacttaaaatgtatacagcatgtaacaattattgaattatacttaacaattattatctaggggaaaatatactgatgattttgtatattgtatatatatacacacacgtatatatcagtaactttaaatggggaagtcactaaaaaaatcataacttggtgtaaatatacttaatctgtatgccacggctagttttttgtttgtttatttttgccaagtttctttaatttctgttggccttttggggtcaccccattagcatctgcaggatagcttacttatacaggggaaagtgtctgttaccagtacagtacagtggtggtataaggaaaatctattaaatgaagtcctgggtgtttatccctataattgcataaatgtatgtttctcaggagtagtgttgtgtaagtaaatggataaaagtcatagagtgctaaagctaaatggaaacaaagttatttagtccaattcccatattttatagatgagaaaactgagaatcagaaaatggagggatttgttcaaggtcatagtagttattgtctgagatgaggaaaatatccaaatgtctgcttaaatactgagatatgcttaagttagcgttgaaaatattccatttaaaatagcaatattttcttcctcctgaacatctttgtactatttagaaaaacctagaaagcatgctggaaaactatccctttttcccttgtcaacctccaattaacacaaaagcccaaactgtacactgtcccttataaaaacaacctaaaattttgagaataacattcataatcttaaaagaaaattacctacttactacatatgctggcaatgtacttgctgggcaatcccacttgaaattcatagaaattaaacagcatttcagaacatcattccaacacctaattaatgacagggagtgactgctgactaaagaatgtgtccatgatactttcaatttatagcaaaaactcttaactattgatagcagaaatgtgatatataaggatcttgttctgtcctttcaaaagtcaaacagaaccactgtcccttaaagctgatcggcaaaggaagaagctgggagtccaaaggatttatttatacaaaatatgtatttccctaatgttcactttccaactttgattagacattttttttttttttttttttttttttttagcgatggggctgtattagtcaattctcacactgccataaagaaatacgcaagatgaggtaatttttaaagaaaagagtaattggctcaaagttccataggctgtacaggaagcataatgctggcatcttctcggcttctgggaaagcctcaggaagctcaaaatcatggtggaaatgaagggggagcaagcatgtcatgtggccagggcaggaacatgagagagagagtgggaggtgtcaaacacttttaagcaaccgtatctcatgagaatacactcaccatctgaagacagcaccaatgggatgatgataaaccactcgtgagaaatccacccgcatgctccgatcacctcccaccaggccccaccttcaacactgggaataacttaaccgggcgtgatggcaggtgcctgtaatctcagctacttgggagacagacgttgcagtgagctgagatcgttccactgcactccagcctgggtgacaagagtgaaattccgtctcaaaaacaaacaaacaaacattggggattacatttcaatatgagattatggcagggacaaatattcaaactatatcaggggtctcgctctgtctcccaggcttcagtggcaccatcgtaactcactgcagcctggaactcctgtattccggcgatcctcccacctcagcttccccagtagctaggactacagttgcgccaccacatctggctcatttttgtagaaatggggtctccttatgttgcctgctttggtctcaaactcctggccttaagtgatccgcccatctcggcctctcggagtgctgggattacagacgtgagtcactttgccctcccggactggttttatgtgtgaaggaggctgctgctgatttcatgagtaagctggagaaacacattaaggaatgatactgtccccttagttgtcaaccttcaaaataggaaacaaataatagcaaagaggtaaacgtggcagaaagcaggggtgagaaagggaacaatcagatatgcgaaacatcaaagaacaagaaatagcaacaaacccacgccagaagccagcaagaaaaggagaactgttataagtaccagtaaaaatgctgaagaatggcaataaaaaggagaaaaaagtactcacaagggaggccttgaaatgacaataatctattccaggatgaaaagaaaaggaaacactactccaaggcaaaaagaaaataaaaagtaaggaaaatcaagatagatgaatatcttcaaaaaatcagcacaatggagatagagtgtttagggaataagaaaaaaaataaaagtagacagatacagaaagaagtagcaaatgcaaggagcaatatccctattattaatgctggcaaattgtacttatatctctttccagctatatagcatgttcctgggaaatagcctaaagcactgagaattagggataggagaatgctgttactgtgagaatacgaattaagtaatgccagagaaaggctttgctgccaatataatagctgagtgatcaggccacgtcatttctgtctgatgtttcttcctgtcgaataggtaatagtattatttctctaactcaagggacattaaaaaaatattcagttaatgtatatataaatggagacaatatagacagatgtttaagaatattttggttaaaaggacagactcaaagccaaactttctgggttggaaatccaactctttcattttctctcagtactgtactgtaggactctctttttatacactttttttgtactgtcttttttatacactgactctcttttttccttagtttcttcatctgaaaaatagagttaataatagcacctacctcataggattgctgagatgagaaaattaacaaataaaaatcacttagaccagtacctatcacatagcaaggaaaatctcaactatattcattgtggtgatgttttgttaataaacttttaatatgaatgtaacatatcacattcattaatatataggaattatatttacttacattgataaaagtcctatctgacatcatcttctgttccttcattatttttcccttcttcctcactttttcagttctgtctctcttggttcattccaaaaaagggtcatttcttttttgcctcaactgcagaatgcatattatttatcaagcaattattgagcacttaccatatacaggcactgttagaaagacatctaaggcacaattttttagtgtgctgaaatagttattcattcagcaaaagaaggagctcataaaaataaaaaagaaatgctatgggtaaatataagaacatggtgatttcacttggtcctcttggatgtaaaaggaagctttaccaaaaatgttaaaataataattgatggttgcagtgctgctgaattacatcaaactttctattgtctcacatttcactttctaatttgtccgttcctagtgaaactagaagctgaaaccacatttttactcatttctcccgttatcctccccccaccactataaaaagagaacatttatgcttaagtgcttctgatgatgtgttctcagtatctcattctgttagactaatagtcctcatgccaagttaaagtggttggaaatcctagcacaccttgcctaagtgtgttttatttatcttgctacaccccgttttattgtaatagtcttgggagagccccgaaagatggcattgacctatttctataaactttaagggagcaggggacgatctccctccataacaaattccaataaatgatgaggttaaaaattatagaaaggatatttctagagaggtatttttatgtgataaattttaatatatatgtatatagtttttaaacttgaatatataaaatatatactaaacttgtatatttatatatgtattaaacttgtaccacttaaaaattcttctgtagaaatatcttttctataatttttaacctcatcatatataatgatggtaattcttcgtacttcttactcctaattgtcttagttcaattgggctgctataataaaaatatcatagactgtgtaatttataaacaacgaagatttattgctgcagaactgtttctgcagcccaggaaatccaagatcaaaatgttggcagatttggtgtctggtgagggttctgtctgcttcacagatggtgccttcttcctttaccctcacatactggaagggcaaacaagttcccttggcctcttttataagggcactaatcccattcatgagggctccgcttatatgacctaatcaccttcttaaaaccctacctcttaatactgtggcattggggattatgtttctacatatgaattttggagggacacaaatattcaacccatagcactaatgaaatacagcatttttagagagcaatgtctactattttacaggcagcttgctactcgtgatgacaatacttcttcgatctagtatcccagcattgttccattaacaatgtatgcatcttaccaatgtaatgttcagtaaatattttgcatattttaagaggaatctgttgtggttttttttttttttttttttttttttttgagacggggtctcactctgccacccaggctgaagtgcattggcttaatcacagctcactgcagccttgccctcccagaccacaggtgcgtgccaccacgcctggctgatttaaaaaagaaattatttgtagagacaaggtctcactacgttgctcaggctggtcttgaacttctgggctcaaccacccctctggccttggccttccaaagtgctgggattacaggcatgagccaccaaacccagcctgattttttataatacaaaataatatacactcactgccaaaagtagaatacagaaaaacacaataaaggtaatagttgcctataattttgctattcaggaataaccagtgttacctgtttggcacagacattcctattgagaactatataatgatagctaatatttactagcacttggtacatacccatgtttcaattaccttatatgttaaatattatccatttatgcctgaaaataattttataatataagtactgttattagaccattttaaaaatgtgaaaattggtgcaataacaagatgcattaacttgttcagggtcacaatgccattataaaatggagccggaattctaaaccaggcattcaggctccagagcctaggtttttaaccactaagaataatacattttagtattttagcatacacatagttttggaagctgcttaattcacttaatatatcatatggttttccaacgtagttaaatattccataagaatgtgatttttttatgtctgcatataaatatattaataggatgtaccagaattgttttcatttctatttcatgaatatttagtttgcttctaatttttcacaatagaaatgatctagcatattttataaaatttttgagcagatgtacaagtatttagagactagtatttgtttaaataacacgtgttggacgttagtggggtatatatcaatgtgaaacatgaagtagatgtttgctttgtggtaactatgttccaggaacagtgctaggaagcactagggactggaaagctgtaaaaaagccagtctttctgttcttaaatatcttataatctaatggagagagaaacctgtagaatagtgcgtttcagtagaagcaagcttagtgtactgagaaatgaaaggcagatgatgaagtttggacaatggatggaaactatcttatcaagagttggggttataagaatgacagtaggtgatatgaagaaactagtgttttaagaagatatatgtggcagcattatagacatatggggatttagaacaggattatacctactgaactggacttattttatttctagaaattttgtgataataaataccatacattatatgttgttctcatataggagacgtaatatatgggtatgccattaatcaaaggctgattttaagtggaagaattcgttctgttggtttacagtcccagttataaattaatgggcttaccacgtagttgttcccagatcttggaagtattgaagttttttaaaaattaattaatttatttttaactgacaaataatagttgtacatatttaccgagtacaacgtgatgtttttgatctatgtgtatgttgtagaaagagtcagtcgagctgactaacatatctatcacctcaccaacttatcattttttgtagcgagaacattaaaaaatctattcttttagcaattttgaaacctataatacattatttttaactgtggtcactgtgaggtgttgaatgttttaggaaattctcagataatctcagggccaagtgttaagcagatcattctctgagactggatcttctgcagtatgtctgcgaacttttttatttcactctaagcctttgttgttgccttcaggggttactgactcacgtttaactcaaggctgactgagttagatatataccgcctatagttgatgggttttgttgccagaaatattcttttgcttatcagtggggaaggtttttgcttctactgctggatttaaaggtgtccctcaagattccattactcagttcattgagaaaagcttaaagctaacggaggggagttctgagctctgtttgatgaaggaggctgggtaaaataatagctcccaagttggctcaagttcttccagatgttcatgtttatgtaaaacttaacacttagagatattccatgttgtaagatgtctgtgcaaaagttccttatatcaaattctaaaatgatttttggtcatcaggtgcaaaaattaacactaatcatctaaaataaccaaccagatagattttcattctgtttgacttttgaaagcaaatacccctatgatattgagtgagtgttttattgtttgattttccttcaaacttgctgtaaccctatgggaaagatatgcaatcaaaataaaagaacagtatccaaaaataaatgggtcatgaagaattgtgcttaaaatcgttaagtaaacagacacacaccacagtgatgagattgtagaaactggaaaaaatgctgccagctgaagagctgcaaagagtttggcttttcatgaacttagttactgaaatgaaagttcctccctaggagagaagccaaaatcatagcacggtttgaataaaagtacacctttccaaagttactgcagaacaattatggccgggatcctttactcttattgagaaagctcggtaacctcttattttaaattgacttccattgagcaataatgcctccctgcttgcactgtaaggtactttattgggtaatgtgtttacaagctggtctcatttttctttttgtaataggagatgggtagcttactgctatttggaggtgactccaggaaacatgattttcaagatggtcattttaaaaaattgtgattattgggaataataactctagagacaagatttaatggacttacttccaatttattcagtatgtcaccaggttattgcagttctagttttaaatctgtacattcgaagtctacgttgttccctgatgtactgtatatttaggtttgtactactacatataggtgctaggtttagctccaactctcagcaggagcctaacctctcagaacaattattgtagccagatctttggtggccctactacttgctttttttttaaccactactatttctttaaaatcaaagatatggcaaacatattactaaaaggaagaaaacccatcttcaacaacattatggtgtttttcacttcaaaggcttattttgtatgcatcatttgatttaatttcctccaaagccttgggaaatgtgagtgattatcatcttattattgttgttgataaatagtagctactatttatttagcactaactctgtatctggaactgtggtaaacaccttgtagtggaaactaacaatagcctcaggaggctggaattgatattatccccattttacagacaacgaaatgtgatataaataacataacgtgccaagattatgcagctagtacataggagaactggaattcaagccctagttaaattgctttgacttcggagcctgagtgttgattgtctatggcatgttgccaagctattttatagctggaaagcctggtgatgctaaaagtttaaataccttgccctaggtcataaaattagttcccaatgccttccaactgaaatcccaaacattttttattacactttgttgtccgcaggactgctacccgcttatatggtactctttgaaaattaaacaaagaggcatcctccccacttcccaaatccacagaatagccaattttgaaagaaagcacgcttttttttcagtatgactctgctttattggaggatcacagggatggctggggggaatgtgggtatgatactcaagcacctttgtgcaaggtgcaatgcccagagccataaggagtggccccagttgtgctcatttaaaggaatagttggacaattctagataatattaagggagatatccaaaagagtttcctataagtatgtgctcttaagagctgtaaggaagtaaaattttgaccccattagttacatttctaacatgatctaacatcttcccttcactgccaacgaaaatgtttaagaagatataatctgacagcagttatgctaaaactcccctgaagccaaaatgtgtcacttctcaaaatgaccctcatcttcacaagcccttgaagaggagttgaggattatttatgaactaggttttaacctaaggtgatacattgtgctgcagttgttactgagcttagggatcattttgtctattcatttcaggttaccattaggttctttttcaaaatcaattccttttaattatacagctaccctgggcatatattaaatgtcttacaacattgatacgctttcccctgaagtactgacaaagtaatagatttaatgcgcaaccacaggcataaaaacccacacacagtgtaagcatacaatgagtacactgatactcacaaaagaggtttaaaaaaatgtctgtaactggggatgtggtggtgtgagggccccatgaatttttagcttggaggatatcttatcgtaccgatgaaccctgaggatatgcatgaaaacaagctcctactcacaactttttttgcctgaatggtaagtttgtctgcagggcttggtctgattgatttgaaggagcatggtctagaaagtggttctcaaactgttggataacagaatcacctggggggtctacctaaatgtgcaaaggcctaagtcttatcactgctttaatgaatgtaggtctctgggtttataatgagctcgtcagttgattctgatgagcacctaatttgataacaacatgtcaatgggtacagattctcaaacttggctgttcattagaattgcttgagtctcatttctagagactctgatttcattgatatgaagtgcagtttgggcactgggtttttttcttaaagaagttcttcaggggattctaatatcagcaaagttggagaaccacgggtctaggggcctcgctacccgatgtgttgtccaaagaccaccagcagcagcagcagccgcagcagccccagggaacttattggaaatgcagaatctcaggtcccacctaaaattaccgaatcagaacccgtattttaccaagatacccaggtggtttgtatgcccattaactcttgacacacacttgtttagggagtcaggtagagctggattcttaagcacttccggttagttggatgactgaaaaacctctctgagctccaatctcctcacctgtaaaacgagtttaaggaataacattaccaatattgcaggtttgctgagaagattcttgaatgcaatacctgaaactcagtttaattcctagaacagtgaaaagcctcattaaatatgaagtcccggccaggcgctgtggctcacgcctgtaatcccagcactttgggaggccgaggcaggcggatcacctgaggtcgggagtccgagaccagcctgaccaacatggagaaaccccgtctctactaaaaatacaaaattagctgggcgtggtggcgcatggtagtcccagctgctccggaggctgaggcaggagaatcgcttgaacccgggaggcagaggttgcggtgagccgagatcacgccattgcactccaacctgggcaacaagagcaaaactccgtcatatatatatatatttatatatatatatagtccctactagaagagagtccctgtgaacctttttttacactagtggccccagagctaatgaggccaagccccaccaatgatcgtcgtcacagacattcctgtttttctgatatttataaaggttccttttaggtatgaggtgatttttattcaaaagaacaaatgttcccagatgccaagtgtcttccgctaaaaggataaatgatcagaaagcaatccttagctacagtgtccttgaaggtgcattgtggaatcttgcactgttgtgcaattgtgaacaacttcatcagacagtactgcgtatttgtactgtgttatccttaatttttccctttagatcttaatttgttatttatttcttccctggccaagagctaatttctttacagaaactcatatatagggttccttttttcctcctcaagtcagtaacttctgcaattaactacttttttcttaatttctctaactttggcccaactaaatattttcccatcattcctgttttgccgccctcgagctaggacatggaacttacttgttcggaaaagcttctatctgattgaaagggcatgctaattctttctttatagtgtaattgtttcacatttaagagggaaggagaaacgcctaaagtaataccacagaagaaataccctcaactaatctttctaagcagtacgacaatgagtaatgattacagttaattaagttaggcaacctccatttccattcacttagtagcactgctaattatactcatgctacaaggtttctttagttcttctgtaatttggatgcagtactctttgtagacaagggaatacggtacgattaatgagatttttcccaccaacacctcctgttctctccaaatgaaatttccgcatctgaaaattgagagtagggaacggagaaaaaaaaaatcagtcacattttaacttactgccagcacggtccatgcttataattgccaaatattttatattaaagaaaacaaggtgtgggtttttttttttgtttgaaaccttgtaaaattgtggcttacgtaaaaatgaaataagtatagaacatggctttttaaaaatatcagtggcaatgataatgacactttatattgtatgcttttggtcgcattaaataaacatatgttgagcacatactgtttgccgggcactggatctactaaaaaaaaaaaaaaaaaaaaaaaaaaaaaaagcaaaccttaactgtaactctggatttcttttacatgaacttcaatcattttaacaacttactctaaagaaaaccaagaactgcagctctacttggttatattgttaatgaagtccttggaaaaatttagtttatatgctttgatcagatggggattgacatacttaagagttttatttttaatctgaaaatccacttcaatcttatgctctgggtaaacagtcattacagaagcctgacacaattctgttttttcaagaagcaggattcaaggtttaacttcaaatacaaatttgagtaagttatacggattattccttttaattctttttttaaaacacagggtttatgtggatgaagtttcgttcttaatctccatttgccttaagaattaacttctgcattgtggtttagattgagtttaagattgtttcagattttaaaatgtatttttaaaggtgtgtctggaggaagatatttgtatgtcaagcactgttggttttcataggaagttcaaatgtgttttcagcagcactggacgtttttagagttattttcttctcctagcatcacacaggtgcgcaactttataggtccagtctcttctttttgcttccttctctgcttctttttctttttcactaacaccagtttgcataaatgagtgcactgtcgagttcacgtgaataccagacaaaaatacaggtgtcttcataataatcagctcctctaagtctactttccagtttctgcttcagactcagataaatcctatataaagcagacgacacagttatttctagaggaactgaggttactgattagaagggaacgtaatcaggtagattgagccggtgagggaagaaaccattgctgtgagaggggagtgtttgcaaaatgctgtctgtgaagctgaatctgtgagaacacctcactattcacggcaaccggagtggaagaaacaggtgcaaaaagattgtgtgtttgtctgcttttgtgaggctggtcagagattctgtgcctgctttatctgtgcttggctatgactctacctccaggtttaccataccccatagaatgtgtaagagaaaagtaccaacagggaaatcagcaaaaagctttcctatgaaggtgtgtagccagcctccgcagaatttgaaatgtctgaggtctcatctggtgagtaaaagctgcagataaatgcaacagccattcagaagaatgataaattccacaagcattcagaagcaggcttccctaaaggtgactcttttggtcaatttgcaacccctgggatatatttggatgactcctgttccatatgcctttctataaaagttaaattggggcttttgttgtgaggaagggaagaaaggggtttgacaccaataacctataggataatgcaaatcactgaaataagaaggaacccatattctactttttgggttgtggctttaatgaactttgtcttcaggtatctaaaattatttctagtatgaagaaaagaaaaaaatatccagaccttaatctataaacgataatatttttacctcaaattaaatttctaaggacgtagactacattcataaactcattagaaaactaatgagggatttttatattaacaatagaaaaacctgtgtttcacatatatatatgggcttatttatgcatatatgtacatatgaatatgtgtatgtgtatatatatacatacacatatacactcacatttttaagaagtttttaatcaaagaagacggaaataacaaggatccttgtgaatagtaatttagacatgtttagacaagcacaacttattaggaagcaaactgggacaattgtaaacagtaattccaggctgcctaattatctgaaatatctcagaatgattttagaggttaaacacttattattaaatggtagcttctaaataaagtgaaaaggtgtagtgatttatcaggtttttttttaattatagaatatcctaaaattctaaattagcatatattctgttgccaatatatactgtcagtatatttgaagtatattaatttctaaattatgttacttttattaaaattccaaagagtttctgacttggacaagttttctctatctttaggaagacagctagtttttttttcaggggggtgagctaaaagagttaggataaagtacaccgcattaaattaaaaacgtgtgttgggaataaagacaatccaaagttaaaagtctatttggatctcaaattttcccataacttgatttgtaagaaaagttacccttttgcaagtcttctctctcatttggtctggactaagtggttgtcatttctcacttacagattgctgttttactaatctctttataaatatattttttaattttatatctgtattttattcatcagattgtcctggaagtacagaggccagttgatggtttatgagttcaagctgagccgaatatagctaagccctgtcttgcctgacatttcatcaaaagctgtgttgatttgcaatgtttaccgacctatttattgaaccttcacagcttgaactatgccaccaagctcgctgacattgctgagattatctctaaatgcatgtacaaactaaggaggaaattgaaaaataagttaaaaacaatcatccgtctatttattaaattatgcttatagagtccttgatttatgtatttgtttgattgttctccgcaaagccccatgacctgatttttctttgatcttcccacacactcttggaagacgatagattagaacagtggttctcactcttccttgagtgggcatcagattcacctggagggctggttaaaccacagcttgctggatgccacccccagagtttctgattcagtccttctgaagtggggccccaacctctgcatttttaacagattttttaggagatgctgatgctgctagattactaagaacagaaaatgagtgttctaatacaaagagcagaaaataattgttcttaatctagttacctgtgttctctttatgcgttgtttagtttacactgtacaagaaaataaacacatatcctcacaaaattgaagcatatattctactaaagattaatatattaaaatattgaataaaatattaaatatctatgttaggaaattgtattcctgctgaaactggcagtaaaattacttaaattacttagcagtaaaattactgttgacaaaagtaaacaattggtcattaggtctcaaatacgtaaaacctcaattttttttttttttcttgagacggagtctcgctctgtcacccaggctagagtgcaatggcacgatctcgggtcactgcaacctccacctcccatgttcaagtgattctcctgcctcagcctcccaaaaccctcaatttttaattactcctttgattcttattctctgcgatttctccctatgtaaagttttagtctattatatttttagtaaaatgaaagcatgatccatgagataagcacttgaatctatactatacatcaaagtctccccttttgggccattaaaactaagatgttttccaacttaccttaccaaagccacagtttgaaaactgaaactatgaaaaaactggatattttgcttaattataatgcttcgtaaaaaattagaacgtctttaaaaatgttaacaactaaagtcaaacattcaaaaattataacctttgctataaagttatatgttcattcattgtagtcactttcttttagtaaaatgtaagcttttgatgtattctaatggggcgcaacgtttagattaaatgtttaatatggataattgacttttaatgaaatttaatctagatgttcgtaactgagagttaggggtgaacatgcctttaaggatgtagacatttttattacaattattttctccatgtttttgattaaacatatcaaggaaatatatattattttttatttaacttttctaatgtattaatttttggccagtcctacctatcacatgcttcagcaataatcagagctttgatgacaatgtcacattattttaattcagatgttattccagtttgataagatggagctgatctttagaaaacaagtgtaccatatttctaatctttaaatattatattgaattatttcagcctggctcacttgccagtttttcccttttgttttcatgattaaagcaactgataattattaacatagataagatttatgacattaatttatggttttcttcataaaaataaagccttttttttttttttttttttttttttagatggactttcgctcttgttgcccaggctggagtgcaatggcgagatttaggctcaccgcaacctccgcctcttgggttcaagcaattctcctgcctcagcctcccgagtagctgggattacaggcatgcaccaccacaccaagctaattttgtatttttaggagagacggagtttctccatgttggtcaggctggtctcgaactcctgacctcaggtgagccacctgcctctgcctcccaaagtgctgggattacaggcgtgagccaccgcacccagccaataaatccattcttaacggaattttagagcataaatctgagaaaagaaactaaggctgtacgtactaggtctcctatacaccttgtctttcatcattgaatccttagtagttaatacctgcttggaatgtaatgggaattcaataaattaattaaataaatggatgagtgaatcctacagacaattttgccaaggaagaaaataaagacagggtatttttatttctttcggttttttttttttttttttttttttttttttttttcagacagagtctccctctattcgcccaggctggagtgcagtggcacgatctcggctcactgcaacctccgcccttcaggttcaagtgattctcctgcgtcagcctcccgaatagctgggactacaggcgcctgccaccacgcccagctaatgtttgtatttttagtagagccgaggtttcaccatgttggccaggcttgtttctaactcctgacctcgtgattcgcatgccttggcctcccaaagtgctggggttacaggcgtgagccaccgtgcctggccagggtatttttatttttattttatttttttgagacagcgtctccctctgtcgcccaggctgaagtgcaatggcactatctgggctcactgcaacctccgcctcctgggttcaagcaattcttctgcctcagcctcccaagtaactgggatataagcattcgccactacgcccagctaatttttttgtatttttattagagacagggtttcaccatgttggccaagctggtctctaactcctgtcctcaagtgatccgcccacctcggcctcccaaagtgttgggattataggagtgactcacaacgcccagccttttatttcaatttttactgctgtttgttttcttccaaatgaataataaatatgacattttattctgatagctattagattatgaattgaatgtgagaacaaaaggcattctggttttcgtttgttttaatattggactgaaaaaaaaaaaaaaaaactcatttgaaccgggcgtggtggctcatacctgtaatcccagcaatttgggaggctgaggtgtacagatcacttgaggtcaggagtttgagaccagcctggccaacatggcgaaaccctgtctctcctaaaaatacaaaaattagccaggttgtggtggcaggttcctgaaatcccagctactcgggaggctgaggcaggagaattgcttgaacccgggaggcggaggttgcattgaaccgagatcgcacccctgcactccagcctgggcgacagaggtagattctgtctcaaaaaaaaacaaaagaaagtagaacaaaaactcatttgagactttcaggatacaataatttgtttaccttttcagttttctgattcctcatggtgaaggaatcatatctcttcagtgacacacaaacacacacaggatatatacagttatgtgttaacaccagggatacattctgatcaatccatactaaggtaatttcatcgttgtgtgaatgtcacagagtgtacttacactaacctacgtggtatagcgtagtgcagacctaggttgtatggtatatcctatttctgtttggctacaaacctgtacagcatgtgactgtactgaatactgtaggcaactgtagcacaatggtaaatatttcaatgtctaaaacatatctaaccattagaaggtacagtaaaaatcccgtgttataatcaaatgggaccactgcggtatatgcagtttatcattgactgaaacatccttatgcagttcctatcttttcttttgggccacacttggaattgaaatggaagctggagaaaggaagaacatgaaataaactgatgtttttccagccagtcaaaactcagcctctgtgttttagagaaagcattcggaacacagttgagagagggagagaaagagaagtggaaggtttagagggaggtccccgcttgtttttatctcttcaagcagctctaaatttgtccaaagcagaaaaagttgtacttcgcttcactctatattcaagactcaaaccaagattaaacatgaacctgtgggaaagttctttttaattaaactcatgttatttgaaaatacattatggtaagatatttttttgaaagttaagagtcagattttgtctgcataatgaaaagtgactaaggagtgctgaagttatcactcaattatcaggaaatctagaaaaattactttccaataaaaatgagcatcaatgatttctaccacagccttttggttaaagagtaatgaggagaaattctgccatgtaattaaagataatgaaattatcaatcaaggctaagctgcattaggttctttgactaaaataattttatacaattttaagtataaattaagttaaaatatatacattgagtgtgtgcattaatgtagacagtgccaaatattcaacaaaattatttcaccacctttgatttttgttttttgttttttgtttgtttgtttgtttgtttttgagacggagtctcactctgtcacccaggctggagctcactggtgcaatctcggctccctgcaacctccacctccaggctcaagcaattctcctgcctgagcctcctcagtaactgggattacaggcatgcaccaccgtgcctgactaatttttatatttttaggagagacggggtttcaccctgttggccaggctggtctcgaactcctgacctcaagtgatctgcccatctcggcctcccaaagtgttgagattacaggcatgaaccaccatggccggctgatttaagcacctttggaatcataattattaatcataaatgaaaccaaactaaaaataaagtataccacatgtgagaacattccaatgaataaaatcatttctgtgtgagctagcctgctgttcaaatttgtttatgcttatgcttcagataatgtttacaaaagtactgacagattcctagaagcacaatttctaaacacttaccttggaggtttctagggccctaaaaatatttctagtcatttcaaaaaaccacaaaacaactacaaaaaatgtacttctcccaaaggccatacgtagcacatgcaaaaagagattctgcagagcattttggaacgtaagtagcttttgtggttctgtgtctcaaattagcctgttcttaaaagtctgcaaattaaaaaagaatgataggccaggcgtggtggctcacgcctgtaatcccaacattttgagaggccaaggtgggcggattacttgaggtcaggatgtcgagacctgcctggccaacatggtgaaaccccgtctctaccaaaaatacaaaaaaattaaccagacatggtggcatgcgcctgtagtcccagctactagggaggctgaggcaggagaatcacttgaacctgggaggcggaggtttcggtgagccaagatagtgccactgcactccagcctgagagacagaggaagactccgtctcaataaaaaaaaaaaaaagaatgataaattgagtcaaaattataaaaattcaacagacgctggcacagatttgagatttgaggaaccagtaaaaaacgtagtacatattgataaatggcaatgtggtgtcaagatattaaaattggttttaatcttattaaccaacataaaatatggaaaacttatacatttaagtgggcccagaaaaaagtttgcaaatagcattccaaaaatcgatagaataatgtgaatgctttgttttctaatcttcacataatagggttggactagatgatttataagatccagtatatagcccctaataataacccctttaaaaagtctttttttttttttttttttttttttttgagagagtcatgctctgtcacccaggctggagtgcagtggcacgatctcagctcactgcaacctccgcctccctgtttcaagcgattctcctgcctcagcctcccgagtagctgggattataggcacacgccaccacacctggctaatttttgtatttttagtagagacggggtttcgccacgttggccaggctggtcttgaactcctgacctcaggtgatccgcctgcctcggcctcccaaagtgctgggattacaggcgtgagccactgtgcctggcctaaaaagtgtttcaatagaggagagaaataaacaagatcctgaagggataagaagatgtaaaagttgttgctgatgttctgccgcatatttctttccccacccgagttccatgcagtatcttgctttgctataaacaggagtaagccagaaatatgaggggttgtgttaatgtcaccagaagcgacctttaactacgaggggatggaagtacttgaaaaaagcacgcagccatctcatcttctggtgcataattctgaggcatgttcctcacagcttctcagagattcaccagcaggactgagccccagaataatgtgctcattgacacacctttgattgcctccttacctttcctaatctcactttctctttcctctcacttgtactttttgtaatcaattgccagataaactgtgtacctgcacctcaaatccttgcctcagtgtctgtctggggagaatctaaagtaacacagaaggttagcgagaaattgtttcacatgcttaaacaaaacagggcaaaggcacttaagatgttagagggagggagggtgaggaaactcacacgggatgacttcactctgtttagtacctaaaagtgaacaggaggtggatcgaaaggaaacagttagtgaacctgcaaatcaataggaagggttagaagactggttatgggagatggaccagatagcccagtaagtgaagaaaaggctcatggaacagcagagaaaatggacatatatcatccatatattttgtttccatcctagtctaatttacccttagatactacaataatcccccaactcatctttgccacttgtgcttttgtccttttctactcactccatactctacatggcctaaaggttgagcttttaaaaacataaaccaggttgtgtcaatctctgattaaaattcgttactgctctgatgcgtccaatatctttaccaagaaccacacttcatttttcttccttttcttctgcagtcttgctgcatttcagccatactgacctgctgccatttctcaaatgccagtctctgtactgctattgcctcttcctggaatgctctcctcatccatcctctaactgccttgatcgccactgaatatacactaacatgcatattgtcagtcacgcagtagtagcttaatatgtatttgcggaataaactaatgggaaagagtaacagcatggttcagttgatggtggataatagtgatttactgagtcacaaacaacatcatctgatgccttagcaaagaggagtaggtattggagaaagaagacaatacttacaattctttacttccttgagctcattttatatgtgtgtgtgtgtatatatatatataaaacatatatatgacatatatgacatatttttgacatatgtcatgttatatgcctccttctctattatatatacaatgtgttcaaggaagtaaagatgttcaataaagttcaaggaagtaaagtctaaggtgtctttgtatgtagcactgaagtgatcagtcagagtccaggcttggctggatatcgaacagtggatgtgtgaagtagaagtgagtgatgccaattttaaagataatgagcagtttagtaggcaaggatttagtgtcagatatggaggttgtggttggcagtagtagtagttgtactgggaagctcttccacagtggtgaagaagcatgctgagaaaggccaaaaagtcaaagtagcatcttgctgtggataaggagattggcataaatggagtaaaagttgagggtgaaaagtgatgtgagacaaggacaaatagacaagttggcttggctaatgtaatacccatgatgtaagaaaagctatgctgagatagctaggctaattccaagggacttttgaggggagcatatcaggttatcacatgccaaaaatgtttcatttcagagactttagtcttctcattaattttatcgctaatccattcattttcaaaatgtatttcaggatttcacatcaggtcgactttaaatcttttgttcagatgaacgtttcttttcctaggactgagtaagacagtttgtcctatccagtgcttaagagtaaagcaagcttatgttgccactgcaggcaggattattaaataaccaattactattcagactgtgtcacatccctttaaattactcaagcaagagtcttggccgggcgcggtggctcacgcctgtaatcccagcactttgggaggccgaggcgggcggatcacgaggtcaggagatcgagaccatcctggctaacacggtgaaaccccgtctccactaaaaatacaaaaaattagccgggcgtggtagcgggcgcctgtagtcccagctactcgggaggctgaggcaggagaatggcgtgaacccgggaggcggagcttgcagtgagccgagatcgcgccactgcactccagcctgggcgacagagcgagactccgtctcaaaaaaaaaaaaaaaagagtcttgaacttgttcagcctgaacacatctgatatcctcagccaagtataggatgtaaattagatagcttctggctttactagtgtggaatcaggcatgctttttccccttaggactccatgactaatgacctgaattgtctacatttcaagactagtcagatctctaatggtgaacctatttcattgtttctgcttctgttttgtcccgtagtatatgagacaaaggatatttttatgtgcaaattgcaacaagttgagatactcctttaaaaatggattttctttccatagttgattagcgtatggtaccagatttcctagaaatgtttttatgataaaagtttcaggttctcgatgatgcaaggaaattacagacgttaggtaatgatttgtaatcaggacacatgagaggagttgtaactttactgcttaccctgtggctttgagaatcattaatcctcaatgggcctcagttttcatatctaaaaatactgctttttaggttcagttacttcaagggtcaaatgagataaaatatatgtgttataacaataaaatgtaataataaatatgaggtaccttttcccccagctttattgaggtataattgacaaatggcgattgggtatattcaaggtgtacaatatgatgatttgatacatatacattctgaaatgattatcacaatcaagttaattaatatatccttcacctcacatagttgccattataattttttatgatgagaacacttaagatctctcttagcaaatttcaagtaacaatagagtactattaactatagtcaacatgctgtacattagatccccagagcttactcatcttataactgagagtttctatccttcgaccagcatttccccatttttttccatccccagttactggctaccactgttccactttgctttgatgagcttaacttctttagataaaatgagttactttttgaaaaacaagtttaattggcaaaattgtatatatgtattgtgtacattatgttaaaaaatatatatatatataatgtggcctggtgaaattgagctataatagtagtgtttttaatgactatgtagccgaaagttccaaggctttcagctgattgactatgtaattcttaaatctagtagagtatcttctgatttgagagcagtatgaatcctggcagaaaactatgctggctatacacttttaagggtttgaactgtgttactttatctatatactctgcataaaatattctctctcctatacaggccagctcatttattcttgcttttctagtctgattccccctttctggaatctttttcctccatcgacttttggttctaaagcattcccatcttcaaaaattcaattcaagtcctagttaccacaacactttctctaacggcttgaaacacctcttttttctatgaacttttgttccacatagttatttctacccagttatcgacataattgcttgctaattatttcctgtggattaactttgattccataactttttaacttttttatagatttcctgagagcacgtgctgtgctttatatttctttgtaaatacctcagtagctctgcattttttttctctgtcatccaggatggagtgcagtggtcgatcatggctgactgaacccttgacctcctgagttcaagtgatcctcccacctcagcctcccgagtagctgggactaccagcgctccaccacacccagctaattttcgtactttttgtagagatggggttttgccttatcactcaggctgatctcaaactcccgagctcaggtgacccacctgcctcagcttcccaaagtgctgggattacaggtgtgagccactgtgcccggccagccctgtggttttttgtcgttgttttggtttttttgagactgggtttcactctgtctcgcaggctgcagtgcagtggcaccatctcggctcactgcaacctctgcctcctgggttcaagcgatttttctgcctcagcctcccgaatagcagggattactggtgcacgccaccatgcctggccaatttttgtatttttagtagagatgggtttcaccatgtgggccaggctggtctcgaactgctgacctcaggtgatcctctgtcctcggcctcccaaagtgctgggattacaggcatgagccgccgtgctcacccagctctgcatttttgaatcattgtttataaaacattgagcatcaaataatatgtttttaaatattgtataagtaatactgtgttcatagaaacgttttcttttggccgggcgcagtggctcacgcctgtaatcccagcactttgggaggccggcggatcacgaggtcaggagatcgagaccatcctggctaacacagtgatacaaaccccgtatctactaaaaatacaaaaaattagccgggcgtggttgcgggcgcctgtagtcccagctactcaggaggctgaggcaggagaatggcgtgaacccaggaggcggagcttgcagtgagccgagaccacgccactgagctccagcctgggccacagagcgagactccatctcgaaaaaaaaaaaaagaaatgttgtcttttacaaccatatatttatcatatttatcagtagtttaggcgtggtcttgaaaaggaacctccccctaccataatgcctttcgtttaggagatccccccattacacttgtggcttacattgaaagaaaaaaaaaattatccccttgtctatggtagaaaactgtgtcattcgtggctttgactgcatcacaatccattttagctttttgtcacttaacttgagaagaaatgaaatatatgtggagtgtatatccctgaagaaagtaaaggaccagctgttatcactatagagtttgtattgttgctgaaaataatctggttatgtttgtaaggattaagtagtttattcaacagatgtttggtagtaaacatgaatgagaaaaggcttgttcttatcatattcattatgaatgctgaggttgtgctttactacatgttttcaatgctcatcctaactgaaagtatgaagtggaaggatcaatttctgaatatttaaatgagatgttgattgccttgttataaacattaacaattttcctaagtgtttgctcttgagatagagcatctttaggagaactttatgatttgggctggcagatttagccaaattaacaggaatgtaccttcctaatgtgatcattcatccctaggaacaggaatctgggaacactgaggctatacttctgtatggtgagttatcaaagtgttaaacacaggcactattaatgaagcacagattctactttcagagtaaagctagtgttactatctatgaaaaaatattattatttatgttttcataataataacttctacattatatttattttcaactttttagaataaatctgagctaggaggttcttattttagttgttttccttctatcgtttttcattacgctcttgttgtttgatttggtctcacattttaaaaagcttactgtataagaaagttttatcttcaaaataatgagcactagaggttactataaatggaaatacaaaatgtggatttactaaagtgttttgacttttacctacacatttcttggagtaatttttaagttgaattttaagaattattttgctggccgggcacggtggtggctcacacctgtaatatcagcactttgggagtctgaggcaggcggatcacctgaggtcaggagttcgagaccagcctggccaacatggtgaaaccccgtctctactaaaaatacaaaatttagccaggcgtggtggtgggcatctgtaatctcagctactcgggaggctgagacaggagaatcgcttgaacccgggaggtggaggctgcagtaagccaagaacatgccactgcactccagcctgggcaaaaaagtgagattctgtctcaaaaaaaaaaaaaaataataataatattgccatatattcgaattacacaataataccagattgaggatattagaggaaaacaaatattatattttcaatatttctaaagtattttttgtcttggttatttttatggaattatattacatttatagtataacctaactcttaaccattttgaggggtaagtttaaagattaacttatcactattgacgaattattcatctacccgtggaagtgtctgcagtttatccatttcgaaacatctaatattacatgagaatttacttttctcattagattacataaacatcatgttaaaatgcaatatgtacatgtgacaactgatcttttgggaaaaaaaaagtccatgaatcactcctgtaacatttggaattaaattcattaaccaaaataatatcatgcttcatcttttatattttgcttccttagcatctggttcttagtctgtctaattacattataatggctctgtgttacaacagttgctagaagatttttttgggggggggggcaagaatgatgattttgcctcatattttggaatacctgctttgcaaatgtctttcctatatactagagccagaaggaaacaaatctaatgtttcttattcgtttgaaatttattgggagaccaacttcattcaaagatcaagaactctaaaatttttacatcaaaaactatttttttccccaattactttgttgagtactgcacttccagtcttgagatcgaaagtaatgttgaggccgggcacggtggctcatgcctgtaatcccagcactttgggcggctgaggcgtgcggatcacctgaggtcaggagtttgagaccagcctggccaacatggtgaaaccccgtctctactaaaaatacaaagaaaattagccaggcatggtggcgggcgcctgttattccagctactagggaggctgaggcaggagaatctcttgaacttgggaggcagaggtcgcagtgagccgagattgagccgctgcactccagcctgggcgacaagagcaaaattccatctcaaaaaaaaaaaaaaaagtaatgtttagccttgaaattgctaatacaatggacggtatccagcatatttcttttttgtatgcaattaatatttttactttatttattttatttatttttttgagatggagtctcactgttgcccaaactggagtgcaatggcgcagtcttggctcactgcaacctctgcctcccaggttcaagtgattctcctgtgtcagcctcccaaagtgctgggattacaggcacgagccaccgcgcctggccgatattcttactttaacagttgaataagttaatattttattggagctatgcaattagttaatttcatatagtgaatatattaatatcttatgaggaagagccacaattttagtataataatgtagataattataactcaggaggactatgatcaagatacactgtaaggatccttcaccatattttaccaaaatattattttatagttcaaagggggataggacggtacacttccaattatgctgcaaatttgttattattactgaaaaagtctattttcttcttcaagcaattaactattaatgtctttaatgtcaataaaccgcatagcgttatagactctctttgaatttctctgaattagaaataatttttgaataggaagattaacacagactcattttaattctgtaatggtagaaataattaatctccccttatctgtagggatacgtgttctaagacccctggtggatgcctgaaactgtggataataccaaaccttatgtatatattatgtttcttatatacatacacatataacaaagtttaatatatacattaggaaccataagagattaacaacaataactaatattagaacaattataacaatatactgtgataaaagttatgtgaatgtggtctctatctctcaaaatatcttattgtactgtactcatctatttttggactgcagttgatcatgggtaaccaaaaccatggataagaggcagactactgtgtattttattatatgcatgttatatataatatatgtaatatatattatttgtatccatttggcaaacaattgagatttttatttcatgtagttgctttttgtactaatatagttatatggttgttggaattatgtcattaaaacacattaagccaagcatgctggctcacgcctgtaatcccagcactttgggaggccgaggcaggtgaatcacttgaggtcaggagtttgagaccagcctggccaacatggtgaaaccccggtctctactaaaaatagaaaaaaaatcagccgggcgtggtggcaggcacctgtaatcccagttacttgggaggctgagtcaggagaatcccttgaaccccagaggcagaggttgcagtgagccaacactatgccatcgcactcgaatcgagcctgggcaacaagaatgaaacttcgtctcaaaaaagaaaaacacacacgcacattaagagaaattatgtttgtcgttttgtttattctctaatttgattaaattgaacagaataataagtcacgtatggcaataccaaatattatgctaaaaataaaacactgaaagctgaaaaattcaatcacagattattggtttatatgacatcaggcttcaggctgataggagacgtccaaatgataggcttattttgttccataagtattgggcacggttcttagtataacaaagaaataaccgtggattgagaaattgttttcctcaccttcattacttaatagtagaattcccttcaatgtgccacttaatattccttgatgtcagagccttccatttgagcagctgaaattattgacacccctctcattcttcaaggatgtgttgtagggactgctgagtttctgtagaggtttaagctttgtgggaaatgatgttgagtatgacaatgttatcagcaacattgtcaacttcatggttgcctattgacttagggaaaagtggagaaaaatatgacaattgctgagtgcttagttgcagtagctttttaattttaattttcaagcatctgtgtataagcaaaagaatatacacagtgccacgtatcatacccattgacaagtttatcagattttaattataataaatattttaattaaaatgttttttaaaattattaattttaatgaacatcaaatttctctcttgtgatgtgataagggcagtgatagaactgacatttgaacgttcaatacacaattcggccaccattcaataggcttggattgtgcccatggttctgttctgtactaaagacacaaagatgaacaaataaaaactctgcccttgaagccatacagtcaaaatacagtgtccttaatctggggtccatgaaccatgataggaaaaaaattacatctttattttcactaacctgtaactgaaaatttgcatttctttccctttatgaagataagcaacacagaacggtattagcaatatctgtgaatttattaccaatatttttatatcaaatcctagttgttttggatatcttgaaaaatcatatgttaatatataccagtggttagtatactaatcactacttttaatttgtattaattattatgcttataactaatgtattaatagcatataatagtattatattcagtattttacaattgcaatataattaatttcctttgttttttatatgcttttagttttcattttgcacatttgaaaacagtctgggaagtgttccatatgcttcaccagatgccaaagggatccatagcacaaaaatagttaaggaccccatatctagaagagacacaggcaagtacatataataccatggtacagaaaaataacagaggcttgtaccatatgctgtgaaattgggcataactctctcagtccaaaggactgaagaggaaatttttgatttggccttgaagcacacgtgattgtttctctagtggtaacatgtgagagagggcattctaaaaaagagaaaagtaggtgcaaagtcgaagtcacccggtgagagcttgcagggtcagggaacaaagagcagtgtactgtggcaatgtaaacaaacaaagaaacaaacaaaaaaaccttttttttttttaaaccattgttgggcatcctattctgttttcatttgtcaatgtgcaagattgcatttgccaagcagtttttattaatcattagtgagtagaaactattctctggctttttattttaactgactatatttcatatagacaacaggcaagaaacatcaaagaagagatcaaagctctgcattagcgttttaaatctcattatttcaaacaacatctacctgtaaggggaaaaaaaaccgtaaatctttttcacctccccacttcgtcgttgttttcagacaacgatcagtcacttgtctggcctgtgggccataattggctacctgtaaatctcaagagactgaaccatgtaactggaataattttttttttttagcactacactacacggctgttattcagttataatggtcaaggaagctttagatgctgtacttaggctttctaaatgtgtgctttatttggctttctgggagaaatgtcaatgtgaatttccagattataatgaagttcatccagaaaaacaactatgatttaaagaagcagaagaaacaaaccggactgaaaaaatacactaatagactaagatagtgttttcaaactgttctagattaagacaattttgcttgcattctttgttgagcaagaaggttcacatcttaacttttccaataatcctctttaagaccgttattattggccttgatttcaaacagaaaccagcagggacctgaatggacactactagttaaccagtctaaagccttatgttaaagctaaacagttatctctaattttcaaaacaatagcatgagtatatattaaaaagtggttgatctagggaacttaatattccaggatgaactatactaaatgaaaatatgtaacacattaaaatgtggtcaaacaagccatctatagctgatagtacaaattgcatatatatctactttattaaaattttaactggccaataaaattgatactataattctaaatataatttttatttaagattacaagttttaaaattgaacagacttaggtttaaatcacttctctctcttcttctttttttttttttttccgaaacggagtttcactcttgttgcccaggctggagtgcaacggcgcgatctcggctcactgcaacctccacctcccaggttcaagcaattctcctgcctcagcctcatgagtagttggccctccaccatgcctggataattttttgtatttgtagtagagacgaggtttcaccatgttggccaggctggtctcaaactcctgacctcaggtaatccgccctcctgggcctcacaaagggctgggattacaggggtgagccaccgcggccagccaaaatcacttcttaaatgtgttattctgggcccagcacggtggatcatgcctgtaatcccagcactttggcaggctgaggcggtccgatcacctgagatcaggagtttgagccagcctggccaacatagtgaaaccccgtctgtactaaaaatacaaaaattagccggcctggtggcacatgcctttaatcccagctactcgggggtgctgaggcaaaagaatcccttgaaaccgagaggcagaggttacagtgagccaagatcatgccactgcactacagcctaggtgacaggtgacagagggatacttcgtctcaaaaaacagaagacaaacaacagcaacagaaaatgtattattttgtattagcttagctcagcatgtttgcttgtatgtaaagtagaactgaaaaaaaaacctaataaaattaaaatagggattaaatgcactaaaatttgttatttgttctacgtatttcaaaaatggtagtcattctaattatttattttagttaatggaaacattagttttattgttagtaaaacaatatattgttgatacaatatctagcataattttgcctcttaatgaatcaatcagcttgtcctttttattcatattttccttaattataaaccaattttttaaaagtcataatctatcagtagaaatggtactttattaaattcggagaatagtatcatttaaggaaaaatattcctagataaaaaaatatacagtactatgaaattcacatgcatttaaagtcattattaatttataaagaatctggaattataacctgaactaaataattctatttttttgctgaatgaatgaataaataaatgaatctttaggaacttgactgtcctccactaaagttaatgactccttcaacatattacacattctgttgctttgttctcatttctattataaatgcaagtttgcttttttgcatatggaatcaccatctataaattcatagtcaatatggggttttaaataatcattaccatggaaattatacttaagtattagttctgttggttggagattatgaatttctaaatttaaaaaaatgctgatttaaatttattatttccagtgccctatcctatttttttttcatatctgctactgccttcctaataaacttgtttagaaatatatcttgacagcaaatggtattttattcctaccctcttggcatgtattatacacaaactttgttttttgttgttgttgctgttttttttgtgtgtgttgggggggggggggggacagagcttcgctcttgttgccgaggctggagtgcaatgatgccatctcggctcactgcaacctccgcctcctgagttaaagagattcttctgcctcagcctcccgagtagctgggattacaggcatccgccaccacagccagctaatttttgtatttttagtagagacggggtttcaccatgttggccaggctggtcttgaactcctgacctcaggtgatccgcccacctctgcctccgaaagtgctgggattacaggcgttgagtcactgcacccggccttaaacttcttttcgaaagctttctcttttatacgtattgagttaattcctgtttgcgctgtgacatctacctgactaccacaaaaccttacagccacttgcttctgtaaatggaaaactgccctagcatgacaggatgtgggctgaagacataaccatatcgaaaacagcaagctttttggaaatctgtgtttggccctcaatttcatggcctcaagtaacttgataattttctatttctaatgcctgtcagccacaacaggatctgataaccaactaaaatctctgttggaagtgaataggggaaaataggtgaaatcacatttgatgttgtaagggaagcttattgaagacagtggatgtgttcaaaacattatgaggcaaataatgaggaggaaaaaatatgaggaaatagatcaccaggaagccctgtgaatgtttatgttttggctttacatgattactagtaattaaattagtgaaaaatattttatggaatattcaatatgcccttaatgtacaatttgctgagcaataagaatataagactacaaacttcctcttattggaatatacattttattttttattttgttgtacttcaatagctttagggtttcaagtggtttttgcttacgtgtatgaattgtataatggtgaagtccgggattttattgagccgtcacccgagtagtgtacgttgtacccaatatgtagttttttatccctcattcccaccccctccacttctgagtctctgaagtcccttatatcactctgtatgcctttgcatactcataagttagttcccattataagtgagaacacacagtatttgattttccatttctgagttacttcacttagaataataacctccagttccatccaagttgctgcagaagacgttatttcattgtttatatggctgagtagtattctatggtgtgtgtgtgtgtgtgtgtgtgtgtgtggtgtgtgtatctcacattttctttatccactctaaggtggattctatatctttgcgattgtgaattgtgctgcaataaacatatgtatgcaggtgcctttttcatatagtgacttatttttattttggtagatatgcagtattaggattcgtggattgaatggtatacctacttctagttctttgagaaatctccatactgttttccagagaggtattaatttacacttccaccagcagtatataagtgttctctttttatcttgtccatgccaacgtttattgttttttgactttttaataatggccattctggctaagataaggaagtatctcattgtggttttaatttgcattcccctgatgattagtgatgttaagtattttttcatgtatttgttgatcatttgtatatcttcttttgagaaatgtatattcttgtcgtttccaagctttttaaagagattgttttcttcttgctgatttgcttgagttctttgtaggttgtagatattggtcagttgtcagatgcagtttgcaaatatttttttccattctgtcggttttctgtttacgttgatggttatttcttttgctgtgcagaagctttttagtttacttagatcccatttgtttatttttatttttgttgcatttgcttttgaggtcttggtcataaattctttacctaggccaatgtccaggagagtttttcctaggttttctttgaggagttttatggtttcaggtcttagacttaagtctttaatcctccttgagctaatttttgtatatggtaggagatagggatccagtttcattcttccacatgtggttgtcccattttcccagcaccatttattgaataggctgtcctttgcccaatttatgtttttgtatgctttgttgaaggtaaattggttttaagtatttggcttcacttctggcttctctattctattccaatggtctatgtaggaatagacgttttaaaatgttgcaattggaactatggataaacctttaagataataatttttagccactgttcattttaactgggggagaatgggaaaaaagtttaatcactttaactaaatcagttactttgtttacatatatttagctctgataattacaaggagattcacttttgagtttgaaaagtagattctaatgcctaatgagagttttcacattgtctttgagaataaacactattttaggttattactgatatttcagtttgtgaactaataattcagcttgtgaattttacccaattttataaattcacttttcttacttgggcgtctgtgtttgaattaagaatggttaaatgtttctttcatacgcgtccgtgtgaagagaccaccaaacaggctttgtgtgagccataaagctgtttatttcacctgggtgcaggtgggctgagtccgaaaagagagtcagcgaagggagataggggtggggccgttttataggatttgggtagataaaggaaaaaggggggttgttctctggcaggcaggagtgggggtcacaaggtactcagtgggggagcttttgagccaggatgagccaggagaaggaatttcacaagacaatgtcatcagttaaggcaggaacaggccattttcacttcttttgtggtggaatgtcatcagttaaggcaggaaccggcaatctggatgtgtacgtgcagatcacaggggatatgatggcttagcttgggctcagaggcctgacagtttctacatgatagtctctttattcaaaagaaacacactacattattattttaaaacgttattaacatatttttctgtgctagaaaattttaagaaacaaacatttaagtgggctaactcatttagaatttgtaaaatatgacaaaactctaggagaaagtttacctgtgaaaggagtctgttatgtaaatcaatagtgtaattatgattcaataaattatataaattcctaatgagcactatcaatttttcttttgctaaaatctactgatattctacttttaaattactctcacttttagtgttcccctgaggacttatcagtttggaacacttaaatttgagttatcgttctgttcttaggaaaaatatatttaaagaaataatgatttattatgctagatttatcattatttttatttgggattgcttttaatgtgcatgagttacaaagacataactgtgagatcccattttctataatttttttagtgattccatacatttctgagtttacattttttaaaaattatagctcaaaaaatgcaagacataagtaagtatgcttttctaatgggtcatttcagtcgcgtccgtgtgaagagaccaccaaacaggctttgtgtgagcaataaagctttttaatcacctgggtgcaggcgggctgagtccgaaaagagagtcagggaagggagataggggtggggccgttttataagctttcggtaggtaaaggaaaattacaaagaggggttgttctctggtgggcaggagtgggggtcacaaggtgctcagtgggggagctttttgagccaggatgagccaggagaaggaatttcacaaggtaatgtcatcagttaaggcaggaacaggccatttccacttcttttgtggtggaatgtcatcagttaaggcaggaacaggccattttcacttcttttgtgattcttcagttacttcaggccatctgggcgtatacatgcaggtcacaggggatatgatggcttagcttgggctcagaggcctgacaggtcagttatggaaacacatcaaagtactctagaaccaaaagttaatttttgaaagaaattaacttaatgtacagattttataggaattctggacgtatttaatatcgtgatgctagaagaatgtcttaccaattaatattactggatttcttgttgtgtatcaagttgtaacagataccttaatcacctaccagataggctcattcctgtgtccattccaatagaactctgattttgctcagatctccatcctcacaatttcacagtagtcttcagtaaagaaatgagactaccccttgtcacagaaaatgaatcatactttaattcgcttatatgcttccataccacttgccatttacgggtttaagtatgtgcatgagatgcaacctgaaccaattaaacatcaagtaagtttttcttgccaatgaaaagcgttcacttaacaactaaatgcttgagcatttatatgtagatatatatgtacatatatacgatgtaaaatgtagaatgcccactgattcatttataatttgatatgtattagtatgtatttaataagctcttataagactgaatggactctggatatgaaataatataccaagtatggtaacacatggtaacacatggacaaattgtagtggaatcaataaagcattcagagaaatacatcattattatttattctcccactttaggaagatttcaatcctagcattaaatgtaacactgtcttttttaaaataaaacctccatttctaagaagttatttgatgagaaaatatttgagaggttatctgatgagaaaatttgaagaaaaaaattttaactgtacaaccagttaattagaactttgtcaaataacattgcctttaattcccagaaatccaatacattatgctcagtgaactgtaacacctgagtttttaaagtggaatacttaaaaaaaaaaaaaaacaaaaaaaaccagccttctggggtaatatctcctctttggaagtttctttttttccaaaattatacttaaaggacgattcttttaatgaataaattttagagttatctcaaggaataaatagaggaaatattattttatttcaaagagaagaatgtctattgtggcaaacaacaaacctgaaataaataaaacgtgacagtctatgaagtccgtgagcctaaagaacaatggttattttactgtcttagaaaagtttaggaagtttggatttgaattcaaactttaatttgaacttataacgtcaacttgaaatcatttggaataaacattgaaaaccttctttgaaagttttatcaaaggagaaagaatttgaataccaagaggatggaaaggttaacttctgttatctgaaatatcttcaattgccttgagccagtttaaaaataaacaagcttactgatatagagggaaacaagtctaccttgtgaatataatttaaaaaagagaaaaaatgtcatttaccatattatttacttcctcattttagaaaagggaataaacatttattaattatgcactatcaggcactacgcattcaacacacactatcacattagttcttcccaaaagccatttgaagtagtttttctttctttttttttcttcttttcttttctttttttgagagatggagtcttgctctgttgcccaggctggagtgcagtggcacgatctctgcccgctgcaacctccgcctccctggttcaagcgattctcctgccttagcttcccaagtagctgggactacaggcatgtgccaccacgcccagctaatttctgtattttttagtagagacggggtttcactatacgttggccaggctggtctcgaactcctgacctcaggtgatccgcgtgcctcggcctcccaaagtgctgagattatgggcgtgagccaccgcacctggcctgaagtagtttctcttatgcccattcatcaatatagataatagggttcagagagatttttcagtaatttacacaagattttacagctcctaggtggcagaatctagacttaaatttagatctgatccaaaaactgtattttcctagctttagtaggacattaacaatacaagtgcctctttaatatgcttaggaatgcatttttatttatatgtaaaaccaaataaacaaataaacgctgcgattgccaacaaagtatctttaatgtaagaatttcaaatgctgtgcaaaattatcctcactaactgctcttctggtcccacacttgtcacatggctacagaatatactatatctctctttctcttccagcagcttcctagtggccacacagggaccatcctatccataggttatagttgctttttaaaatctaggcatttcctaggagctgatgagattttagaagaggtgatattaacatgaaaaaattggtaggggtagatttctgagatattctatccaaattcaggagttttacaattataatttagttaaatattgtacttgatacacatataattccattaatacactctgagttaattgattttcatttattactcatggttttcattttttgttttttgttttttgagacggagttttgctcttgtcacccaggctagagggcaactgtgcaatcttggctcactgcaatctccgcctcctgggttcaagcgattctcctgcctcagcttcccgagtatctgggatgacaggcatgcgccaccatccctgactaattttatattagtagtacagatggggtttcgccattttggtcaggctggtctcgaactcctggcctcaggtgatccacctgcctctgcctcccaaagtgctgggattacaagcgtgagccaccgtgcccggcttcatcgtttccatctttaacaaagaaatacatgatatttaaagaaattttaaaagtataattttaaaacagagggaaagccacccacagctaaaacatcctttctctaaacagtttattttttccttaataaagttagatattttttggtgtctaactttgcattgtaaaacttaatcattacttacattgctccataatattctgtcatatggttttgctgtagaactgatactgagttggtgtgccccttgtaagaatagtccagtcattttaaaccagcatctgtttggattgggccagcatctcttccagtgtccttgagtcaacaatgccttaatggtttctacatatatttttaaatattacctatagatagttcattctttatcttcttatgttgcgtgtcagagctattacgttagagctattatgtaattttggcttttttatatatcattgcaattaacactcttgtccattaatctgtttgggttttttttgttctctagttgacatcttatgacaaatcaataggtgtgtaaactatgtcgatttttcttggctgtaaaaaacagtaaagaatgcttacagtacacgttgtctttatgaaaggaagttccatttgaagaaataattaaaaaacaatctgttttgcctttaatgggcaagatgaagagttaatgccactatatactaaatatcttaatctcgacatgaaatgagaactattctagagatatgtttctagatagatatggaacaaccacaagttcatacaaaatttgttaattttaagtcatattttggacttttattaactcatatggagtgacgaacaaatccttaattaatagcagacatatcatcatctctggatgcttatctatcagagatcagcaagaaaacaaacacacggcatgctaaaatgggtaaactatgagaggcaataagaaacaatattcaaagttgtgggtagggttaagggaaactaatgaatactgtgatgcaggtggcccctggctctggggacaatagaaagacataacccaccactaggcctaaaaaaggtaaaatgtgagggagcaattactagatcctggaaatggaggagctgaggagagaccgcccaacaagagctgtgacctttgaaaaagaaatacagccacttacaacctgagctcttgcaggtgtaaaaagtagaggtttctctccaaagaaactttcctacccatctaaatgggaataaatagtaacgtctcctagaagcaaaatttattaaacgacctgtgctaacattcttaaatatctactagccgtaataaagaaatcaatgtactttatgttcttagttcccacaatttagcctaaatatttgccctggcatgcttatactggtccaagcacgcattaggtcatagcctgttcctcttccttatttgaaggtgtttttacctttctcagcaagtaacttgtggaaacaagttacttcctccttcctttgttctcctctgcctttgtctcttttgaaaagttctaagttgctagccaatcgggacaaatacagaatgtgtggtcctgttccagccaatggaaaccggacacagcagtagagtaaacatgtcaggttataaatgaccctgtctcctttgttcggtgtactctcgtggcaaaactgctggcgagtgtaccctttctgcaaaaagtaaaaatgaccttgctgagagagttaaatttatgttcgagtgctgtttctttgcagcaccagggaacaagcattctgtttctaaataaacattgtttacatataacacagggaaggagcagtaaagaggatacagcctccacacacctttgaaaagcactcaagttataagtctttagtgccgtgctacttaagagaagggcttgggtttgccctaggttatggttatgctaagctcctcacaatttttataccacatccaatgacagcagacccattcaagcagaattggtttacaccatgagaaactataattcaaagaaagttagcaacttgctcctaggcatacccatattaaccaatattattcagtatatttatatacagcgcagagaacaacaattttaatggcattgtcagtattctttgatagataagcaccagttttgtgatatttaaaaagctattataggtgttgaggcttcgttttctcttccgctaaactgggatgaatctttctgaacagaacaaatacatatattctgtcctatctgggaaagattcaattatgtgttgcagtccaaatatgctgtattatatttacaggtaaaatcatactagcagaccagagtaaataactaggtaagttcctcttagtgacaataaaaagttatattgctcagatagtgctaatagaactttctgcaatagaaatgttctgtatctatcatgaccaatatagtagccaatagccatatgtgactattgagcccttaaaatgttactggtggggctgggcatggtggctcacacctgtaatcccagcactttgggaggctgaggggatgaattacctgaggtcaggagtttgagaccagcctggccagcatgatgaaaccccgtctctactaaaaatacaaaaattagccgggcgtggtggccagtgcctgtaatctcagctgcttgggaggctgaggcaggagaattgcttgagcctgggaggcagaggttgcagtgagcccagatcacaccactgccctccaggctgggcgacagagtgagtgagactctgtctcaaaaaaaaaaaaaaaaaaaaaagagtctcatgtataaatactgttttggacacacatcgttagaagacagtaaaggtgacactgtaaaaattttaaatcattaataactaattaccaccccaatgtaaatttcactgatcactgtcagtattaattctacagtaacatctgtatcaacaaatttccatatccctttcactggtattagggaggagatatcaaaagatggtaaacccagagcataaacttgtagatgtttggtaatgaaatgggactggacctatttgagattgtttcacaattttaaatcagggattggttatatagagctttctttcttgtattttttttctgcttctatgtggaaccatctagaatgcttgtgttattgctttaaggaaagtttttaaagggattcttaaaaaatacagtattttcctagcatatctctgaggtgataaaagtctaagaatcatagtttatgtgttttattcagatccagctcattctctcaactgttaaataagattcttgagaacaggtattattttttacattctggaggatccttatagcacatagaactatactgagaccaaactcgataatttcttataattttgattctgctggtaaaacacaaacttgatattgaaaatttgaatattctggacattataatttgcttatgaatcattctgtttgatattcccagataccctttgctaaggcagctcagaagggaaatatttgttcttgcagtttgtgtggttacgtggtttgttgtaaactttccctttgacctaaagaaatattgtccctttggccaggtgcggtggctcgcgcctataatcccagcactttgggaggctgaggcgagtaaatcgcttgaggccaggagttcgagaccagcctggcccacatggtgaaaccccatctctactaaaaatacaaacgattagccaggtgtggtggtgcatgcttgtaatcccagctacttgggaggctgaggcaggagaatctttgaatctgggaggcagaggttgcagtgagccaagatggtgccattgcactccagcctgggtgacaagagcaaaactctgtctcaaaaaaataaaaaaaaaaaaagtcgtctccaaaatatagcatggcttcaaacagatcgcattatctctctgaaacattttaacttatagatttaaaaatatatcttacagaaacattatttagaaacacaactttagtttacctacctctataaaatctccagagccagagtaaagattaaaatatgcattcacaaagagctttttaaatcatctctttattttacatctcccaaaaattctggaagaaggccgggcgcggtggctcacgccagtaatcccagcactttgggaggccaaggtgggtggatcacgaggtcaggagatcgagaccatcctggctaacatggtgaaaccccgtctctactaaaaatacaaaaagttagccgggcgtggtggcaggcgcctgtagacccagctactctggaggctgaggcaggagaatggcgtgagcccaagaggcggaggttgcagtgagccgagatcgcaccactgcactccagcctgggtgacagagcgagactccatctcaaaaaaaaaaaaaaaaaaaaaaaaaaaattctggaagaagtagtgtttgatttagcactcttaagggacaccatacatttgatgttgttaaaatagcttacaggtttatattagatttctattatctatcctgtcttcatttttggatatcatgtaaatatgttagataaataaattgagattgatttctaacaatttgtatgcattttgagatggcttagaaaacattcaatgcagaagttgatactgtgactcataccaagcatgctcctttgaatataagaagacaaaacttctgaaatgaggcaaatttaaaatatgacaggtttatattctggaggtagtgctaatagcccccaaagctactgatacatgagtttgtacactacagaaaagagaattaaaaagaaagtttgcacttcattgcagttccactcttgattattaatataaatcgaatgtaaattagtgaacttcctgtaaacacaacatgagcaatgactaatattgatagtctactcttaggttcccttgaaattgttctgcttgtctgataaaaccataacaagggacataaaaagattgttttaatatgttgagtgaattgtacatgaaaaattacattcccataaaaggctgatctatgaatgctaacatttatgttgttcgctatttctgtgtacttataccacccgtgtgagtgttgcttgatttggcagaagtaatggaattttaaaaagcagttgcatgagcaaatatatctattttccatatgtacatatttgcaatttagcaagtcatttgcttttgtttaaatattcaaaacgttgtcatatgtgtgttgtacacattaagattttatgtattttaaaaattatatatgtgtattgatatatttgtatgcacacagagcaaagcttgaaatagcaaaaggtaattacatgcatattgtatatactactttgtattaaaaatgtagtttattgatctttaaaaccaaatttgtttttgtaataaagagtaataaaaaattagattatgattttttcctttcaaatatgtttagaatttaaaaatcttggctacccctttaacctaaaatctgtcttacttacctcaaaatgcccttgatcccaactacatgaaatttcttgctctttcttttttttctttttttttttttttgagatggagtcttgctctgtcgccctgcctggagtgcaatggcacaatctcagctcactgcaacttccacctcccaggttcaagcgattctccctcctcagcctcccgagtagctgggattactggtgactgccacgatgcccagctaattttttgtatttttaggagagatggggtttcatcatgttggccaggctggtcttgaactcctgacctcaggtgatccacctgccatggactcccaaagtgctgggattacaggcgtgagccaccgcgcccggccttcttgctctttcttaaatatattatgtaattttatatagcacatgcatatttctgtgtctgggacacccttcctccctgtatctactccttgctatttcttctagcctaatttagatccctctttctatgtttctctggctcttttttcttaagatttgtcaagtcatgctgaaactattgccttgtctttctcaaaagactgtaagttcattgatggcagaacttaagtgtatattagtatctcccagaactcactcagggcctggcatagagtagcataaaagtcagtgttgttgaatgaatgaagaaatgaatagaatgataactgctttctacaggtgattgtgtgtaaacaaaaagtcatatgattaatccttctatgagcaaaagttggctaagattacaattaaatctgaatgtgaagattgtactgcagaaaaaaaaaacacacattttcaatagttatgtcacaaaagcaacccatcatgatacaagtagaatctgcgaacatttcttttaaggtgcgtataaactcatggcaaatttatgttgcattagtctttttgatgttctgaactttcataaaaaatcaacatagtatttaaaatctattgtaaaatatattgaagtttcattgattttattaaaatattaattcctttattttatatctatatataatataatcaaatctgaaaactcatcaagattatggcctagttgattacgtcttagttattatttgtacttttccatagccaacatgcaataaaagtttggttctagataattttttcctgttttacaccgtttcaatcaaaacatgttacaattgagtaaaacaatctgaaccagccttttataatacatgaattccaagattgtactaatttgtcagtttttgcttactgtctttcacaatgatttggagacataataaaatgtgcaaccaaattagtgaaaataaagaagtatatatataattgactagagccaaatatgtatgcagatttaaggcctgatgttttagttcactcattcaaattttaattaaaaacagtacataaaaggtgctagttgctggagtatgatgagaaaacaaaacagtaacaagacaaaaactgaaaacatgtttcctatccttgtgaaacttactgtcaatggggaagacgtacactcagtcagagaaatgttaatatttacaacgtaaagtaatatttacattatctgtattcagaaagagaatatcaaggaagcctattctgttggagtaaagagcttatgcaaagctcctattgtgggaaggaacagaaaggccagggtaactatatctaagaagaaaattacaggctgggcacagtggctcacgcctgtaatcccaacactttgggaggccgaggcgggtggatcacctgaggtcaggagttcgagaccagcctatccaacatagtgaaacttcatctctgctttaaatacaaaaaattagccggacgtggtggcgggcacctataatcctagctacttgggaggctgaggctggagaatcgcttgaacccaggaggtggaggttgcagtgagctgagatcgtgacactgcactccagcctgggcgacagagcaagactccatctcaaaaataaataaataaaataaaataaataaataaaaaagaaaattacggtgctacaagacgaggaggaactacacagaagcctcttcattcaagaaatgaaagctcctgagttcggatatctatcttaaaagcagtagtatgctattgaagaattgtaagcaaagggtgtcttgatcacattcatctgtcaaatagctctttattggtgaggttatgagaatgtattgaaagtaatgtaatcaaagcaaaagaggtcagttgcttggattaagggtgttggctaagaagataaataattgattcgtatgttattctgggacccctagaagccaaagaaaacggaaaataagaccaattataaaattcttattttcagagacaagaaatgccttcaggaaaagggaatttttttgtataattgtctactaaaagaaaatgttcacttatgactttagtgtatatagaccaatttatttagctttaaagtgaaattaatttcaggatatttggtagtaagttttagcaaaacctaaagaaaatagtaaagcacacatttctgttattgatacataatgatcagatatatttccatgataaatgtgatattataaagcacaacttttaaaaaacatttttctagagattatgccttaatttcagcctgtggaacatttctttaggagatattcatggctgctctgtgtccaactacatttgggagtcacctcatactgaatccttttatatactgggtcacttgcaaaggcttaattgagcatttgactgtcatatgccacagaatggatcggacactataaataaaacacaaaagagagtttgtcttttctgggcttcatcttcttaaaaaaatcagctattagacaagcatatgtaagtagtcaagaattatgataaattttctaaataaaaataagtgcatgagagagcgtaagagtatttatttaattcaggtttgggatcaggaaggtctcactgtggaatatttatctaaaatgtaaagggtgaaccaagaaaacagtgatgtggaagagcattagaaaatctggaagaaacacatgtagctgaagcaaagattatgcttattttgaagaaccttttagctgcagtaaataaaagacaccaaattacctccaattctgtaaagcagccttcatgactattcttcactttgttcacaatttattatctccagcccgtactaaatagataacatcatctcctacttcactgggggcttgaagggagaaaacagtgaactaaacttttacaagacattatttgtccagctggaaataaaaagtagaaaaaacatagaactttctatgtatagaggttataaagaccttaattgctttttaatttgtttagttcatgcatcctttgtcagtctgataaaagctgtgggactcctcagaaaaatacacagtgaatatcctttacatacaaccttttacataaaaatccagcagttcaaatgctcctgcaatccattcataagccattcataatccattcctaaaccagcttttggttaagtatccctgctttcaagtatcttgataaaatagtaaaaggaccagaagatacataaatataaatagaaaagtaaatagaagtgtgtgtctgctttactagaattttgaaatatcatgtttaaactataaattttaaatttagtttatggcttaagtacagatcatatattcccataaatgtgagtatatacatttatgtgcaaaccttcgctcacaaactcatatgcttagtgtttgagatttctcagtcctggactgagagttgggaaaaagttatgttttctttaacattctctcatagaaccaaaataataggagaatcagaaaaacataggcctttacattttggcttgagatcagcttctcgccatacctctagtacctcagacaaattacttaacatgtttgtacctatattttatctactttaaaatagaaaagaatacctaacacaaattgttcttatgaggataatatatgaacattgactgaaagatttaagctttttttacttaaaattatcctgttatagatagccttttctcaagaagtacataaaaataataatagtaaagctttgtgaccacaaaaagctacctacagtatatgtatgatgtttaacatatataacttgatatatataatatgacatatgcttgatatatataattagacatatgcttgtctaatagctgatttttttaagaagatgaagcccagaaaagacaaactctcttttgtgttttatttatagtgtccgatccattctgtggcatatgatagtcaaatgctcaattaagcctttgcaagtgacccagtatataaaaggattcagtaagaggtgactcccaaatgtagttggacacagagcagccatgagtatctcctaaagaaatgtatatatataatatcgagttatatataatatatatgttataatatagaatagaatattctataataatatagtatagaatagaataatattctatactatcatttaatatgaaactcacatagactatatttgtagctgtgggtaaatacatgtatgtaattttggtatatatacgtggcttatgagggtttttatggagacatgaatatggtgttaactaaattattataagtccaatgagctttgtgagatggccagtcgaagcaaacaaattccatgtatctccgaagccatttcctctagattgactgaaaaaaaatcaatttcctttaataaacatattttacaagctttgtagctatcacttacttcgtggttaaagtttacatctatggaagattacacagtaactttgtgctcacatgattgagtatcttaggggtttttatagatacatacttaaatatgtcagggaacttcatagttgtatgattggatgtactgggaacttcttgctccttctccttaatttgtgaaatcaagagacagagttactgcaaatttaaacttgagtaagtcctttgctctacttcatttttctcccgagaggcttctttttttttaaacgtccttttgtagaggcaaaatgtaaatattctctgaactctacttctgtatcttaccgtgaagaataataattagctcattaatttcaatttttgtaatatgcttaggtcaacaagattacttctaagggctcctcatcaaatacccctgtgtactttaggttcttttacttttagcaaggctgattcaaagttttttaattcataacttttttaaaaatttttccgagagtcacattgtatctcctttatactgacgtttattatcaggctgtttttttttgagatggtgtctcactatgatgcccaggctggcctggaactcctgggctcaagttattctcccacttcagtcccccaggtagctgggattataggcgtgagacacaattcctgggtttatcattttgtaaagctggagcaatcagttaagaatggagaagcaacagggccgcacggtggctcacgcctgtaatcctaacactttgggaggccgaggctggtggatcatgaggtcaagagatcgagaccatcctggccaacatggtgaaaccccgtctctactaaaaatagaaaaattagctgggtgtggtggtgcgtgcctgtagtcccagctacttgggaggctgaggcaggagaagtgcttaaacctgggaggcagaggttgcagtgagccgagatcgtgacactgcactccagcctgggtgacagagcaagactctgtctcaaaaaaaaaaaaaaaaaaatgaattgagtagcaatagatatcatgagcctcctcatggcgccaatattcgtttgaacccgccaacttcacatttagatatatgtgtctacgttgctggatgggccaggctatttgctcatctctcagttattttactatcctgtttcatctttttccataacactgttacactcacctttttgtgtcacttttaccagagccagtcattaatgaacaagaaatgtctttatttcatttcaaaaaagcaaaatatttctttgaaaattaaacagttaatttccaagccactcattaaagttattttattataagttttaatatcagaattataaaaatatttaatatgtcatctggtaattaatatttattcttttttttgagatggagtctcgctctgtcgcccaggctggagtgcagtggcgcgatgtcggctcactgcaagctccgcctcccgggtttacaccattctcctgcctcagcctcccgagtagctcttagcagcttcttaattaaagaatccatagctctctaatgcacatacgattgtgacatatttattcgttactttaagatcctcccccagtgttgaattctaccaattgcaaggtgcttccatggctttggacaaagtacagaagaattaaataacttcacagccttcatggaattcacagtaaggcagatcccatattaactcaattaaaatatatttagtcaaagccagatgcagtggctcacacctgtgatcccagaactttgggaggcggaggcggatggatcatttgaagtcaggagttcgacaccagcttgatcaacatggtgagacccctgtctctactaaaaatagaaaaattagctgcatgcctgtaatcacaactagtctggaggctgagacaggagaattgcttgaatcctccgggaggtaaaggttgcagtgagctgagatttcaccactgcactccagcctgagtgacagagactccatctcaaaaagcaataaaaataaaataaaatatattgagttgaatactgaaataggggtaactttgggaagctatgggccgcaaagcagagaatgatgcattcagtttgggggagctaagattagtttcgtaaaggaggtgacatcttgaagacatctagaatttcaatagacatagaaaaaattcatcgtaagcagagggactagtgaatataaagaagtcataaagatccaaaaagaactcagaaataatcaagaaggtgagggtagctacatcataattataagagccaactttattgagtacttcctttgtcaccatgtgctaagttctgtattttaatatcctcattgaatgcttgaaataatttctatgaagaaagatctgttttatctttattttactgggaggctgtgaaatatgcctaaggtcacacagctatcacatggcaaaaacaagattcaaacccccacagtttctaattttaaagcctcagcataatgaacacagtattgtactgaacagaatgaatgaatgtgagtagaaaagacatttctgagaacaaagctggaaatgtatcatacaaatcaaataaacatttcttgagaaatccttggggaagagggcaatataacctctcaaacagtagccagaatcatcaacacaaatatgtattttaagttctcacaattggtctcgccatatgaactaaatgctagatatttacttgcttaatgctaccaatgaattttcaaatctttccaaggtgttaataattttattgcttttttataccaagagcaagaatcaaatgttagttgctattgatgtttacattttaaataacaactttaatttagcctacaatatttagcaattacacaggaatcctctgaaagcttttaaccagccccagaagtaaactggctttggatgctaatctcttgagctttcctgactgacaagtttcctccctagaggaggggaattggcctgtctcctaaattttgcatggcctaaagcagtgagtttagaagcacctgtgtttcctggcaacaaacataacatttgtggaaaagtctaattatttaaattcctctgcatttttctaattgaggataaagtgctgcattctaccttcgcattcttattttattccttggccctttaaataaaaaaatacataaaatgatgtggtcagctaaaatatattggacaaacaaaacccccttcctttatctccctctatcgctctctatgtatatatattatatacatatataaaatatatataaacatatatatgaaaacagatatttgtgtgtatatatacactaagagatattatagtttaaatattttttaacatacactttaaaatctaacagcttggattttaatattgggtcagtctttctaaagtgtttaatattttagtttggaagtattaattagcaattcatgaatgagtaattaaaagtgctttagggggcctttcacatcctataataaataccaaaccttttaccacatttcatactataaaatcttggaaccccattatataactatgagttattaatttctgttacctacttttaaaatgggaacatatgttattaacaggtgttgctttgaaatctatattagcaaatgttctaccttataattagtttttgacttatcacaaaaaagtattttattttttttaattacatagtcacatttcaaggttaactttaaaaaattctaaattatctgattttcatgggaaagagatttgatatttgtgccttagcattttggtatttttctctttctgtatagcaaacctttgaatgatagtctgtctgaattcacagtgaagaaaatgatcagaatattgactgtcaacagataatttagaaggttcaatcctatgataatcagggatattttccttatgtaaatgtgttgatttatcaagttcagctatgtcattgattacatctaggcttcaggccttctgtgaactgccagctctactcaattctggcttgtgaatgttatcacatattttagtcaaatcagaggttatattatacacatctgacatttttctctttgtactaataactttttttctttttttgtttttacatcatggcataagatcaacactaaattttaggagtgcatagtaagtattaccatagtgtaatgctatgccaattgttttctaacttaatatttgcaaaactgggttttatggttgtttctatgcgaattgagtgcctctacagaattttatccctgagagtatatgagtggtgagtgataagagatactgaatgtctcagaacatactagcatctgacagcctattggtaagatagtgtaagtaaagaggataaggaaaatctgacttgaaaggagaataaaatctgattggacagtctgtagccaagtttgcatattatggatttacaaaatgaggttgttttgaattcttgattaatgaaacataaactgagttgttttaatattgcgtgccatttgaaataaaatgcattttgtcacaaccctagaaatgggaggttatgtgttgtaaaatattcttgttcccatctagaagacaccatattttatagagaacagtggctgaagcttgttttactaggaacaagtatggtgtaaggaaataacaataattaatactggtggcacttagtgctatagtaaaagtaaatttctaattagaaaataattaccataaaatactgaattatatctttgtaaggcctttagaaattgaatcactaatttaatatataagtaagtcaatattatttttatgagaaaatggacaacttacgaagttgttgttatgttttcaggccatattccatttttcaccaaacaagttatttccctgatacactcacttaaatcatcagtaatacatataggtttaaaaatgttttgtacaattctgaaagcctatcttagtttaatgaaacataataccataaagcttccctttcctccaacatttgagctacaataaaacaaccttgtacaactgataacaattaactcaccacccccaccccattgcagtcattagaattcattactaaaagctcatttgtttatggtaaaataaagtataagggttttgaaaccaccactgcaaaattaggactgagacagtgaaagagatctaacttaactgactccatcttgcttctaacctccactaatttatagtttatcgtttaaacaaacatcataacagccctttcccaaagcagaccttcttgcctggggactagattgcctctgtaggactaacatcagccacagtattagaaattatggtttaggagtcatgcagctggaggcaacaagattctgacccccaccaaactgctcctaagatcagtgcttgagataatttgcagaccctgcacttgatggatcagctggcactacccatatcaataaactggctcatctgatcttgtggcctccacccaggaactgactcagcgcaagaagacagctccaactccctgtgatttcatctctgaccagtcagcactcctggctcactggcttcccccgacccaccaagttatccttaaaaactctgttccccgaatgcctggggagaccgatttgctgatttgagtaataacaaaactccagtgtcccacacagccagctctgcatgaattactctttcttcattgcaattcccctgtcttgctgagtcagctctgtctaggcagtgggcaaggtgaaccccttgggtggttacaaatttgggggctcacccaggattgcccctgtggctacctgcctgttgtttggtggccccctttcagtgatggatccagaaggcagcccaagtggctgcctaattctcttggactgggggctgactctgttactctgtctactggtggggtattccaacccaatgtgcgtggacttaattgcaatggaaaaatagtcatggggagatgtcccttaactgtagccctattacagggtatctgtagcctcatggtggggtgtctatctgtagctccgttttggggtgtctggattggtgagtatcctaggtgctgccaatgcctgcttcattctcctgactggttctgtagccctatggtggggtgtctgtagccccattgtggggtgtctgtagatccagcatggggtgtctctgtctgttactccattgtggggtgtctgttcagctcctgggaggtctcagttcgctctttctaactagtaggaagactactggtttgggagacttctcttcaatcaggaagattttgaggaggtttctcatacagaaaataggaggatagtttggaagggatactcttggacttcttggttagggatctgatttggaaggccttctgtccctcttgtctttgcatgtgtttaaatatgtgaaagggatctcagaaggggttgctgatagaagtccagcatgcctaactcagagaaccctccttatttgtctggtcacattcagtgagctctaaagaaggctcaacagtcctgtctctcagggtgactatctgctctttcccttgcccagagacctcattgtgaattaccgttcagaggtcatccgtccccacctggtgtggatcaaagacaacagggaccaagatgaaaaattttgagctttgccaggctgatattgggtgcggaaagaggtgactaatgtctgttttgttatgtgtattttgctgggttggaaaatgttaattcagttccccatgcagcccgttgggcagaatcttgcaaattaagaatcttgtttatggttccataaaatggtaaagggtgattttatcttgtaaagtggcttaaaccccacagctatagcacaagcaagcagggtcgtaagacgccactccgttcttctggaagctgcagagaaagggaacccagaaacctggcatcccagcaataagggtaagaaattcttatcagtcaagtttctggtctctctctctctctctctctttctctgcattgttaaatagtaaactatttgtctcctctgcaagggtttggttaatagaaagaaggatttgtgagactaatcttagcacatctgatgtagtttgtgctaagaatttgtctttctgtgttatgtaatggagagagggatatcacgtgatagaacgtgggttaggacacccataagtctgcttttcaagtcagcttgggaggctggtcagctacaaactttgctacaggtccctgaaaccaatactctatgaaatttctctgtcttgttttgtgtccttaagagcttaaccttgtgaccatgtggggatactttcttttggtttctaccatccagaggacaggaattttggggttcatgtcatagttactcctaagatttttcttgagcagttaaaagccttgcaagcctgaaactggcttctctaggctccttctgggaaaagcagtagaaatttctcaacgctgtatatagctcagtagctaaggctttgtcttttgacagtggtggcctgggttcaattgttggcttctggaatgattcctttctgatttgttatttgtgtagctttgccatttattaagtttcttttctgatttcctctcttgaattttcctttctctggactaccttgtggagattctaaatcttgtaaaaagaaacttcttactatgtctttgcagcacctaggaggtttcctttggtaaagttcagaagctaaaaatattgtccacttggcatggctaaaattaggtaataagagatctaaaagaatttcttttttaaagagcactatggttaaaagtcagcttaattaagagtggataaacaagctatagatatatttaaaaggcctttatgtttttctcttcttggaacttgtttttttggaaaaagttttttcttctcagccgactgaattatttttctccatttttttctcttttttaatttttttgtcttgccactcttaacgcacacgtgagtccctaagataacttctggtagcctgggactcattgggaaaaacagaggaggcaccacagaacccgttttagggaaaaaaaaaaaaaactgttttccacatgaaaccccaggaattaaaaacagatggatccctctcaaaatcaaagactctgctctgtttttcattgtgttatctgatggttttgagttttggggatatcagaaattacttcacattatgagggagctttagtgtgtaataactagataggaaatatactttaagggatggctaatggtagttatacagggatacttgactctttgcacacttggatccagagaagcatgcttttggtcacccggaagataaggaaacattcctcaccctccactgggagatcagactcccatgaaggacgggctgattacaaaatgggctgattgactttgggttgccttgcaatgaaatgcagggtatggccgggtgccgtggctcgtgcttgtaatccaagcactttgggaggctgcactttgggaggccgaggagggcggatcacttgaggtcagcagtttgagaccagcctggccaacatggtgaaaccccgtctctaagaaaaatacaaaaattagccaggcgtggtggcacatgcctgtaatcccagctacttgagaggctaaggcaggagaatcccttgaacccaggaggcggaggttgcagtgagctgagatagcaccactgcactccagcctgggtgacagagcgagactccgtcttaaaaagaaagaaagaaacaaaaataagaaaagaaatgtagggtagaagcactgtactgtcttctcccgtagtatttctctccttttgggttgcagtataaaatggtgcccttaatttgggagttctgtctttgccttcagctgtgattaagccttagaaatgcatactttcctggccctgttcctccaaaggctccaccctgaagccagtaatctgattaagaaactggcaaataaaaagtcttatcagtgccaaatcttctgtctgtatttacatgtgtttttgtgtgtgtgtgtgtgtgtgtgtgtgtgtgtgtgatgtttataaaagagctctgattaattggcttggaaaataagtgcttaaataaaaaaatattttgtcagaaaaatagaaactttgatgactttttgttcacatgactttagtaatcttttggcaataaagacaattttaaagattattgttaaagtaaaatatcttgaaaatgtagacatttggtctaaattaaggtcagctatcagatttgctaaattctttaaggtcaaactgtttccttgactttggaaaattgttcaatttatttactttggagcattatattatagatgaggcctggggacacgtggagagctatgcccctagctatgctgaaaagagtcagaccttatcttcacttctgtctgatgtcctaggctccatccctagcatataattaaaatagcttttttatcaggtttttcactaaaaatcaaagttgctaagagttaacattgtaacatgaaatcgaggttactggagaaacagttttacatacaaggtgtgtagggaatgtgtttttggtgaaagataataaggcataggaatatggcttttgttgaagagaatgtaattttgtctagttcagaggttttaaagactgtcttaaactaaaagagtaacggaacgaaactgagggtttaagcaaagtgaaaagggtttatacagggttgatcctgaaaaaaaaaattctgtgggtataaacaagttggctaagatttgaaaaaggttatttagctttttctataggttaaaatattaaagtcatactgtggggccagaatctgggcccatgtgtccaaataacagggtcttcttagaaaattgatctgctgtttaatggaaaattataaagcgttctaaaaagtttatgagaatgtcaccttgtggtcaaactaattaaaactggatagatacataaaattttatttaaaaactagctttagcattaaagatgcactaatgcgaacatgaaatttggttttctcttttgaagacgatttttttgtaacgttaaaagataatgaaagggtttggctttctcctttgggtaaatggcaggggaaaaggggagagagaagagacaaattcagttatcctcatgctgtctttattgggtcttgtttggaaagctaagtctcctctgtcagaataaaggtttttcttttaagattttggagttatcgttttggtcaaatgaatgacttatggtgacctgggattctattttgtgatatccagtgttttaaacctttgatatttggcaaactttccaaaatcaaattataaattatgtctctttctggcctaatcttttagatattaggtcctctaaagtccaaaaatgacatttggcgtattttgcataaaaatcatacaggaaacattgtcaaatatgaaatggtgtttggctttttgggggctatatttgtgtaaatatatgattgacatatgttctgagattatgtaaaactcctataattctaatatgacttagtatatgttatcagtaataattgtaattatgttaaatggctatgtgccacagaggtaacaaatttccttgtcgattgtgtctttaactctggctactctacaatgtttgtgtcgtccacaggcaattgttgtctcatttttgtcctcttaaaagatggttttataggccgggcatggtggctcatgcctgtaatcccagcacgttaggaggccgaggtgggcagatcacctgaggtcgggagttcaagaccagcctgaccaacatggagaaaccccatctctactaaaaatacaaaatcattcctgtaatcccagctactcgggagaccgaggcaggagaatcgcttgaacctaggaggcggaggttgcggtgagccaagatcatgccattgcactccagcctgggcaacaagagagaaactctgtctcaaaaaaaaatggttttaataccagctgtaaaatgtaacaggtggtcttaaatgcaggtttctgattaataactctggagattgtgacgttagaatagaaggaaaactttcaaatagaagagtgaatggtgtttggttttctttggactgtatttgtataaatatgttattagtgtgtgttccaaaaattatgggaaacttctataattctgatatgatttcactattaataattataattgttatgtaaaattgttgtgtgccacggaagtaaccaaaattcctagtcaattgtagctttaataatggctgtagacttttgtcatccacagacattttatcttgctttggtccttttcaaaaggcagtttataatcggatataatactctgagtgcaggtcttagataactttaaaaattatgctcttggaatagagggaaaaaacatctaaatgtggcaaactgatgtgttaaacattgctaatccttttgttttcagagtcaacataacttatttctttagagctatttgccacttttaccgagtgagtaaaatacactcagtgacaaattttggagcaaatttgtttctctctacctgatttctctagaatttggaaaccatttgtgagtattctcaatttatgacagtatagttaattgcatacgtgcaataagaatctgttttcttttgtaacaggacaccattggagaaattggtcattttaccaaggctttgactggaatggcatgcttcctttaaagaatcaaagttgacttatagagccatttaaagcccgttggggaatctggcctcataccttgtccacacagagtccctgtacaaggttcctgacctgtggtaagtaaagaatgtcactttctaacaggcccaggaaccccaagttatcttgggacctcaagaggagaggactttggtcaactcataggtatttgagggtacaaacccatggctgggctcggctttcaaaaagtcttatctgagattcttcatggaacagagttccatcaaagccaatttaaaaagcctaagtgaaaaataattattcttgctgcacttcatgcaaataatcaggccaagtacagtaagactaaaatgcattttataagcaaatcatttctatcatgatttgtttttaataaaaatggggactgaacagagaaatattatgcttcaaaagaaaatctatagtaaactattagctattcttgaggttaattcttcagtttagactaaattctaaattgtttgtgggttagaagttcccaaactaatgatttcaaatgtttgcttttaaaattgggaattgtacttctcatcctaggactcattataccttatagtaggctattcacataaacactgtagtaaaactatagatgagagtaataatgtttctgccacgcaagccttggaagcccaattaggcctgcatgaatccactcaaacagttgcaaagcagttccactcttctcaccttggagttcgttcccattcccgctacttcccccatcagcaggaagaagccagagcgatcgacggccttttcccatctttatagcctataccttagggttaaagtgttagaaaacccaaaggaagggattgaaaccacctttgcaaaattaggtctgagacagtgaaaacaatctaacttaactgactccatcttgcttctaacctccaagctgtcttcgttcattcctgggcataggctgaactaactttgggagaaacttagtttacagtttaaagatggtaacagccctttcccagagcaaaattccttcttgcctgggacttgcgtttgtaggactaacatcagccacagtgttagaaattatggtttaggagtcatgcagctggaggcaacaagattctgacccccaccaaactgctcctaagatcagtgcttgagatattttgcagaccctgcacttgatggatcagctggcaccacccagatcaataaactggctcatctgatcttgtggcctccacccaggaactgactcagcgcaagaagacagctccgactccctgtgatttcatctctgaccagtcagcactcctggctcactggcttccccccacccaccaagttatccttaaaaactctgctccccgaatgcttggggagactgatttgagtaataataaaacttcggtctcccgcacagctggctctgagggagttactctttctctattgcaattcccctgtcttgatgaatcggctctgtccaggcagcaggcgagttgaacctcttgggcggtcacagttttgacctagtaaagctttcattttcttgctttgccctatggcctaatttataatatacataaccaaaagccttagcttctagtaaatagtatttattaaagtgctatataaacgttacattttagggtaaccaacttttcttgttttatttttgtttgtttttgtttttcaggaatttctcagttttaaaatttaaagtcccatatcccacaaacctgcttagcccccaggcacaccagacactcgatcaccctaaagttctagtttattttgggatccttgcatcccttaaaattacatacaagatgttgggtatacatacatactgcaattgccatcaggttcaccttgcccactctctagacagagttgatttatcaagacagggaaattgcaatagagaaagagtaattcatgcagagcaggctgtatgggagactggagttttattattactcaaatcagtctccctgagcatttggggaccagggtttttaaggacaatttggtgggtggggagcagccagtggtcagaagtaatgattggttggatcagagatgaaatcatagggagtcaaagctgtcttgccctgagtcagttcctgagtggggggtcataggatgagatgagccagtttattgatctgtgtggtaccagttgatccatcgagtgcagggtctgcaaaacgtctcaagcactgatcttaggctttacaatggtgactttatgcccaggagcaatttggggagaagcagtatcttgtagtctctagctgcatgactactaaaccgtaatttctaatcttttggctattttgttagtcctacaaaggcagtctagtccccaggcaagaaggaggttggttttggggaagggttgtcattgcctttgttttaaaccataagctataaactaagttcctcccaaagttatttcagcttacccccaggaatgagcaaggacagcctggggcttagatgcaagagggagttggttacatcagatctctttcactatttcagttataattttgcaatggtggtttcaatacctgaatgcattttcgtaagacaaagcttcaatgccaaaacatctaagatatcccaatacggtattaattcatttgctcggtattaattcatttgctgttgctataaaacagaatacctgaaactaggttacttatttcaaaaaggaacttatttcttacagttatggaggctcagaatgtatctgcacaataggttcttctttcctgctgcccaggtagagctgatttatcaagacaagggaattgcaatggagagttttatacatgtacagccaccagctaagcagaagatcagagttttactattactcaaatcagtctcctcaagaagtctgaggctagggttttcaagatcggtttggggaaaggcatgtggaaagctacgcaataggtgcttgctgctgactggtagggattgcaatcataggactgtgggcaagggtcctcctgtgcactgagtctcttctgggcggggccacaggagcagttggcaggtgcaggtggagccatcagtcatcagacatgaaatatatctgaacagatatctcaaaaggccaatcttaagttctacaatagtgatgttgtctgcaagagtagttggggaagtcgcgtgtcttgtgacctctggaataatggctggcaatcctgtatgtctacaccgcagcagaatttagtttcccctatcctcctagcctggtggtctctcattagctctacaaacgcggttgagttttggggaagggctattgtcatttaaactataaatgtctcccaaagttagcttggcataagcccaggaataattaagagcagcttgaaggctaaaggcaagagaggagttggctagattagatccctttcacttccatcattttctcaccgttataatttttgcaaagaccatttcaagaagtcccaggtcaaaaggacacatctggtgagggccttcttgctggtgggaactctctacagggtcccaatggcctggggcatcacatggcaggagggctgtgtatgctaacttgctagctcaggtctctcttcttatcaagccaccagtgccattcccatgataatgcattaatccattaactcattaatccattagggcagaactttcatgatccaagtgcctcttaaaggcctcccctctcaatactgccacactgggggttaaattttggaggggataaatagtgaaaccatagcaaccactgaatcaaaggagttaaatgctatttttaaaaatgatgctaaaagacaaaaaaaaaaaatatagtgttaaaagaaaaacttgagccaaattaaagttaaaggagtttaattgagcaatgaacgatttgcgaatcaggcagccctcagaattacagcagattcagagagactccaggggtgccttgtggtcagaataaatttatagacaaaaaaaagtaaagtgacatgtagaaatcggaagtgagatgcagaaacagctggattggttacagctcgctgtttgccttatttgaacacagtttgaacaatcagcagtgtataactggctgaagaatggcggctgggattggccaagactgagtgattgtcacaggcccatactcctaagttagtttttcaatcttgtctacctattgagataggttgtagttcatccacagggactcaaatatagaagtacggagtccttctcaggccgtatttagtttgctttaacaatagactttatgggaaaatggtattttgttaaatgcaaaataataagttagagaaacactttagtgtttataatttttaatattgactgttagccttagctgtttatttatttatttatttatttatttatttatttatttatttgagacagagttttgctctcgttgtccaggatggagtgcggtgatgcgatctcggctcactgcaacctccgcctgccaggttcaagtgattctcctgcctcagcctctcgagtagctaggattacgggcacccgccaccaagcccggctaattttttgtgtttttagtagagacggggtttcaccacattggccaggctggtctcgaactcctgacctcaggtgacccacccacctcagcctcccaaagtgctgggattacaggcatgagccaccacgcccacctgccttagctgtttaatatgtaactcatggcttggtatagttcctgagatttggagaggcaaactgaggtttgaatcctgtcttcaaacttattggcagttgggcctgatcaagttgcttaacatttttgtgactcattctccttacatacaaagtggagaaattttgcctatttttaaatagaattgtacaggacagagaaaaatgtattttaagcctcttagtgctttgtgatatatagcaggcaatatttaaatggtaactattattattgataatagtaagtatgtatttatgtgcttcacagttttacaattaaacatgtccctctcagggtttcttactatattcttacctagagctgtgacatattaaaccaccttgcaccaaaactgaacaattggtatactgaggataaacattacttttttattcagtagatatcactggataattttgttataaatctctgacagtaaagtgaaagattatgtatatcagttaaaactgataaataacattaaaaagaaatttctgaattgaacatcttttgctctaaattttctggccaaatagggatacctcaaaggaaaatggccggtgaatttgtatacagataattaaatagtagttttagtcagtaaatcaggaggtccaaataataagtagaaccagggacatagcatgatggaaattatgctgcccagttttcaaaaacattgatggtaataaacagctgtgtaacataaaagctggtatgagaacttggtcaaattctttttacctgagttgagaaaaggtatcatctccccatattctactccaaactgatgaaatgctcaccgagctgctccgtagcctggctggttacctcactgaaatttcacccttggaggccttatgaccttttaacttattccacagctagattccaccattatccaaatcaatggtgcatttacaggtgattcagaagttatttagagaagattctgacatgttcaataaaaattccaaatttctcaggaattacttttagacatctctaaatgaataacagagaggttatgtgaaatccttgtgtaattatctgtgcccagatttttttgtcgttgtttgtttttggtttttgaaacagagtttcactcttatcgcccaggctggagtgcagtggtgcgatcgtggctcactgcaacctccatctcccaggttcaaatgattctcctacctcagcctcccgagtagctaggattacaggtgcctgcgaccacacctggctaatttttgtatttttagtagagaaggggtttcactatgctgaccaggctagtcttaaactcctgacctcaggtgatccgcctgccttggcctcccaaagtgctgggattacaggcgtgagccaccgcgctgggcctgtgaccagatttcttaaccatcacatgcctttggacttgccattcaatgttccatttagtagattttgatacattgaaaaatcactatgaacacattttcaagtctagctggcttcatttttgtcctctaaatggcactaaatagaatctgtgattgtgacagtgcctttgctttaatctaccagctatttttgaaagatatataacttaattgaaaaatagtacaatcttttcacttagaatctttacgaaaaatgtaaaagatgctttgccagtctgaatagttaattgagtttgactgtaccgggtaagatgcaaaagagtgtgtctatggcaactctttatctcataaaaaatttaaagggcctttatttaatgtgactccttttaaaattcatttaatggcgtaagtaaaactggatatataattagagtctaagataaaagcataataattgaaataagataatatgaagaagctcacacaacaatgattgggcttcaaatgaatatattctttaagctcagctgaactcttgtaagttgtattttttcactatgatgtaataataatggtatgtggatgacaattatactactttataaatgtaaggtgtcttatagtgtactaggatctttcctatgcattatcaaatctgaatctccaattagccctggatatttgtatatccttttttttttttttttttttaatcaggacagagtctcactctgttgcccaggctggagtgaagtggcgtgatctcagctcactgcaaccactgcctcccagatagctgggactacaggcatgtgccaccacacttggctaatttttgtatttttagtggaaacggggtttcaccatgttggccaggcttgttttgaactcctggcctcaagtcatctgccacctcggcctcccaaagtgctgggattacaggtgtgagccaccaagtccggcctgtatgtccattttttagaaaaggaaactgagcacaaagaggttgagtaacttgttcaagatcacataattagtaagtgataaagtcacactcaaacccaggtattctaacttcaagtataatgttcttttctctgtgttccttctttgtataatagagagcaatgagtatgtaggaagggcagaatagctgcacagatctttacaatatgtctcacaataatgctgtgctttcaaaagacttgatttaatcattttgtttcctcattcactggtctattcattcaggctaagggggcccttttttctagatagatttgctttcaccatttcattcccttgtcaatattcgccatcttagaataattgtgttttcattctcccgcttgaaaaaagatgcttaggtaattctttatttaagaagtaaagaaacattatcaatattgatatagatatgaacatatatatatatatatatatatatatatatatatatagagagagagagagagagagagagagagagagagatggatagatacagatatagatacctcaaatccaggaagaaggaactagattttttaattatacaaaaataaaatactcttttttaatttttttcttttaccttttgtgttctttacataagatcaaatgaataaatacatttatttaataaggaagcttattggtagttcctgtagtatttactgtctattaagcatcaacctaggaattgtaccataacttttgtttaaatacaattcttctattgatgcagtaagagctgtcagtcatagtgctgggaatgccagaggggaagtcatccctgacaacattttttattgcactattaatacgtacaagttgacgttcaagtgtgtgtatgtatgtgtgcgtgtacataggcacacagaaacatcatatatacatgtgactacgtaaaaaaatacacttaaacatatctgtttactctgtaagtgaataatcatttatttcaatgtttagatgagattttaacatattagaatggcttcatttttctttctaggcaatctgctagcaggctttttccagcaacctattcttcccccatctttttgatattataccaagatttctgcctccatttttgttgatgtaattatcccggcataattttgaaaaaagatttcctggcaatgtaaatccacaagattgttgatatggcttgagctcaaatgatgcttctatccgatttgtttacctttcagcttgagcagagttcttgtttcataagaaaaacaggaagagatactatagtagagaaggacttttatggatggttttattttaagtaaatattgcctgtaagggatccaggaattttagtgtttttcttggattccttaaccataatacttagcccagagcaaaactttctctcaaatgatggtaaaaaatctaattctattaaatcctgattattctgtgagctaccttggaatacattgcctatgagtttttctgctaagaaatggacttcgtttattgctcattttcccaaaatcaaggaatgctgttgttcttcaatttagatagatgttgacaaggtcctcttcatagcagcaggtgttaggctataattgctcattatagaattatgttttgcttgaaggaactcaggaaacaagaaaagcatgttttctgtgtatatgaattctggttgaaaaattgaaagaatgacactaggaatagtatgtaaattggcagaatttgtcatttcattgtgcaactagtattttaaaaggcaataaatcaacgtgaacatccttgggaaatcagtctccttcttaggcctaacttgcaaagtacccccttaccattgtatttttttaagatagaaattgagattagagcaacacggggagcaaaatattggcagatgaacttgttgaaggagatgaaaaacaagaagctatagaaatagattggccaatagtgctgagcaactactcaactgcaaaaatggcttgcttttccaagcaatgtgtaaagcaattagcaccaacgtttttattagtttacataaaataatattactttgtaaacacctataaacagagattacctagatagcctaagactattattaagtacaataaaacgttactggtttaaagtaataggtatagaactttgtattgtatggtgcacattcacataactagagaggaaatggaggtctacaagtcaaggttgaattacacacttgtaatccatccttaagggaaaaagcttcactgatcaagatggtactttgcacaaccttgccaattgtttcacaaagctgtaatgatgccacaaataatctttcacctcccatacctaagtaaaccatatttgagttattttctctgctccttcctatacctttcctctttggcatcacaaagtcagatttttaacctacaggttgacataagccaaaaatgttggaagattataaactgcctctctttctctcactgtatgtgttgtgtatatgtgtgtgtacacatatataagcacacacatagatagaactcacacggaaacataagcacatatctacgcactgttgttttgctaccatatccagtgataacgtttattttgaattacatgtattttttttctgaatttaagagtgaaatgaaatagagttttgttagatatacagttattacctatataaaaatgattctgtgcatacttccttggcaaagtacaatacctcctccgctgtcactgccaatgcacaggtgttctttctcctggctgttagactcactgggagaacttagaaaaatatttcagccacagctttactctagcctagatcaattaatcactaccttggccttacaatctactaggcagtccttcccaaactctagaatacagcagaatcccctagaatgcttattaaaaatgcagattctaaagccccattctaaatgatattcttctggtaggtctttacaagtcatgtattcctggggtctttctttgagaaacacaactctaaaaggtctttgttattcccattctgggttttgaattctttctcgaaattgtaacaaaatatatgtactgaaatactgttcctctaacaatctgaagaaattttcagcactagcagcacttgttggcactattgttgttattttgtttaatatttaagacaactaaaagttacagtaatttataatgagaatcagtattatggaatcaaccattaacagttcatctcactaaagaatttttatttttattatttatttatttacttacttatttttgagacagagtctggctctgtcgcccaggctggagtgcagtggtgtgatctcggctcactgcaacctccacctctcgggttcaagcgattctcttgcctcagcttcccaagtagctgggattacagctgcccgtcaccacacccggataatttttttttgtatttttagtagagatgggatttcaccatgttggccaggctagtctggaactcctgatctcaggtgatccacccgccttggcctcccaaagtgctgggattacaggcgtgagccaccgctcctggcctcgctaaagaattaacatcatatgttcactagtactgaggttagttcccaaacactgcactaaaaaaatgaatgaaacaaatgaatgaaaatgtgtttccttagccatattctaagaaaatcacctctttgattattgtaattggaaccatctcttctttctttgcctggaatctttgtaacaaggttatcttctttcatgtcccattccaattagtaatcatttatttctattaaggcttttataatcattcggagaatccacactctttgtgtctgcagtcgctgagttcactcattaaatacagaattttcaacaaccctatttccatcttcattgttattaatacttcaaatttgcttctgttcagaaccacgcacttgtaggatcgagtaggtatacgtgttatccgtacacactctgaaaaactccctgcagacacttactgaacaggaattgcttatttaactgtgttttctgtctctttcatacatgttctctctctactgaagtgattgaaggatgacaaaggtccttatgggtgtttgatggcctgtgaatagctgtcggtctacgaattccctgaaaataatttctccacttgtatgaaaataatttactccgtgacttttcatgttgtattgtcaatcttccttctggttgtatcaggcaggagtcattgttttacatttcattctttagggggcctatgcttggatttctcccattgagaaaaaacaaagcataactctgacataatcgttggtgttaatatcatgaaaacctggaaaaactaaaggcaaggcaaaaaatatgcattcttatgcatgctttatgtgcactatgcccgtacataaacctggcagaactttaggcagaattaaaggtttaaatgggcatcatctatcctctataggccttttagtgtgcttcttatgtcctgaggaccataagaagatctaggagctgagtcctacctaccccacattgctggtaccgttgggggctctatgccattctactccagccagcttcctaagattagtctattacttttgtttcctttttttcttttctttttccttccttccttcctttttttttttttttttgacagagtctcactgttttgtccaggctggagtgcagtggtgtgatctcgtctcactgcaacctctgcctcccaggttcaagcgattctcatgcctcaccctcctgagtagctgggattacaggcgcgcaccaccaggcctggctaatttttattttagtagagacgcggtttcatcacattggccaggttggttttgaactcctgacctcaagtgatctgcccgcctcggcctcccaaagtgctaggattataggcatgagccactgcacctggccttattactctcgtttcctagacattattccacccttcctaatacttagctacctacttttgcttccgtttaaccctctgtaacttgttttaaggtggttttttttttttttaaatcctttggctatgtatgttcttataaagcaaaatttagttgtgtcaattcatgaaatcatattagcattcacttagaggagagtgagaaatgtttcctgctcatctatatagcattgcccatttgcacttagttttgatatttgaggcaaatccttcggttttattgtctaaacacacagttgtaattctaaggaattttacaccaggtcgaaggaggtagcattgcccttgcatactattatgtagggcattgtaatatgacatctgtcatatagtgagatgaggatggctacctctttcacttaaaatagctctggccctttatataaccaaagaaaatataactgaaatgcttggcaagaagtaaagttatgaacaatgggcttccagcatttgctgtatgcctgctggcataggaattccaagcatataatgggtgttctttatataatgaaaagccaattgtgagaccggcttataatctttggtgccagtaggcagcatgtacatttcataatttcatcctaatgttttaagtgatacaaaaatgtcctttttatctactaaagtgcttcacatgttaataaatacatgtaaatttctgtaaagtgatattgtcccttaatgaatcaaactgataattgtttctatctcattaaaagtaatctatatttgaaagtgaagaactctacaaataaaaatatttaacatatcaaacatttgaaatttctaggtattgtaagcacaaatatttatggtcatatttggccagaatgttttccttgtaaatagacttggaatttttatatccactattgtgattggctgtaataatttttcaagtactgtatacacaaaattataattacattttatactaactatgggtgggggctgtcaagtgtaggtaaacaccaatttgcctcatcatctcttttgtaaaacctccaaccaccaaacctaatcgagcaagtttatgcctcctctactgcatgttagcactttttccatgttaatgtaatatttgtacacaaacctgtatcatccaacagagcttctgagaagtagagacctttgcttattagactttcagttcttacttcgtagaatggtggttggccattccatacattttattttattttattttattattatttttttctgagatgaagtctctctctgaccccgaggctgaagtgcagtggcgcgatcttggctcactgcaacctccgcctctgaagttcaagcaattctcccacctcagtctcccaagtagctgggactacaggcacttgccaccatgcccggctaatttttgtgtttttagtagagatggggttttgccatgttggccagactggtcttgaactcctgacttcaggtgatccacccacctcagcctcccaaagtgttgggattacaggcatgagccaccgcgtctggccatcaatgcattttaaataaatgaactaaataatgaatatcatttaagtgcaattctgtttacatttgtttacatctatacttattttaatcaagtatattcggtggtgtcaacaatctgtagcttaacaattttaattgaaagactctaattacatatcactatataatagttaaatagttttcttggatgaaacaaaagagagtgagatagagaaagaagtaacaattaaaggatttcattatgtgatagtcttcctgtgtttttttttccttttagaaagttgccgcaataatagaaaatgtttatttctttttcttactagtagaggtggcatttttgctatagagtgagtgcccttagttcttcatttattaacaaatatttcattctatgtataaaaagtataataaaatcatatagacaatgttacatgaaaaatgaacggattgttattacaccaggaaatcactactgtgccctatcaaaatgagtttgaagtatatatgtgcatatatatgtatatatgggcatgaatctaaggcaatcaattatgtctattttcaatgctctgtgaagaaagaaattggttgcctactgtcacattttatcttagtgatactctttcattaaaatgcacacacgaaaaaattaaaaatgtaaaatctgattttctaagtggacttaggaaggtacagggaacaagtgctagtgcgtgaagtggaaagtatgagagtacatgaagttgaaaatgtgtttgtgtgtgtgtgtattgtagcaggtcatctaggactgcaattttcaaccatatgcccaagccccggcatagagatagtgattcagttggtctggggtggggtatgggcttaggtaatattttatggctctctaggtggttctgatgtgtagtaggggcaaagaactgcctctatgggtgtctaggactgtactgtaactatcagcaattagtgagagggttctttgtaatgcctttgattattcttctagagacatatgttctgtacatcagccggggagcaaaaccagggaattccagaagtggttctcccttaagacttactctgacggtgttagtgttttcataactcgagccttaccctcattctaggaaaaattataattattatctatcttactttccaccctcagtacttaacattttaagggatttagtgaatttttccacttccctttttatatttgttgcaggtaagtcctgttgaatatcatcctcaaatacatgcatattttactgccatggtaacattttctactttttcttctatttttttcatatgtaaattatcattgaaaatttggcagagtctctggtaaccaaagtaatcttgtctgtttctgtgctactagttttattataatttgattcctgttccaaaaatgaagtacagtaataataattttttaaaactcaaattatttgtaggtcaatattaatgactttttattaatgtatatgtatataggtttaacaataagtgaagcagcttataacagtatatattctattaagtagaaatttacacataaagttagaagaactccatgtgcagtgtcctcttatgctcatatataactttctgtttcaaataagagtttcaaaactagagtctgtgtggcacagatggtgaattgatgccataatttccaatctgcttgttagtagagatatgtcatatgtttattgatgattgcaagtatgtttggtgcattaaagcttcatatttagtattataaaaaacttaatgtcatgtggggaaagaagttgctacctttctaaaaattgtagaatagccaggctcaatggcgcacgcctgttatcccagcactttgggaggccgaggcgggtggatcaccggaggccaggagttcaagaccagcctggccaacgtggtgaaaccccatctctactaaaaatacaaaaaccagccaggcgtagtggcgcacgcctgtgatcccagctactcgggaggctgaggcaggagaattgcttgaactcgggaggtggaggttgcagtgagccaagatcacaccactgcactccagcctgggcaacagaacgagactccatctttcaaaaataaatagataaataaataaaaacaaaaattgtagaataaactccttgaattccaggaagaaacaaatattgttgtccagttatgcaattatgcataatgagagttaaatgcacaaagtgatcttaaatgtacatattcaaaaatagaggttggatcaagaattcagattattcaatatcaattcaattccttctgttgtgccatttgaatcctattgccaaagatgattattcatcttgaaaaacagactcccaaattcagagttcctgcattttaatttgcccttatgaaaggaaggattctttccttttctggaatacaatcaacttctgctgagaagaaggaaagtctttattcaatactgaaaatgtgtattttcttaccgtctatttatatggacaataatcaaacttttaattatcttctcacaatacttacagatctatgagaagagttgctatctaaagctggatctttatggagaagagacatgctcaagtgtagcgaataatttttgttacatatcagtattaactaagctttgcaaagtgaatagggaaacttatatttaaaatgtcagggaaaaaaagagttttaagtaaaagggacacctggaactctaaagagactatagctctaaacctgtagctgaattctgccttagatttcgttgacccttaactaggggcaaatgcacaccccattctcagggtttcccacacacctctggaaggaacacaggagcgtatttacagctatcgtctaaccattatagaattcctggggacaaagttgtgtcagccacctttgatttgtagtaaacaggtacaaaaccgcatcatggaattatttctgcttatataatcctcttctgcagtgtctgaatcttggcacctcctctccttcctcctaaccactgcaaaaacaacacccagattaaggcatcggggagaactgaatatctgaatatcaagtactccatatatattgatccatcgaatatgcctacaatatcactactaacctacaagtgtaccaggagttacacctgcagtataacagattaaaacagccttctccaaagctcatcactttgaatgttaaaagattcattttccaccacttaaaatctgcatactatgatctgtgtataaaaagctaaaagatatatccaatttcaaatgtaatgtcatgcaagtgtctactgaatgtgtatatatctttgtaagtgtccctgagcaaaataactttcaacttaacattctttttctcttggatataaaagagaataacgtaacaagagcaaatttgcttttaaatttctgccttgatagcaagttaaagtatttagaaccaacatcctcttaaatgtataatttatataacggatgagtctagaacagcatttccaaatggaaattgtaaagaacattgatcccgtaagatgttgaatgaaaaacaaattgttaaaatgtgataatttcatttccttctttagcgagtcacaactcaaccctgaaatgttttgtagttaaaaaaattgtttaacttagtttaacccaatgtttctgaacctacgtcacaaaggaaatgtttttgtcaagtgatacataactttcaaagagattggatttttttttttttttttttgaaatgaagtttcactcttattgcccaggctggaatgcagtggcatgatcttggctcactgcaacctctgcctcccaggttcaagcgattctcctgcttcagcctcccggttagctgggattacaagtgcatgccaccacgcccggctaattttttttgtatttttagtagagaaaggggtttcactatgttggtcaggctggtctcgaactctagacctcaggtgatccacctgcctctgcctcctaaagtgcagcgattacaggcgtgagccaccacgcctggtcgagactggaattttttgaaacacattttcataaatgaattactggggtactctctgtttattaactatgttagtactgacaaagattatttgctcggccaaaatttattcaggcttcccaaccttctcatagcccagtctgtgcacattctcctaaaatttagttttagcaggccagatcagtttagccagaaaacactcatccttggtatttgattatcctggatatctgatcatgttcctcatcatccaccatcctccaggggatgactggactattttcagcaggagtctcccttacccatgatgcttcctcttaataattttccatccactgacccctaccctgttccttggttataaaattcccatttgcctgtgctgtattcaaattgagctcaatctctctcccctactgcaagaccctattttcacggtccctatacctattgagatggtcttgaataaagcctgccttaccgtgattcagcaagtgacattgaataattttttctttaacagtataaggatcgcacattaccatttgttttgaaagatggtataaaaagactaactgaaaactaatcttggctgggtatcactggcagaaattcttggtcttcaatctatgtagaacagatatttgcattttcttttgaaaatttaatacattgattaaattgtcattttgttataaaaatatgaaatgaagggtacatatgatttttaaaaatttctgtccaccatcaccaaccactatgtgaaaatacacctttgtaagactttttctattctataacataccttcaaaaccaagaagaagtatttgtaggaaattcattgcttttatttgtgaattgataaagggaaaataataagctagggctcgagcttcagaacagggtgatggttttatatctctctcaaaagtactgcaaggtaggttgtttcaatactattaacaaccccagggttccctgacatcttctattcccagcttccattctcaaaaattatatcgaggccatgagttggactcctcagccctagcaaaagattattcatttgctctgtaacccttcttgaaccccttttcctggtagctgtgcccaataaatccgacttatatatctttgggagttggagagagagagagagagagagaaagaaagtgagacagagagagatagagggaaattattttagctaagaaaatttacagtcacaataatatgagagtctctgaataagggataaaagaatattagacgagacatagtctctgccaatggtgattaagtaaacatagtcaaggagaatatggctgtgaccattagtgtgtaagtggttacatctggtgggcaatctccagtcataagtaaaataatctacgagtgagatacaggctaagcaaagatttcataattaggaccgaacaagcactaagtacaaagtcaaacactgataaattgagcttcattaaaactaagaattctatctattataatacactaataacagtgaaaagaaaagtcatggactgggagaaaaatattcacaagacgtatatctgattagaaaacttgtatccataatatataataaactcatacatatcaataaaaagacaacccattttttaaaagttggcaaaatatttgaacaggcacttcataaaagaggacaaagatggtaaaaaacatttgaataggtgcctaacttcattagtaatcaaagaattttgaatacccctatatatgcatccgaatggttaaaatataataagacaatatcaagtattggggagaattggtgcctcagctggagctctcaaatattgctggtttaagtgtaaattaatatttgccaatatctactaaatctaaatttatgccttccttatgagccagcaattcctctcatatgtatgtgttcaaaagaaattagtaggccaggtgtagtggatcatgcctgtaatcccagcactttgggaggccaaagtgggagggtcacttgaagccaggagttttagactatcctgggcaacatagtttgacctcatctctacaaaaaaaaaaaataaaataataataatcaaaattagcctgacatggtggcatgcacctgtagtcccagctactccagaggctgagatgagagaatggcttgagcccaggaagttgaggctgcagggagccgtgattgcaccactacactcctgcctgggacagagtcagaccctgtctcaaaaaaggggagaaattaagtccaccaaaatagcatgcacaaggtagttaatagcaacattttgcataatagcagaacctgatataacttgtgtccctcagaattagaattaaaaatgcggtatagactgggcgaggtggctcacgcctgtaatcctagcactttgggaggcccaggagggcggatcacttgagatcaggagtcagagaccagcctggtcaacatagtgaaaccctgtctctactaaaaatacaaaaaattagccgtgtgtggtggcaggcgcctgtaatcccagctactcaggaggctaaggcaggagaatcgcttgaacccaggaggcagaggttgtagtgagctgagatcatgccactgcacttcagcctgggtgacagagcgagactttgtctcaaaaacaaaaacaaaaaacaaacaaaaaacaaaaattgggtatatccgtggaatattatatagtaataaaaacctgctacttggaagaatatgaacgaacttcataaacacaatgttgactagaagatgaacatttactgtgtgattccatctatatgaagtttgagaactggccaaagttatctataatgattcaggtcagcagagcagtttcttcctgagaggctggtgggaatatagtgtgaattgggaaagagcatgaaggagacttacagggtgctgcaattgttcagaactctttttccttgatacttgcttacagaaatgtgcagaatttttatttcacctagttttctatgcatgcgtagaatctccatagaacacacattttattaagtacgcattcaacttcttctaaaatacctctagtcatagaaaatgtaactttatttctttattccttactttgcctagcccaagctcctacaaaaaaaaagattagttaccatttaattcaaattataaaacagaaccagtcttttaaacagtatcggatacacaagtatctaatctaacttccattgcctatcagtggatgtggctttaatcaagtcttttctaaacaagatggacaggcactgaagaaaaaaaaagtgagccattttatgtgttttaaaatgataatgtgattttgaattttgctattgtagaagctcctaacaatattatctggcatttgttctatctgaataaagccatggcttatattatgtatatatggaatttcccagaatactattgttagacacatcactgagctgtgaaaaaaaaaatcatctctaatttgatcaatatgtacttacacgtatatcattagttgccattgctctcagcctttagtacattttttatgagccccgtgggccatgagcttgctttttcataacagagaacgagaaagaagaaatctcatcagtataataatacccacatcagtagagggcatggttcagaggcaatcttgttgtctgtcacagactccatgatataagctagaaatgataaagagattcgttacaggatactgtaaaagggatattatggtatataaactcattaagtgttaactagatcaaagcaaatatggcagaaaagagtctctgaatactgtagcagagtttattgaatgaatgaacgaacgaatgaatgaatgaatttataaaaagcgcaggggggccggggcgcggtggctcacacctgtaatcccagcactttgggaggctgaggcagacggatcatctgaggtcaggagttagagaccagcctggcaaacatggtaaaaccccgtctctactaaaaatacaaaaaattagccgggcatggtggcgcatgcctgtagtcccagctacttgggaggctgaggcaggagaatcgcttgaaccctggagacagtggttgcagtgagccgagatcgtgccactacactccagcctgggcaaagagagcaaaactccgtctcgaaaagaaaagaaaaaagaaaagaaaaagaaaaaaaaaagagcgcaggggtcagataattgagttagaaggtagaggagtggggatgttaatgcccatgtgagaaaagaggaagaggtattgaaggaatccagcggactttgatgaggaccatgcgggactttctattttcaggaacctaagggaacatcttgctgtaggcagcctggggctgtctccatcaaagaaatgctaatatttacattcattggtttttgttatgtgactgtctatgtgctaaagctgtggttctcaaagtatgtttcagacccgcaatatcacctggaaatttgtaagaaatgtaaattctcgggctgtgcggagacctactagataatgaattctgggagaggtattataagaagttcttcaggggattttgatatagtctctaggttgagagacagtgtagtagacaatacattcattactttatttattcttctccatgattctataaaagagctattgttactgctttgtttacaaatgagaaaactgaggctttgaaagaggctcagtattttgttcaaggtcatatagctggtatccagagatactgggaatagaacccaaatttgtcagactataaaacacggtgctttcagccactcctccagagccagggggataaaaattcattaatttccatgagtatttgtaatagtagcccgcaagtcctggaatacaattataactgctacagcattacctttgaggagaaaatatctcatttccccaattgattgccaaaataaaatgcttaaaatacaaatgtctggttgaagaaaccctttaattttttttcttgcgttcaggcatttgtgtcaggtttaactaatttattttaacttgcaatacagtgttgcctgtagtaacaaataggacattctgctattagtttttaatctcctaccgacttgttattttccactcctgaagctaaacttctttaacaatttctatgctcattgtatctacttccttactcacgtagctacctcaaacaccaataatccggctgcttccacatccttcaactgaaattgattttgtcacggcccaagtcacatcaggcctcatcttaccactctgtagtattgattgttgatcggtccttcctattggaaaaactcttcttccctggcttctaagatattccactattctagttttcctgtctcagggcaactttatcattttcttggagggttgctctcctatcgtaaatctcttttaacgttgagcttcaatcttaatgctcaatcaacatatttttcttgatctcatcaaaatccatagcaataacaactcttaaccatgaccctcagatttttatatccaaccaaaatcattcttttgagctagagacctatccccctgcccatcagttatgctcatgtatgtcacatagttaattcaaaatcagtatatatgagatcaaaaactgccttctaagcaattcttcctccttctctagctcattgaaagacatcatgtgccaaacttctcaggtttgggggtatcattcttgcattctccctcgagatcactgttctaacattaccttggcatcagccatcatgttttgccaggattgttgcagttcccctaaaacagatgttcaatttcccccacccctgtgattcagttttccacatgcagccagaatgttttaaaaagcatattcgattgtgtcatcttccccctagaaaaccttctgcggtttcttcaaaataaatttaactgaataactagttgacttaattcaatgttttccttcgtcacactaattaatcagtattttcatggtcctcgatgctgagggcttaacattcaagaataaatttgtcttatgtttactttaacttataaacttcctttaaatgaaaactaattgttaaatgatttgcaaaataaccagaggcacaaagtctattgtgatcagtggatatgacagaatatattttttgttgttataccatcactttcacaaaactatggaatatatatataggcatataggtgtgtatgtatatatatgtatagatatgtgtatagagacataatttatagaaacattcgtaataaacccctgccaaacatattttgcacgtttgaaatattagttgattggatttgtggtttgtatgtaagttgaacaattaactgatgtgatcattctgtttccatggctgttaccttagtttataccaccttttcacctgagtgattacaatagcctcctgattccttgtctctttatttgccacgttcccttcttcaaacttcccaaatccactttcccaattgttatcaaaaagagttttcctaaaatgtaagtcagataatgctactcattatgccaaattctcattgccccaaaagtgaaatctgaattctataagatgctctaccaatctctccattaattggcctctgcactatctctttacattcaccccttcccacccaccgaacccacccatccctcaagaacgacattgtacgtactaatcatgtcatacaagtcactattctagcttctgttattcttctggaaatgtcatctcccacctcaactttttacccagctaactccagtttatcatttaggtgatgtctcctttttggaacatacctagaattgacgttacaggaggaatatctcttgtgtgtcatctcaacatcccacagtaactatttttttttctttttgttttctttctttcttttctttttttgagatggagtcttgctctgtcacccaggctggagtgcagtggtgtgatctcggctcactgcaacctccgcctcccgagttcaagcgattcttctgtctcagcctcccgagtagctgggactacaggtgcgtgccaccatgcccggctaatttttgtatttttttagtagagacggagtttcaccatattggccaggctggtctcgaactcctgacctcgtgatccgcccgcctcagcctcccaaagttatgggattacaggcatgagccaccgcgcccggcccacagtaactatgttttaacatacatcaaaccactttgcaatttcctgtttacatgtcattatccctcattagtaagcttctaaaaagtatgggcatttatccagttccctatcatctccctagtccccagcacaatgcctgacacttaagtaattacgtgagtaattaaatgagtaattatgacacattcaagcttgttaaactctaaaacttggaaataaggcaaaagaacaagtagatgttcttttattatcatactaaaaagtattgtctaaaagatctaccgacagatagtttaatttgttagggacatgcgtctttgtataacttagtactaacttaaaagataatttttttgtgggtacatagtaggtgcatataatttggaagcacatgagatattttgatacagacatacaatgcatagttatcacatcagaataaatggggcatctattaccttaagcatttatcctttgtgttacaaacaatccagttatactcttagttatttaaaaatgtacaagtaagttattattgactatagtcaccctatagtatttactattgattagggcttagattctgagaaattttacataaatgtacacatttttgttcagtagagagacaagtaatatctttctggcaccctcaaaatatataattttattgcactttttgatgttaatctgttttgtttctaacttagcaatcttgttctagcttctttttctttctgtgactatgtgtgttcagtcccttgaattcccctttgaatcagttttaatttgttgcctgttttgttattagttagttgaataaatgtttccatattatcaggatatgtttataagggaacagcaaatttacttccgtgtgttttaaactatatgagaaacactgagcttggcatcaatagctaattctaggggagaaaaaaagtcattctcgtatatatttggaaaaacagtttttattcctttttgagatattaacagccatttgtatgttgaagattctgagaaacttggaggtgatttaatctgttttgctttgtttaatctaaaatttcaagattattttggttctaggaaattttgctctagaaaaaacagtttggaaacattggtttacttatagctttaaagaacaatattttaaactacaattcttgtgttcgaaatgctgtaaaaatcatttctattaagatttatttcctctaagtgttttgcattcaaataaggtgaaattctgggtctccaaatatacatttcagaaaagtctttgtttagctgtagggaaggcatcctgacttctcatcattatagtcacatagatacactagatttaaaggatatttaggtcgggcgcggtgactcacacttgtaatcccagcactttgggaggccgaggcgggcagatcacctgaggtcaggagttcgagactggcctggccaacatggtaaaaccccgtctctactaaaaatacaaaaattagctgggcgtggtggcacttgcctgtagtcccaacttcttgggaggctgaggcaggagagttgcttgaacccaggaagcggaggttgcagtgagttgagatcgtgccactgaacttccagcctggggaacagagccggtctccgtctcaaaaaaaaaaaaaaaaaaatagagcgtaattatatattttccttattttaaaagggaaaaaatactttccttattttccatatagagtatatcaaaataattacaatcattaagtaaaactaacatttacctgtggtctaaaaaagtcggttgaggccaggcgcaggggctcactcctgtaatcccagcacttcgggagttagaggccagtggatcacttgaagacaggagtttgagaccagcctagccaacgtgatgaaaccccttctctactaaaaatacaacaattagccaggcgtggtggtgggtgcctctaatcccagctacttaggaggctgaggcagaagaatcgcttggacccaggaggaggaggttgcagtgagccgagattgaaacactgcactccagcctgggcgatagagggagattcagtctcaaaaaaaaaaaaaaaaagaaaagtcagttgagatagtgaagatccaaagatatctgctaaaaaagtgtgtgttatctagttttaaaaagaaatgatatgcaaataaaaacattagtgagcagttaaatatttaaagggtacgttacttacattatgggtgtaaagtgtaagtggatttctgaaaacatgagcaccatgtgaacttcagtatttaaacaagtttattgcttttggcttttggatttattgtttttttgaaaatgggtctgagaacggcctagaagaatgggtagacttgacatctaagtctatctcaattctgctcttgagaaaagaggaagaaattgctcagaatgttctatcataattttcttcttgctctttagatttctaaatggctacacaggtattgagaaacacatttttatcttgttatgaacactaaaattcattagccttatatttcctctttccttatagctgtgtcttgtttttgatggcttaacacttttccattctaatcaagctttgtcatgggctatgggctgaagtgccttgtgatggactgatttactttcagtccctgtaatctgtgcccttgaaggctagaggttgaaatcattaaggctctgctgttgcccttgatctctgctcaaagaggctagagattgattggttgacagtggttgacctggacgtctcaaaatgaagccgtgatgaaggaaaatcaagtacacacgttcagaatatttcataatgacatttattctgcgtgcattttttccagcggtatttttgcttctttttttaaaaaaaatctagtttaatcatttctagcccaccctcaccactaccacatgtttattccatttctacattctggggcacttaagaccttttaattccttgaattagtcatttataaatgttgtctgaatattctatcaaagcaaggcagcatagagaacttattattacacacttatcacatgaaaaaattatttattagcaaatatctattcagagcaaacattttgatcaaagttggcctcaattcactaattagttattatgcaaacataacaaacatccaatagaataaatattcactcttttctacagttttttttggaatggtttcagtgctggaaaaaaaaactaaaccaattcatgtaagaaaaagtaaatgtctgttaagagaaaagaccacttttaaatacacgttttaatatttctattttaatttctacttaaaaaggttaaggaggaatattctaaagacgaatatatttgcaaatactgtgggaacactttattgaaccaatttgagaactaagtcaattatattgaatttacatatttggttaaagaaaaaatgagaagtgattagattagttcaatatttaagtgaacttaacagaagtatccaagttcatgttgaccctattgcttcgtattaatattgataattacaaatatacatatatattaattttcaaaaatatagattatgagtgggtaataatagcttctaaaaattcactttggtactattccatagtggccaagtttccttttgttctctggagggaggtggcctaatttaggcaagtttagtatttagagcaaaaaaaaaggcagtctatgcagagattcaatggcatcttaaacctgccccacctatctctcattttttacattgctttttcattatcttttcctttcctttcgagagacttgaatttaatattgtctctcttttccccatgtttgccttttataaatctaagcatttctgccattaatactgtaggttaagaaagtggcagccaccatatttaaggaatagtaaaatctgtaactggggaaatatacagtcttctgagaaactgaaataaatttcaggtaaaaagtatgtgacgtcaattgagtggtgcacgtcgagggatacaaacctaaatacattccaggatgaaaatcgtgataagtttggagctccattttcagggaagtttctgtactgactttagaaacattgcaaccaaacaaatccttgggaactgtagaaaggactctttttagtgttcaggctaagtagacaatgcctacatatttaaagtttcatttggcagacttgacacagtaggcttcatggaacacaagttatgccttccttggtctgagagagagaagactagttctgctcaactgaagttaagatctgaggttcagtgagtccatatagatatcatggaagattgagtgaatacactggccctaaagcaacagaaagagcacaagttgagatacagttttaatccccaatgattggaatcaccactgccagatatcacatcctaattacacattctgcccttcaagctctggcaatacttttcttgcggtgccccctttctttagtttgccatatgaagagtgtggtaattactttccctgcagttgtttaccagttctcattcatttttcaagttttcctttctctctctctccttttttttttttttttttttttttagatggggagtctcgctctgtcagccaggctggagtgcagtagcatgatctcggctcactgcaacctccacctcccgggttcaagcgattctcctgccctcagcctcccgaatagctaggactacaggtgcatgccaccatgcccagctaatttttcttgtatttttagtagagacgggatttcaccatgttgggcacgctggtcttgaactcctgacctcaggtgatccacccgcctcggcctcccaaagtgctgggattacaagtgtgagccaccgctcccagtcgaatttttctttctctaaacaattttcagtgtaaaggtctgctgtgctataaatttgtgacacatgattgtgttgtagttacgactacgtaaggctctatggacaggtttcctttagttctgccagcacagctaaccagctaatataaatataaagaaatgcaactgttgacaccaaatgcagtttccgtttgcctgaacaatcaacaaataaacacaaaatctgaataaacattacaatgtgaatctatgtgtctgtatccataattatataaaattgaattattctaaagaattctatgtttcttaacaaaaatattatatgcatatatacagttaggtttaatagatttgtataagcatttctaattcttagcttccattgatcttcagtgtttcagaatatttatttcaaatcacttttggaagaaagtaagtttacaaattgtgaaaataatacacaaatcagagatccctatttaaaactaatccctacatcgcttcatcaaaatgcctaaaattcttttttggaatgaaattcacagagaattgcaagattcatttcctttacacttttattcactgccaataacttggggatactaagagtgcaggagaagcaggtaattctgagggcgttttggaggaaagcagttttgcattggctaagtttttaaaaaagattaaacatttaagtgccttgttttaaagatttgaatgataatgatttcaggtaattgatttttaagctatatggtaataataagacaaaaataattcatttgtttccttttggaaaatagattttttaaaagataaagatctgttttaatttttgtttttatttctaaggtactgtccaacctaaaaatatgaaagtaggtgtgcataagcttttttaaaaaaaaatcgccagtagtacaaacaaattttatagtccatcatttgcagggctggagggcttgccatatttaaatgtgtgacctgttttgagtatttgggtcaaagagaagggaggcaccagtgtttaaagtggcacaaacagagggaagaatgaaaatacaatcgaatatattcatttttattttcataaataaaagaaagtttaaaaaatctaggtacatcagtaatgttcccttagatagtattattatgtggctattgtttactctcctttgtcagcaacacgatcagtgattttcagcacctgctattgggttaataatggagttagagaagcatgagtttcaatttgtgctcatctactgcaaagtagctatatgaacttgggcagttacttaacctcgctaagctttgtttcctatccatacaatagggtcaagagaagtacctctcttacaaggtctgtgaaaatgaagtatgttcatgtgtttaaagtgtttagtaggtggcacatagtaagcactcaaattatatggactatggccattaccttgacaaactatattctctctccatttcctcatatgtaatgtggattaacacgaagattaaacttaaaaagtgcataaaaatctcagtgtctagcaatttgtagatgttcaacattattaaaattccctcctcaattttgcttactttgctgtactgaatgctatgtgagataggaaaggatatcaattatttgctatgccccttccgggcactaaataaatacatgtttttgttcattcttttactcaatctaaaagttattgagcaccaaataggcatcaggaagtatatggacaagtataggaaacaggattgatatttacaatcaggagaacaattttgagcccccagtcagtcacttgatgttatcctgggcaatcaatggatagagtccaaccactctaagcctcagttttcttatttctacatgttgatagtattaatagttgttataagatttgaaacctgttatggactatagtattttgtgcagacattagtcaaaatcataaattattttggggagcacatttacattcctcacagtgaagccttgggccctacacctttgcactaaattatacatctgtagcaggaaaaaaaaatttcagtatcacacaaatttaagtgggctaaaaatggtattttattaatttttctatagctaaattaaatttctattttggttcctcttttaatttaacaggtttcttaatataccattctcaggaaatcttaataaaattcagtgacttttcaggtctaccggtcacattcaggagttgttaggactctagcctccactctaggattggaataacacaggagtattacttagcttcatggcatcagggccaacttctgattctaggtcaaggacacacagagatgtgacatccaatgtggtctgtggggaagaagatctttgcatgcaggcattggctgaagtgaaccagtacctgcatcccgcccttagttgaactgcctattctgcctccaggatttggggtgtctgtgtcctgattaccacacccttgaaagactgccagcttgctcctcctaacttccatgaccttctcaagcaccgacacatgttagctgcttatcacaaacctgatgagatgctcagacccctgtgaggctaatctacatgcccagtccctttgctctggttgggcactatttttcagcagctccagaacctccttctcttctttaggactttggttccctaagaggacattataatgttcctcttatttgaaaaggtgtgtgtgtgtgtgtcagagggtcaggaccctccccacacccccacacggcttctagctctcacttatctgtaactctctcaacttccccctcttcttctcttggtaggcacctagagcaggtaaaaacttttaaacaggattcttctatatctgtttatgccagaatcatggttcacttacactaaaagcagttgacctctgtcagtgaaatcaagagttgattttgtaattcaagagctctgtatttataaacaaccctaaggcagtgaggaaacagtgcctaacttaccttacttgcaaaggatggaacttaagaatgtggttacaatctcacgaaatacttgtgtgtgtgtgtgtgtgtgtgtgtacgcacctgtgtgtgtgtagttctgaagatggcattgttaggtggtggaggcctataatattatgattctcaacatgtgaattgttatcacaggcaactaatcctattgcctcaggtttacaatctgtaaatgggaaataaaatgcctaatgtttgttctcagcctagttgtgaggattaaatgcaaaatacagcctcaacaaatgtgagttcccttcctcacattcccttgtaaaaaaaggactttccccaccccccttttatttagcatatcaacaattactcctttatttgggactgaacagccttttactaactatccttttgtttctcattttttatattcatgcatagtacaacttatgaaatattttaccccaaatcctcttgggtctgctttatatgcataaccaaataaggcatatttttatacaactattgtgttttatcttaaggtaaatttcaagctaaagtgaaaaatgaattccttctggtattcaggcagaattttccttacgagaagtaggtcaagaaacattgaacgcagaataaatttatctctgaatacggctcttcagctctggattgtttaaggatggcctagaatctacgctgagcattctcttgcatctcctttttcagtatggttctgaattagcactcgggcataaagcatttccttggaattgctcttatttttgtccccatattctgcactccatcgtcaggtaagaaggcaatatgtagcagtcatttaagaaaccagcacataaattatttccgaagttaaatcaatgtgcatcttactggttcagttcacagttaactagaactgctggggcttgcttttatgaattgtcccattccctccttgctttctttttgagactgactcttgctctgtcacccaggctggagtacagtggtgcgatctcagctcactgcaacctcctcctcccgggttcaagtgattctcctgcctaagcctccctagtagctgggattacaggcatgcaccaccacgcccggctaatttttgtatttttagtagagacggggtttcaccacgttggccaggctggtcttgaactcctgacctcaagtgatccacctgcctcggcttcccaaagtactgggattacaggcatgagccactgcgcctgggctctctcttttaaacaatcataaatatgaaattaaatgggctgactggaagcaaattggtctgtaggaacgcccatgaaagtgttccattctgattgttttcccatcctgcagcccctctggcctagtggaagctcctttcgttttgcagatttagattaactggggtaggtgagagagggcagggatggcaggccatttgtctctcatcaccgactgaaaagttgagcctaatatataccttttgctcctctacccaaatgaattacaaaattctaattccctcacacaccggggcctgttgtggggtggggggaggggggagggatagcattaggagatatacctaatgttaaatgacgagttaatgggtgcagcacaccaacatggcacatgtatacatatgtaataaacctgcacgttgtgcacatgtaccctaaaacctaaagtataataataaaaaaaagagttgattgtttttataatctaaaagtaaagacagtttggttttgtcaaaacttctttgttttctatttattttctctatagcttctaaatttgtgttctgcttgtgcatgcgtgtatgcttgcatgcatatgtgtgtgtgttttccttaaagagtaggcaaaaaagggcagaaaatagatcattcccttataaacctgacaagtacctgtttgtttctttcactgtggtaactggaaggctggaaatactgagcacttcagtagtcattctaaaaagattggttcatgtttaatttgtttgactgcccaaacctctaatggttcagtgaaaccttcgtgaggattttaagaaatagatcaggtgatagtttcagttgaagctactaaaaaaagcctttttgttcatattattttattagagtgggaaattgggaattctaaaatgttcccacatttgtcacccgtgttactctggcagccttttgtcatgttcacattttccctgttcgtttgttactgctgctgaatgtactttaatgattctaataggagctatagattgtgcagaagaataacaagcttcaaattaaaaaagaatatatttgcattttgtggcttctaaatattaatacaattgaattgtttttgttgaccactgtacattgacttcccagggtccggtgcatagcaaattcatagatgctccataaaataattatagaaccatgcattcgtgtgtgctgtgttgtggttctgggtactaaggatgtctgcctgagtcctgaatgagtcttaatctccatccaagttgtgtgtttcagagttgggatggtgcaaggaatttgattattaatgtaaactttagataactcatagcatgaataacaactgtacagtagaagaaaaatgcagaaagaataaaaaacacaaacaacagctaaaacaacaacacataaaaaacctcaaataattagagcaacaggctgtgaatgcatttagcaaacatatacccttcacttacttttgggaatccagtaactttctcctctgagttcaatgaaaaatcagtagcacttacgggtgtgatcattaactttgtttacttttttagctttcaatgacattcacgtttgtgttgagatttgttttttctttcctgaacattttatcccattcgccaatccagaaatgatagaataggaaaagaacaactagggctttatgcaagtacagtaaaatctattgatgcccctctacaaaaggctgcaaattggaatggctgaaatcatctgctcgtcttttgtgttgcattttaggactatcaatgaaacttgaaatgatatattaatagaaagtttgaacaggaattatatattgaaaatgtgacagaatgggtagatccaatcatcctaggctgttgagaagggaatatgcctcacagtcttgtactttttagatgaagccttccaatttacctggcagcccacctcatggctcagtgtttagtcatatagcagaggttgttacaattacaaaagttctcttttttttccatggaaaattgatcatttggagcagtagattaatttatttcaattttaaagtatgagaggcatagaggtacattaaaaagaacaaagactttgtagtcagagacatctaagagttgtgtaaacctgagcacataagtagcattttcttatctatatgatgggatggggttggggtaagaatatatatcatataggcagttacaaatataaaccacacatcacgtatggattttttttttagatgaactcatttatttgacatattaaattagacaaagaaatatatatgtaaccagataaaaacaatcacattctcatactacttgaacacaccgcagtggtcaaaaataatggattgtaaaatggaccccaggatttaatgcaaaaaccaccccatacgagaaaagtttcaggcttctaacttcactgaatccagtactaaacgtgcttctttatattcctcagcttcttccaagtctttttcactttctaatatctgttgaagatccaaatatgcggcttccaacctgcgctggcaatctgggatcatcatccgggattcttgtaggatctctgcctgctttttgatgtcataattttcaccatcttcagctctcattttttcaatcttttcttcttgttgttttgcctctttttcatacatcactttttatttgaccaaccgcttcaccacaccggtcttgatcttgatctgtctcacgcgaggatcggccatggtccctcgagccccgcgagaaggaggggcggaaagccggggtaaccgtggagggcgacgcgcagaggcggtagctatttaggcttggtcgccggcgcgcatgcgcaggctgcgcggccacttaaggagtttttataataaatcattatagtgtcataccttccatcaaaggattgagtactcaggtgtgaacattggtaaacaatttttccaatattaacatctgtagtattttaaattatgtgtcattttaaggtactgttattctctttgtaatttaacattttttataatagaaataattttgcaattgctacattaacattttgagttgattattgcttattgttagcaattccattgcatcattttacagattccatcactgtgctgaaacatcccatctgtttgtgaaagttttggatgttttctttagtatctagatgaatctattccttatcttatcagtcagagatattttaaagtccttgtctgttagttcaagcatataggttatctcttagtctggttatgttgatggctttacttcttgataatgggtgtattttgcttagttttatttattttttgcaagtctcattttctttttagtgaatgttagatgtcatgtatagaagaaaaatagagaatgaggtaaatatgtttaatcttggaaataggtatagctttttttctgtcatactgctagtatggggtttgagtcagtggtgttagtattgagctggtttggaggggcgggggttgttgttgctgtagcaaccttcagaacactacagtcttcaaagacctccactgatgggctgctgctatcccgtgcttaatgtaatagtgtctgcggtcctaaagggatttctatcttcttgttccatcctcagttttcagcaagccttatatgcctgtctctcccctagtggtaacagatcattctgtttttattggtgcagaatcctgggccaaagaggttatcatactgctcttccaaagagggtatcttgaccctctctcagtggcttctaccttccccaacccctctgaacaggcgggtcccatgggtggtagagtttagtatctttccttcagtttagtatctttccttaaatcttacgccttttagaagaggagggtctggaaaatgggtttgacttcatgtttgtgtgtcactgaggggagcttcttcctatctcttgtcctacgccttacttttttgcaagttcccaatagaagtttgtggaaaagaattccagaatgagtgcagactccttcggtctgcatttccaaggatgctgaaatgtcataccagcccacacctgacttttaagaatgccttacaattggagctattttctttttcctgctcctacgatgactacttcttcctccagttccctgccaaaggtaaacctttcatgtatccagtctctccttggaggagattgaagtactttggctcacctcgttgccttgtggccacagctatataaatggctcaaaaaataatacgtttttatagatcaccctgctttttctcattgggtggagcaacgttcttatatagcatttttacatcctaagcagaagaggaacttgattatgatggaaagcgtaagtattttaccctcttgggatatccacattcgacatgttaatcattacagttacccttactttagatggaaacaatgaataatacttatttttattagagaaaggccgtagtagataagtgatattttaaaaattgaatttaataaaaatgtattgaggacctgttatctgtgaatcacccaatgggaaaagtcatgaaaagctgaagaaaacacttcattgtatttcagagcttttaatttaaaggtgaagaaaaaaggtgactcaaaagcattttgtatattcagaatccatttgtgaaacctaatttgtgatgttgaaactgagatttggcacactgtccaaaattgcattcaaaagtgtagaacctgctgtcctggcctttttgttttgtttgtttgtttggtggggtggggtggggtgggcgtaggaaggaaaaagaaaagataaggagtgtggtattgactgatagtttattctcaagtgcagtcaccagggagttcgaactgacttctacttttgaagttgaaacatggaagcagggctccaaaattttgtatctcattgaagtaacttagaatactcacacttttatgaatgattgagatacttcctaaaaatttaaaccatgatatctccaacaacggaaaagagggaatatgaaacccccataggctacgggtgtcaatcaaaatagtcttcggagaaatgaaatgttttcttcatttactataaaattgaagaaaaaatttcatttttcttttttttcttttttgagacgaagcctcgctctgtcacccaggctggagtgcagtgacgcgatcttggctcactgcaacttctgcctcctgggttcatgcgattctcctgcctgagacttgcgagtagctgggattacaggtgcatgccaccatgcccggctaatttttgtgttttttagtagagacggggtttcgccatgttggccaagctggtctcgaactcctgacctcaagtgattcacccacctcagctcctagagtgctgggattacagatgtgagtcaccgtgcccagccaaaaggttcatttctcaagttttacaaaacttttcagtcaaaattcacatatctactgtcacataattcatactcaattacattccttcaaaaatgctctcacacaaagtttgaacacatcgaggcaggtggtttgaaacatccatcccaaagttgagctgggagtcaaggtgacaagaatggcccatgagcagtgagatgtctaccaatgccgggctccggggcaaacaactaacattaagtgcaaaggattaaacttgttaattaggagaaaataaaagcaggcatttgcttattttattattgagtttatattaatagtaatcacttccattcatattagatgcaaaggaacttttaatattctatgcactgacttaaacttatttcttaatccctttcatctccttataatgatgcatatgagattattggaggtttggaggtatgcactaatgcaaagtgatgagctgtaaccaaaaagtaaccaagaaaataaaatcacaatttcatgcatgtatttatatttgtcttctatggcaaaccatggggatattgaaatatgaaatttcaaataccctctttattatgttagatgcattatttttaacaatagaagccttaaataaaatattaagatacatttgtattttgacacttaactgcccttggcattgtgcatttaaacttttggtgtctagcaaagttaaagggagactgtctttaaatacatatatattgatagtgccattttgttagacatgtcatctttcgaatgtaatgatattgttcacacattgattttattgatgatgttaaatcaaaatggtttctgcaattagtaacttctataaaacaaacatattaaaaggaaatcatacttcctattgtagtataccaatttatttttccatttaggaatagctatgctccctctcatgttttgttttgtataccttactaaattaaatattcattttattctttaccagtttccatcacagacacaatcagtattatttaaatttcagcaagaaactaaacaagacttacaagtttttcagtgctaatgatttttttttctcattaagtctgagtctaatgaaactaaacagaaagttctggttggattccttggtcacccctatctgtgtttgtgaattcctataattggcatgaattgaaagttcttgttatcactgatagtaacccagagacaattccaatttgggtttaaatggccctatgcagacaagggtaactgaacaaaccaaaacagcttcatgtgtttatggcagataaataccaattaagtactagaaatgacatcagggttttttttttttcctgtatagtttcaagttaagagactttttctcccttgagtttgcagatatagagcatcatgaccttacaagaggaaggagagcaacttcccatctgaatgagagatggaaaaattatatgaaatagaactaattctactgttaagcagtaaactacttattacttgagtattaattaggacacttggctacaaataacttataccaaatttgaactatctttatcaaatgtggaatttattccaaaggatacgtttattctaaggattaaaatgtttctcaaggcaggttagggcaaattgcagtacacctcagaaaatgcaatcaaaaccttccaggactctctgtcacatctccttctctctaaactatcttttttattgcagattggcttccgctgttcctcatgtagcagaccatgattgccaacattcccttatatttatatctcgcagttgaaggattcagggagagcctgattctaagacccaagtctaaattctttaaatacatacgtatgtatgtgtatatgtatatgtatgtatatatatatatacacacacatgcattcatgtttagatagacatacacagacatatatgtgaattacattgaattacatatgaattacatttctatttaatgtattcaatgtaggttacaatgcaacgttatagaccttttcatccattacaggtaggaatgtggtttaatatggaatttttgagaagtaatttgaaaatatgtaccaaaacttacggagatgatttttcacctaaatccattataatttttgagactcttttctaaggtaataatcccacatttgggtggaggctttatctatattgatagtaattgcaagactattttaatagcaaaaattatgagaccatttttcaaggttccaaaaaaaagcagaacggtaatttttatgggaacaaagaagacaatgcttctagatatttaaattgtgtttgaacaacattggaaaacctgttattttaaatgaagaaagtaaggtgtctaactacttgtgcaatgcaattacaattatgcaaggaaaatgcaaaggaaatatatcaaactttaaatcctaaagcttttaatactcactttttctctagtttctaaaatttggctaataaacataaatttaatttataaattaattgaccttggcattgtataaacatcagggtaaataatgcatctgtctctctgtctctctctcgctctctttattcaactttatcctaaagcatcatactaattacaatctattggttttagtttgactcctcagctaggttactcaaacaatgaaagactacttttaatctctgaagatgtttctttatcttgaattttgatttcctaatcaatgaatacttgtctaaatttagtattaagttcacacacatcttttctcttttttggattactttgccaatcaataatgttcctcttttagcggttactggttatttctactgatctctgctgagagtttattctcagacactttcataccacgctttgaaaatactggtttccaagctgtgaattcactgtatctatgcagaaaggagtgatttgtttcttgtatggcatgatgttttttatatcctgtgaaaaccatcaattccacatttgagtggttccttcatgacatgggctgctctaactaaagaaaaatgtgcattaaaaatatgtgtccgattaaggcattaaaatatcttaagcagtcaggtagcaaacaaatctttctgagttccaattactgtattacattatgtcaatacttactgtcaaagtacattacagaaaaaggctgggctcttttcagaaagggcattgcaatataatgggtgacaagaaactgcatctgtgtatatggaagcacaagaaactaacaacaacaaaaaaatagtgcccaatcctaggtggctgaagagtaatatctaagagaatatgaagaaaacccattatttattccctaggccagataaggagccctggctttctctggcatagctgcagtgtatataattatacctctttcagtgccaattactgtgtgtatatccataaaaagaatggtacaatggtgacagagatgaagagcagatctcttaaataaacatgtaaaaaaaagcaaagtaaagaaaaataataaaaacaggtctattgctgttaatgccactgttccagaaaaaagtaaaacagagatcattaatatccataagagccagaataatgtctatatttttcatccaacatttttcaaaccatggagcccttttagaatctgctgatgactgtggactctcatatatacacactcataaaattttgcccacaattttaggggtttattccatagtcgtattgaaagcccatagatttcaggataggaataacaatgttgattactcatttggggccagacactttctatgccatataaagataatggcttatttagtcctcacaacgacactatgagatagttattattttagtacctattttacagatgagaaaactaaaggaaagaaaagttatgtaaataaattgagaaaactcagccagtaagcggcaaaactggactttaaatccaggccgtatgattccagagcatactccaacaaggactgtaaactgcatcctgcagaaacaaataaacaaacaaaaacctagaataaagaagcagatgatagagttttagaactggcggaacacatagaaattatcttttccaaattctatgttttaaagttgaggaaattgtattccacataattaaatgattaacagaagcccatagagcaagttagtgttagagccagggttcaagtgggaacattcatccaaagctcatgacaaagctacaccgatattattatcattattctacaggtgaggaaacagaggcacactgttaataagtagcagaactacctttcgaacccagataggcaggttcaaagctaaaactaccatattactgtaattcaggaaagccattccctttataattcgtttagtaggcgctcggaatgatcaaatctttaaattagaaaattcgaatgtcttcaatttacaaactttggaaattctggagattctactttacaatcattttaatgttctctaatcaaaaactaatgttttcagtgtgctacaattcatgaattttatattcatatcagaatataaaattatacacatgcatatatgaactttatatgttatatatgtatgaagcttatgtatgtatataacaatatgtatatgaacacaacctgaatacatatgtatatatagataaccattcaaacattttaaattggctatagaggaaagcaatttgccatttgacttaaagtcttttgtaatgactagaatttaaaataaagtttacaatttatgaagatgaaataaaactatacttaaaatgctgtttttcgaaacagaaaattcccttaaaacctcaaaatctattgtttgttttatataataaaaatccaaattttttctacaatgtctaaatcttttgtaattctgttatattttcctctacaagttcaactcagtgatacctaagtgcaaacaataaggctagtatgagagctttttttttttgagacggagtctcgctctgtcgcccaggctggagtgcagtggcgcgatctcggctcactgcaagctccgcctcccgggttcagccattctcctgtctcagcctcccaagtagctgagactacaggtgcccgccaccacgcccggctagtttttttttttttttgtatttttagtagagacggggtttcaccgtgtttgccaggagggtctcgatctcctgaccttgtgatccgcccacctcggcctcccaaagtgccgggattacaggcgtgagccaccgcgcctggccaaaagttacttaatttgcatgccaacctacactcacatctattaaatgattagtcaatcaagatatagacaaaactcatctattggcaatgtacactgagggacgtgttctcggtgtagtcctgtcaccgatcttagtacagaaataaataccttttttaatccagtggcataataaacctgagaaaagagaagtctttcattaagaatcttggaagaagcagtcgttaaccacttgtcatcagtattagcaactcaagctgaataaaaattgattgtgtgactctggaccttctttgctctgccacttggataatctattagcattggcacctgattaactctcaaaactgtctcctcttttgattagctcccaggatttcttttgtattctcagtaataattttccaaacccttttctaaaagactgactctaatgttcttttactgactgcaaagtttcccgtcagtgctgaaaacatgtttggccttcattcctatttataatttttggcttgatctttcataaacactggcttaagacttccgtatttggtgaacagggagtgaatgattactccgaaactttatttctgttttaagtgctttcagtatttggcacaaggtggaaatgagcaggctcagtactgaccattgctattacaataactcactgcatttccttaaaacttattttccacttaaattgttttctacattgatttctgtctgtgctaatacttggccatgtatgagaacaacctgcttgttttaatgtttaaattttgaatggtatggtaaggagaaagaccaagatttaaaagataatatattctgaaagggcaatttttggaaagcttttaatacttcatttaaaacccattcttcagcttattttaaatttaatgatggaatacaaccctctcttttttaaatgaagaggttatatacattccatcattattgaattttattctatgggccacatttactatttacctgctatattagtcagctttattataggctaatgctctgtaaaaaacaaatccaaatctcaatgacttataagaacaaacatttatttcttattcacatgtcaggttcaattttgtattgagtacaggtcagctctatgcatctctccttttaggaacagaggctacctgaggcgtgtacttcccctgacaaagggaggaaggaccaagaaaagtgaaaacactttatgattcttaagcccctagctcagaattgacacactctcatatctgactgtgttccactggtcaaggcaagtcacatgaccaaggccacatcagtgagtgggatgtgtaatccacccatggtgaaccatggcaagtggaaaggaggaagaaaaagaaaccgatgagcaaataatgtaaactaccaacttgttcaagaagttctaatgcaattaaatatatagtcaggaataataatactgatctctattggcacttactttgtactaagtctttgcttaagactactttcgatgctttacaggatacctcatcaaagtgaagctaagagtttttttaccacgattatttcctcttttcagactggaaatcttgggtttggtgtggcttatgagtcttttctttctttgttttgtttgtttgtttgtttgtttttgagatggagtcttgaactcctgtcggggctggagtgcagtggcatgatcttggctcactgcaacctcagcctcccaggttcaagtgattctcctgcgtcagcctcccaagtagctgggatttcaggtgtccgccaccacgcccggctaatctttttatttttagtagagacggggcttcactgcgttgatcaggctggtctcgaactcctgacctcatgctgcgtccacctgggcctcccaaagtgctgggattacagacatgagagactgcacccggcctatgagtcttttctaacactgcataactagtgcatgatcaagccaagaaatgtgggcccaaattccactacagagagcagacaataacgatgctcctatgggccattctggattacatatcccatgcaacaattgaggagccctacagggcatgcttagcaattgttccattgtttttttttttttttgtcctttttaatacatagacttctgtccctcgtttattgagggttgcccctgggagaactaaatctctatcacttctggactgccctgcaaatgggcttaccaagccctcctaaactgaagaaagccttaacacaaagaaacagagagatgtggatgcttgtggtgaggaatcttcagcatccacagaatccgttcactatagttataggtgaactcagggatggctcggtgaaataagggatgaggcattatcctcatctactatgccattttattaacctttactccatagtgtaagttgagtaaatacatcttgtgatttaaatatccccttataatccaggccctgtgtttgaccatttgtctgtttctaaagcatctcattaacagtatgtttggaaatggctgttgtgtgtcgtgcacatttggctgtttgctttccttttggtttgcaaagaagtattttgcaacccataaaaatagataaatatacaccacagaacaatgtatttttttaaattttcaggggagaatttgaatcttttaaaagtaatattgagtaggcagctgtatggaaacaggcatctagttagcagttctgctacaatatccaagtagttaatttcacctctaaattacactggagaccttgaccttattttgatttattctgtcataattagtctatggttattactttaacaaaaataagtcatctttctcatgaacactaccaaagcacatttcaagtctgcatactaattaatagtaacttatttttactcctaacaagtctacacccacatactcatgtttaaacaagatgagatatttgaaatcactttataaattataatgcaccacagaaatatccattatttccattattactaaaaacttacttcattcttttgagcatgaggaggtataatttatgtgaatatcatttcatattttgtttttatctttcaaatcgagaagacttgaattttttgcatatttacaaatactataaaaatcctactaattattaacatggctgccacgtagcaatcgtgtctattttatgaaataatgtcatttatacagaagacccacgggaagttgtaatatatttggaagtaaagatttataggttttgtctatttttttctctttctcagcattaatatgtcatacatgtgtcacatttagtcttcacaattcagtatctttattactattaccatgaaacaaatagaggcaatgagacacagagaggttaagtaacttactcaaggccacagagataatgagatgtgaaactggagttggaactcaggttatttgactctgaaatgagtgtatgatgtaaccccggcctgcattgtatctaacacatgcaattttaagaggataagaattaactgtttgcacaatctaccagatggcactgtttttccaactgagaccacttaacaccttttcatatactcttggagttctgatcattcttccactctaatacatttcttcaatctcattgtcattatgtcctacttcatgcaacttcgattaattcttcacaagtatatttctacaatacttgtgctatgtttccaatgtatagagcattgcaatttttatgaatatacaactatgcgattatgttaggttctcaccataactccaatttgctaatggagcataaattctgtgattaagtggcagggaatgggagagaacttttattcaatatgagctgacatggctttccaatctggtttctgagtccaacaactccctacaataaaaaagcaattgacctacctgagaaagaagtggcgtttgcagtggaggcaaaggaacagacaggtcatccatagcattttacattgtgtcagaagcatgacagtcatgaaagatgaagtaaagggcaattatatcatattacagagtgaaattcacctagagaaataaaggcagattgtttgcaagaaatattctttctcttaattttttattcattgtagtgatgaaaataagtagcaatatttcagttccaaggctaaattttggggagaagtcattgaaagttagttttatgtctaatgggtgctcaatggataatttaggaaatgaattggtgacagaaggtctataattaacagagtagtttgagcagtatgatgaagtgcagggggaaagcattggtctaggacttagtagatctgagatttaattacagtattgattagtcacttgatttattcaacaaacccttactaagtacctatttctgcttcagtataccatgtttggtgccaggagttgcaaagacataataattctcccatctaagtgtggtcacatttaggaggtaatgagtgggatttgggctgcattattggaagacaacaaactaattttctgtttgtgtgtgtgtatgtgtgtatgtgtgagtgtaagcaagatgagatatttgaaatcactttataaattataatgcacacacaattaaagtatctgtgtgtccatacacatacagttaaagtatttatgtgtgtaacacatatgcataattagaaaaaagcctacacatatgtatatatcagaaggattgattgataagttatgccagggagataagtgtgattgtgaaaaccctcacattcgacctagatcttaatagtgagtgtcctcattctagggagtgcatgaacaaaggactaaagcaagaaagcatatgatttatttatggagaaatttggcttgtgtgactaaggcagacctggtagatgtatataaggtttgggatatgggtgactgccaacaggcctaatcgataatatgtttagaggagtacactggagtcaaattgtgaaggcccttatatgccattctgaataatctagcctgtaacctcatcagagaagctctggatttttcaagttagttctcttaatatatgattgtaacagaactgtagtttctccatcagggaatttagctttatcattgattatccatgatccaactcccctaactccacatataattaataattagtacttaccaatactaccccgtaaacacatcttgaatgcacctactccttttccagccccactgccattcattaatgcaagtcatgcttacttctcacgtggattataggtataatcagctcatgtgtcttcttatttacagtttatccccaaatattctctacactgtgaaatttatttctaaaagccaagcctgacattgctatttccctacttaaaattctgctttgatttcgaactgccctctggctatattttcaggctcttcataaataggttgatgataatttcactttttctagggtcatctctgccatttttatcctcctccaccatctctaggtctgggaaaggaccatactctttctctcacatcctgacactttcacctgctcttttgattttctggagttctcttttctaccacttgtctctctgctcttaattaactttcaaaactcagctgagatgtcacttcatcaaggaagctctggatttttcaaggtagtttccttaatatatgattgtcacatgactgtagtttcttcatcaggcaacttatctgtatatttgtatcaacatacccttttgttgtgtctgcttctctcactaagctagaaggaaaaaagctagagacactgcctttctcacagttgtttttctaccacctagtaggtgtcagtacacatttgtcacttaatagccttaaatatgaaatgtaatttattagtttcctattgctgctataaaattaccacaaatttagtggcttaaaattatatacatttattctcagacagttctgcaggtcagaaatccaaactggaacttactggactcaaatcatgatgccagaagggctgtgtacttttggatgctccaggggagaatctgtctccttgccttttccattttctagagaattcccacgttatttggctcacggccttcttcgtacatcttcaaaaccagccacctcggaccaagtccttctcatagtgctttctaattctccccttatgccaacatttccccccttttaaggacccctgtgattaaatcctgcccactcagataatctgggataatctccctatcaaaagttagctaattagaaagtctaattctatctgcaataattccactttgccatgtaacataatttattcacagatgtcagggattagcacgtggccatttttgaggaggcattattctgcctaccagagtttaatagaattaatatctgcagaggagaaaaatgagaagaggactaaaaagtaaatctggtcttcgttaacttaaaacacctttattgagcactactatgtaacacattctatgctaagtgctgggattacagctctgatccagacagtcactctcttggaaatgagaaaggatgtaggtgatgttattaagaacaacttttgtaggatgatgagcagtgaagactgcattacattgactgtaaagcgaatgggaaataaagaaatatctttgacatgaacagcttttctgttcttcgtgcagaagtttaattattttagacctcctcattgtaagctgaccactaacgtcacctcaggcggtagaaaaatcccataatcaaagactattactcagatttaatagaaagcatttttcataccattttccattgcagcctcctccactctgcactgccattttgtaatattaatggcacagtaaatccactttctaaatatgtcctaaatttgtttccttcctttataatgctccaaaatatcacataaccttatctaatgtttatcattaatcttccatatttttcatttttttctcatgtttgatggaagcagagaatagactgaacttaattgctctcccatattacttcatagttctttattttcttttctttcttttttttttttttttttttttttttttttttttgagacggagtctcctctgtcccccaggccggagcgcagtggcacgatcttggctcactgcaagttgcgcctcccaggttcacgccccagtagctgggactacaggcgcccgccaccacgcccggctaattttttgtatttttagtagagacggggtttcaccgtgttagccaggatggtcttgatctcctgacctcatgatccgcccacctcggcctcccaaagtgctgggattacaggcgtgagccactgcgcccggcttcatagttctttctttaagtgaaattaactcatcccattgcatttcttcactacgtgagtttctaaactggtatcaactttaatattcccttccccttttaaagatacattttctgtgtcacattagggatgaagatcttcaattaacatattaactagcccccaaggaaatatcatttaaaaaatgtttttctaggccgaatgtggtggctcatgcctgtagtcctagcactttgggaggctgagacagaaggattgatggagtccaggagtttgagaccagcctgggcaacatggggagaccccatctttacaaaagaaaaaaaattaaaaattagacagatgtggtgatgtgtgcctagagtcctagctactgaggaggcagaggtgagagaattgcttgagcccaggggtctgaagttacagtgagctgtgatggttccaatgcactccagcctggggaacagagcgagaccttgtgtcaaaaaaattttattttcttgtacagattatggttaattgctttgtgtaatgggaataattgttagtgtttatagaactgtttttctgtttttttttttcccccagtttttaaatgctttcacttacattgtttatctgatggcagagaagaggtcttaaggaggctctccagcatctcgctcctaactctcattgcaatttcattccatgccactccctttctcacattttagagtgcaacaaaacagaattgcataatgaatgagcgtgtactttcagtttcttatcactctgtccttgtccttactgtctgctcagtgagattcatctttatcctcctcctacctttattccttctttactttctctcatccttctgaactcaacctacccattaccttctccaaaatatcttttctaacacccatgtggctacatattcctttctccatgctcctataatacgctttaaatttatatatatttttgtttatgcaaaatgtttcatatttatctatgatgtgtctattatctactaggctaagagctctcccagactgaatcttgtttatattttcagtaactagtgcaatgtccaggtcatagtaagcattctgtaaatatttattttataaattattacacgagtaaatgatctcattatatcctgtcaatagctccatgagttaaagagcaattaatattctcatttcacagttaaagacgctaaggcttggcaattttaaggccacaattctaataagtcctgcaaagccactggaagccagttccacagatttaatgttccctcagtttgcccagtatcattcttctgcagtaacttgctcttgtgaatcaagaatattgcaatttaatatatcccacatttatattcctgagggactaaggaatataaaagttaataacagggtaaaagttcattgtactaatcttaaaaaatatgaaaggccacatatactgaataaaaataactttattagaaggggttaaagattactgagaggaaatacaatttttatgtcatgttagaaagctaattttatatgggatttccccgtagagagaataaaataaaacgttggtcagtttttgcaatttatgaagtagtggttcttcacttcttgacatctccagggaacagttttcaagtaaattttcctaagagagattttcttctttgcctctcttattaatatgcacatgcatgtttttattagtaaaataaaatcagttataaacaaaccctaaaggaaatgaaatagaatatgtgctgcttgaaatgactaaacaggagcatataatcattttgtaataaaacagctatcactttattcttttctcatttgctttgttgctgattgcacattaatatgttttactatagactatgtgactacagaaatagacatcatgttaacgtatcaaaatagtttctagaacaatttatatatgtgtgatgtgtatgtatggtggctttaggttaactaagggtatacagcttaaaatagtcaacttttaagcaatatgacaaatagcaataaaaatatatcaattcaagtaaatacgtataaaattttagcatactaaaataaaaattaaaaggcatatgaccacttgggaaaatatgtccattcactgactaaaagtgagtagcttaattttgatcgttaacttggattttatggttataggagttttctgcaaggaggtcagtgaactctatgaaactatatgcaaatatgtatgtgtagacatttttctatagagaaggttcattattttcatcagataatcaaatggagcccatgacttgaaatgtttaagaattaccaatatataattatctcattccaattaattttaaaatattaaatgctcaatagataaatgagccaggatgtaaacaagtattttgacaaaaataggaacatacagaataaataaatgcatgaaacatcttctacttcattagtaatcaaattaattatgattaaagcaaacatcaaggatctccttacatctaaacaaagcagcaataccgtaaaagactaaagcaacgaaactcctatgaatgacatacctgcggctgagatgataattcccaacctcattctttctgctaccagtagaagtgggtgtgatcacttggaaagtattataaagatatttagcaaaagtcataaaggttttcataatgttgaactgataattttttcgaagacaattataaaaacaaaaaagaagtgagtgcatgagcatgtttattgtgatttagtctctaatagcaaacaaaaggaaagagcagcttatatgagatttatgataaaataagtgaaaaagaaagaatattattttggttataagaaatatgtatttatggggaatttaaaagtgtggacacaaaaattttgattgatttttggatgttaaaatgtttccataatgatatataagacgaaaattgaaataccaaatatcaattagtaaatgtaaaagcattattatttgaagtattaacaaccatatcatccagcaccattaaagaaggctcattattcagttctagatcagttcatacagacaaataagttatgcattgccaaattccaggacgctattcacataggttacaacatacatggaacctccttgagttgttcaaaatagaagctctgatttcatggttgttttgcatttgcgttaatatgttcaccttttgtgactctgattatcttatggtattctgtattgttaattatgcaattataatgtaaatgatagatatctggtcaatgtgaaaagccatggactttgattcagaaaatctgtatcaagttcatttctgtcacttaatagctttattccttctcagcttgtgtttatgtataaagtagtaaattacatacagattgagaagacataattaaaacaaacttatgaatagtaaggcactaagaattgttatgtattttataataataatacaattaattgtattaataattattatgttgaagaaaatatatgctactataccaaaataagacaataattcattgaagacatttttcttgtattaaagacgtagaggtgagagaggacaactagcaaagatgtttatatgttgaagctcacatttagtgttatttacacagtaaataagtaacactttgcacataatgtcaaggttttcgtgctgccttcgatgcttacctaaaaattactccttgtccatataattgaaaagaataaaaattttattctactacgtatttttcacttaaaagcctctagattaaatcacttcaaaagacctcatattgagcttttggcagagggttttgggtatgtttcaaagacatctgaatgtatgctttcaactgactcatttactctctgctttctgacagaaagtacgcatgcacatgtaggaaatataagtggaattgcaaataaggtcatttacttttaggaatatatgtatatactactgataaatgatgcgttgaccaatcttcctccataaagtctatgaagatggtttaattttgaccatttgaaatgttccatttctttttaaaattattttggaagggctagtattaattttatgaaagtaaagatttgaaggaggctagaataggtttgaaaactattactatctgtttttatttattcacccttgtcaacaaaggaaatacttccatattgtagctaagatttatcatataccatatgaataatgttgatattgaacatacatatagaagcttgtgtgaataacataattaaataagaaaaatgtattttgtaatgctaaataaaatttctcacctaagatgacagtttgaaatttatttattcactgttatttctcatattgactaaaggaatctacttatagattagtattgtgatttaaagataaacagatatttttggtgcatgcatatatttgttatgcgaaagtgattccttatgtttttaagagaagcaacggagatttactactgaaaaatatatgagagcaaatatgattactttgtaaagggcattttaataacggttcttttaatccaagtagataaaatataaaatttatcaattttaaatatctctcagatgcattcatttactgaacattaactaatatgattatatttacaataattaaaaaaatagtcttttgcttggagaaaaacattttaatatatcaagattgatgatttttctgtccatttgacttaatactaatttccagtttaggggcaaaaagatcatttgtagaagcatgaattcagtgaagctgttttttaataatttttctccctaatcccttagtataaatctttggggacttttttctttgagtatttatatgtaaggcatgaagagtatcatttgcatttttatttgaaatgttctgacttttagatgaaaagaggtcctagaaattttagagttgtagaatctccccttccttaaagcatgcacgtatttgtcagatgtattttctgagctcttaatttgttcagacagtgtgctaagttctgggaagcaaagataactaaaccatgctcctgctcatcaggaaacctcttccatagtgagatcaggcccatgttagagtatgtagatgctgcaaaggaaggaataatcatttctccatggttgggtggatggcatggggaaaggctccgaaatagtttttcggagtaaatgacagctgagagtttcttttaattatactggagtatctattcataactggcgaataaatactgttattcagaggagactatttttttataatcatacagtatttgaacgactatgggtttggtcatattaattgtttttcagatattacaaatctgaggcgggatcttgctctgtcgcccacgctggagtgcagtgccatgatctcggctcactgcaacctccacctcctggattcaaatgattctcctgcctcagcctcccaagtagctgggattacaggtgcatgccaccatgcctggctaatttttgtattttcagtagagatggggtttcgccatgttggcctggctggtctcaaactactggcctcaagtgatccgtcctcactggcctcccaaactgttgggatcacaggcgtgagccaccgcgcctggccatttttcagaagtaattttaatttggatgccccaaaccagcatcactcatgtttaattccatttatcaatgaatgtaatactaaatgtaaaaaaacactaacacatcataatggaaagttactttggttgtaaaatatgaattatatttaaagttgcttcctaacttttatttttttattttgcattttagatgaaagagaagatgttcaaaagaaaacattcacaaaatgggtaaatgcacaattttctaaggtaagaatggtttgttactttacttttaagatctaagttgtgaaattttcaaaatggactatgtacctgtgtatcttaaaaatccgttttatttctctcatagtgtcattttattttagctgtgcaaatctggaaatattatgttcactcttatttaaggagtaagcagcagaagatatggcaaagatacactatttaattatataaaatgtatatctttgattcttcttgacaatgtgagtttctttaatgacatgagtcctcagagtttatagctgcaatcttccatcaagtagctagaatatgtcacccagcagaagaagatatgagggaattttgttgtgaaaattatcatttttttgtccctcttggtctttaccaagttcaagaaaagcaatataattgctttgggtgtattcagccactatagtttagagcatatttcaaatgattaaagacaataagttcatcttgtttttgtgcaggcttcaatccatactcttaatatttacttaatttgcaaatacaactcaatttttaatcaatagcgtgactctagatgattataggtggacacagagcaagatattcttaccttgaaaactagtattaggaatgcaatatatggaggtttattgggatgtcaaagtttaaaagacttgcattttaattattattctcgatttgggtaaatcaatcaaatgtttggtgagtcggttttcttatgtttccatcatgaatgtttgtatatgtatatattgattgcttaattgagacatcaaatctagataatggaaaaataaagctaataaaatatggcccttaaacccaaggctttaagagtggcatagttttgatagtggatattttgtttcttattgtaatgatttaaagagtcactaaaagtgaaaatttctactaaaatgcctgaaactcttaatagctatgaattactccctctatgggtctgattttgtaaaattcatgataatggagccaaaacaatccactaggagatccaatctcaaaagttctcccttttctatgacaaacatttttagaatatcgtctattctttgtggtatttggtagtagaatgttgccatgtactctttaatttaacttactgaattttaactaataaaagttcattttatttacttgctgaataattaacaaatttctattacagacgtaaacagaaacatgtattttaaaaacgttttttaaatcctcaactttttttagctaagtgaaataaaatataacaacacaaatatagaagaataaataaaaagtaaacctaggatatttaggaaagttattcataattctccgaatatttataagatggttatatatagtttaattgctgtatatactggcatcattgacatttttaagttttggaattctgaagcagacaagagacatattttcaaacaaacatacagacaaatcagaattgtgaagaaattttctgaaatagtaaatgtaacaatactctgaatctttgaattgaactagagtaatttttaaaaggtgtgtaaacatgacaagtactgtgtatcctcattcccgcaagttgaaatagatcttcgctctgtgcattaaccttttccattatcatttatcacaactcacctgttaatatagaaatcaaagcttgatatccaatccatcctctatttatatattgttagcactgcctcagagcaattcggtatatttttttctgtccttatgaatgcccatatcttaaaactgtaaaatattcacatatatgagcacatttattgttttcttccaaaatatttgcatcctctaactcaactcacacttttcatttatattacaaatgttctccctaagtctgttataactgatcaggagagtcaccattctttcaagtacagaaattctattatcaagcatatcctaggtgtcaggaatagaaataaaagtttacaaagacagaggagaaaacttatttaaaggtaaaatgtatatatacctgtgcactaacttctaattttgagaacttgcaaagaatctttttcctcttttcttattcttttctgtcaaaacttagctaagtgactgcattcttttagacacttttgaagaagatgggaatttagaggaagctagttgattcagtttaagccacttggtgaaaccaaaagataaacataattgtgatatatatatcatttggcaatttattgcatcgctgcatgcctttcagcagaattctagccctgtaggatacacagattagttgaagtggaatctcctgaactcatggaacctacacagttatttgggagtttttggttaattgataaatggagttagaactgagtgggctcagtgtgggtggtctgagaaggcagtaatctgagctagagggaatctggtaacctttatgaagaaagctctaaaatgtgagcccatcaaaggcaggaatgtatatcttctatataatctcattgtttattactagtacactatataaatataataaatatactaggtcagtagtacaaatcattaaatctatgctaactgtagaaacagaagaaaaactgggtggaaaaattgtgttgaagaagactttaaaaagagaaaaaagagaatgaaaaattctgtctgtgtggtaaattagacacaggcacacacacattcatacaactataaaaatgcctcactaataaatctaactcatattcatttttatagtcgtattaatgtctatctgtgtctactttaccacacagacagatgataatttttcattgccttttatacacacatttatataatatttgtaaattatagagagacaacaaaatatttccttgttattttgtaaagctacggaagggatatttaaaggaaataaatgtgattaaatgtatccttgttgttgtggcgtcatttgaagccaaatgtgtctttgcagtaaatctaactgattttccactttcctggtaccattttaaaaataagccctatctctttttaaaataagtcttctattaactttgattccaaaaaattctactagaatgtgatttatcacatctattatatagagataactgaacaatatttatctccacataaacacaaaaccatttctagataagattaattcagagtaaatattctttccatgtaatttattgatatgttataatcctttaaaaagcctcgtgtatactctatgacaaatatgattcgcattataaaaatcttgctcatccatgccggcttaataaagggaagtacagttttgaaaacatgaccaaaaataattttgtcataaaatgtgcttgatgtttgtgtttgagaaaaaattttatgggaaaaaatatttactgccagctcaattgagagagataaactatctcccaatgagtgatatgatggttttgatcctatactgaatttagtaatcatctttatttccatactcactcttctgtctgatttttttccaacatagtatgcatgtttgacttaaatgaagtagaaatgcataattagttttgtctaatgtcttcacaaaagcccatgatatgatagtgttcctggaccaaactgaggattgggctgcttattcttgtggcccaataacgagatgcagatgaacgggaaaaggagagagtttttatttctgtaagtggttacagggagaagacctggaaattatccccagaccaactcaaaactataaagttttccagagcttatataccttctacgctgtatgtctacatgtaagtgtgtatccatctaaagacataaatgattaacttcttctgatctgtaactaagatctgattcctgaagacattcctctggagcctcagtaaatttactttatctaaatgggtccaggtgctgggatgattacccttatcttatctccggctaaatcatggagtttgggggagttccttcagatgcccagtaaacttgtttgtggagtcctggggagtttcttcagacccccaataaagcttttttaattctaaaagggtcctgttaagaattccttcattatcttgtcatgcttcaaggcccaggaaaggcctgggcaaaactcttggtgggcttttgttaccgtccagcctttgtttaagggcgctggctctatcagcttttaatatgtaactttaccactcagtcagtgctgaaacagttgttgtggaggcctgcattagtgagacctggcctgccacaatagttcatttacctcttcattgccgcaacatatatgtccacattaaaaatccaggactcaccctctttgggcaatatcatgtgataaaataaattgatatgacatacttcttgcaagatttctttttaatttaccttttagccagcatgataagcatgatgtagggtaaattaacactaaacttttgagtcagtaaggtagcctttctttttttaacttttattttaagttcaggggtacatgtgcaggtttgttatataggtaaacttgtgtcacgggggttggttgtacagattatttcatcacccagatattaggcctagtacccattaattatttttcctgatcctctccctcctcccaccctccaccttccgataagctccagtgtgtgttgttcccctctatgtgtccgtgtgttctcatcatttagctcccacctataagtgagaacatgcagtacttggttttctgttcctgcatcattttgctaaggataatggcctccaactccatccatgtccctgcaaaggacatgatctcattctttcttatggctacatagtattccatggtgtatatgtaccacattttcttggtccagtctatcattgacgggcatttgagttgattccacgtctttgctattgtaaatagtgctgcaatgaacatatgtatgcgtgtcttataatagaatgatttatatttctctgggtacatgcccagtaatgggattgctaggttgaatggtagttctgtttttagctctttgaggaatcactacactgacttccacaatggtttaactcatttactctcccaccaacagtgtataagtgttccattttctccgcagccccaccagcacgttattttttgataaagcaggcttcttcacactactctctaccttaggagaaaacgttatatccatactttaatttatttgaaaagaaaggtgaatataaaattgaaattctctgagtcttatttttcttatatgttcttgcctacttgtaacaaaacatataataaaagggcattataaatagtaaatcatataaacacaaaatattcccatttttgtcattatgtaatgtattttctgaattgaattgaaaaatgcatatatttatgaatttttttctactgaatctctccttcttatttacttctattcttttccatgatgttacctggtcttcttgagaacatgatattttaattgtaatcattgtgttcctaactccataatttcatgatgctattgaaatgcacatgaattttgattctataacctagtttgtaataagccatatttccttgtttctctacattggttgaatctgttcctgcagcaactagtaaccccaacaatctgactggtgagaaattcaatctccgtaacattttgcattcttctacttcttcccacttccattccaaagggccaggtagagtccagaatactgtaagtgtcctggttttcagtgcattttggtcatagctgatatgcttaatagccaagtaaacatgactacataaaggacagcttgtccacaatgccctgccttgcttgaacacggaaggttttgctgatgatgctctgtgcttggtatctggcctctacagccatttaagtaggttgtctcagcacaacatttggaaactctgtaaagggagtaggatgttggccttcacaacttcatccctttccctgtgtttgaggaagctcattaaacctctctttaatctgactgattgcaaatttccactgtccccgaatcttaactcccatatcccaatagcctgttcagttgggacaatatatcaatccttaacatgaatctagattttcagaactaaagtttttgaagggtgattttcctctggatacttgttcatttctttattgattatggttttggctaccttcttggcatcaaacagggaaaacagagcatttattcatgtgttactatcctattacactctgtatgccaattcatgtcctcaacacgtacacacaaacacacacacgcgcgtgcgcgcacacacacacacacatacatatacacacacccagtaaacatattctatatttaaaatgagcttagaagtttttaaaaaaggatgatactgggacaaagtggcaaaacattatttcagtgaaggaggtaacaatatatatgtacctttccattgtgtaagtgaattctaaatctgtatatagctaacacatttatatataactattgtgcaatgtgcctgctttaacagaagtaatcgagcagagctattgtgccatggaaggttttacatagatctaaaatggctcctgtgcccctggcttcctgtttgtttttatctgataataggaagaattaaatcattagagcagatgacgtacagtgaactatgtctctggatgctgatgagcagcctgcacaagactttggtaacaattgaattatttagtgcaattattttggagagatgaatattgatacaggaaacttacggaaatcctcgtttcagaaatagtgaggattgggaactttttgtttatgtataccatgatgttaataatcctactgaaaattatatgtatatggttagttgctccaataatcatatgatacaagtattcaagatgagtaaaatgtgaatttatgtggcttgctcacagtaaataggagagatgaagctaggacccaagaaaatggactctaaaactcatgatatttccatacctattattgttgggacaaaaattccacctacccaataatgcatttttgggacaaatcatcaaattgataagtcctatgagaagcaggcaggggggttggagacagtgaagactcaataacaggtggtattaaatgctcgcttactcacagaggatttaatctacctttgaatgtttagtaaccccaaaatgcaaccattgtttaggaagttttttagttgattctttctgaatgatttctaatacaaatgcccctcaacttgtgtggttaggtccctataaacccatcataagttgaaaatatcacaagtcaaaaatgcctttaatatacctaaccttcgaaacaacatagcttagcctaccctactttaaatgtgctggcttaacactatcctagagctgggcaaaatcatttcacacaaacctattttataataaagctagctcatgtaattgattgaatactgtactgaaagtgaaaaacagaatgcatgtatgggtactcaaaatacggtttctactaaatgagtatcaccttacactattataaggtcaaaatatcttaagtcgagaactgtttgtactttaaatgttaatattttttacatactgcgttttggtgagtgaagtaaacttagtttgcagtagagttatctaaagtgatattgtcattttcaaacattgctttttatttctactactcataaacaaattattgtgtttacatgattatttgaatattaacttaaaacagttttatacgaaattcaaaataccactttactggcatgtgaactccctaacatctacacttggtgttaagatgacttgtcgaatgatgtgtttgtgtttggaatcaagatgattatactaaatggtttaatctactgagaaccattcccttgaatgttttcctgaaacaatctttgcaaagtacctaagtaacaaaggatattactcagttagtgagacaaaaatggattgtgataggtctcactgttttcaaagaaagacaaatcacttattgttaatagtaaagaagtttcttagaaatatgttgctgtttatcaacccagtgttactgagatcttgacaattccttttagaaggtaaatgttttggtctctaggttatcatgtcctgatacaagaaaattggaattattgattacacctatattctctggagtggtctcagtgccaagcatatttagcttgcatatgtaaatatttaccaattagcatgatagttgctagcaaaaaaaccaattctttatggctgatgggcctatccattatttatctgattttattttgctttctagcaaaacaacatacatggacattagtgaagcatttttatttagaaaagaacaattgacactctggtaccatcctatcagagatatatgtttactaaaataacctttcaacatttaacaaatacttattgaatgccagctatgtgctaatcatactgtcatacagtgatgaaggcataacccaacatggttttccctctccaagagattatcatctgagaaaggaaacaattgcatcaacaaataattaaaataaaacataatctttaatgcaatagaaatgctgtgggaacatagaagacagaatgactaattgcttggagaggataatagctttttaaaatatggtgacatttagtctggtgttgtctacgcagagacaatttcaagaaagatgaaggcagaaggaattgcatgtagaaatgtgtaataatcaaagaagtatgacttgtcaggtgagtagtagcaagggagatctttaggagtgaagaagagaggttgtgagagggcatataatgccattcttgaagaattatattgttgtggggctggttgagccaacaataagataatggcttagtcatgttaatttgcaacttctgattgaagactgtgaagctctaaaacaacaggcaatgatagaagaattagactgccccaccaccactaatgcttcatgcaaaatttggtctgaagtctaccctttacatttggcaatagacatagagacctaaaatggaaaagcaagcaggctaccatttttgtagagttgtttgataccatgcacactccaaaacgatgcagcaaaacgcattggaattacctagaaaatgtgttaaaacatggattgctgaggcccatagtcagagtttctaattccataggtctagggtgggacccaggaatccggatttctaacaggtcctcaggtgatgctgatgctgacggccaaagaaccacactttgagaaccacagtgttagaatttcagtaatttaatcaggtctgtagtagagaatgttggaggaaaccccactgaggaatttattgaaccctcaaaggggaatgacctttttccagttgagaatcaatgcaagtacttgatttaaattgggatttattttgtggggactatactcaaaaactgaatgagttaaaagactcaaaatcaatcaatctgatactgattgagcattcttcgtccaaaacgtttgaaaatagaaatgtttcaaattttggattttcgtttggaatatttgcattatacttactggctgagcatctcaagtccaaaaatctgaaatccagaatgctccaatgagcatttcctttgtgtgtcatgtcagccctcaaaaggtttctgatttgggagcattttggatttgggatttttggatttgagaggctcaacctatacctattttttaaaaaatgtgtatatatatatatatggatatacatacacacatatatatgtacatatatacatatttatacacatatatgtacatatatacatatttacacacatatatgtacatatacacacatatttgtacatatatacacacatatgtacatatatacacacatatgtacatatacacacacatatgcatatatacatacacaaatatatgcatatatacatatacacacatgtatatatacacgtatatatacatatatacacacatgtgcacatatgtgcatatacatgtatatatacacatgtgcacatttgtgtatatatacacgtatatatacacatgtgtatatacacatgtacacacatatgtgtatatacacatacatacgtgtatatacacacatgtgtatacacacatatgtgtatatacacatacacacgtgtatatacacacatgtgtatacacacatatacacatatacacacatatacacatatgtgtgtatatacacatatacacacatatacacatatgtgtgtatatacacatatacacacatatacacatatgtgtgtatatacacatatacacacatatacacatatgtgtgtatatacacatatacacacatatacacatatgtgtgtatatacacatatacacacatatacacatatacgtatacacacatatgtgcatatacacatatacgtatacacatatacacgtatacacacatatgtgtatatacacatacacacatacacacatatgtgtatatacacatacacacatacacacatatgtgtatatacacatacacacatacacacatatgtgtatatacacatacacacatacacacatatgtgtatatacacatatacatatacacacatgtgtatacacatacacacatatgtgtatacacatacatacatatgtgtatacacatacatatacacacatgtgtatatacacatatacacacatatatacacgtgtatatacacatatacacatatacacacatgtgtatatacacgtgtatatacacatatacacatatacacacatgtgtatatacacatatacacacatacacatatgtgtatatatacacacatacacatatatgcacatgtgtatatatacacatatatgcacatatgtgtatatatacacatatatacatatatacgtatatatacacatatatatacatatatacgtatatatacacatatatatacatatatacgtatatatacacatatatatacatatatacgtatatatacacatatatgtatatgtgtgtatgcatatagacacatatacatatatacacacatgtgtatatatacgtgtgtatgtgtgtatatatacacacgtatatatacataagtgtatatacacatatgtatatatacgtatatatacgtgtgtatatatacatgtatatatacatatatgagtatgtgtatatatacacgtatatatacatatatgagtatgtgtatatatacacgtatacatatatgtgtatatatatacgtatacatttatgtgtatatatacgtatatatacgtatatatagttgttttaggttataagacttaaaaatacttatctgatgtatatatatatttttaacaatcctagttattttgtgtttcagggcagataggtgatgaataaagatattaatataattgtgttcaaaggttagaaaaaaacagttcgttgtggcattactattgactgtatccgcaaatttctttcactgcaatcctttcatgggctactatatatttttcttaagaataaaacatttccaattgacctacagagtctttcaatctctcttttgtgctttactttgcttcagcagaaggatttcattttagtgacactctgaaggtcttcctctgtgcttcacttaagggtgttgcatttttaaccttaccaagattcctatggattcctagaattatatttcaaattatgatcatggtagccagaacacaaagaattaagatctactctgacagtaatgtactgatataactttaactgtagaaacctttcttgtaatgcacatggagggcagacttgtatgtatcttggaacataaaaggcagagtatggtttttaaaagggctttgcttatttgtatcctaatttagctaatttcactatgccagttctatatgcagagataagtaatagtaaaaatggacaaaaagtgatcaataaacaagtgatcactttcggtcttgtccagaattgtggccaggtgatgagtgcaaactaagagaccttttcattagaaatgtgtgaagttactctttggtttagcattagctgtcttttaatgagaacaaatgagagttgcagatgaatttgctaaatgtttctttctttgatttagtttacctggcctgaagaaaaaaaaatgtcttcgatctacaaggtctacggagagtacttttcataggaactagtcctattaaaattacctgcagttattatgtcagtcagagaataaatattttgagtatcatatctgtacttgaagttcttatcctttacaaataatttatatttaaggaaacatgctttgacagaaatacacatgaagtctacattctctatctatttcatatcaggtgctctagtgttttgaatataacagttaagagatcaagtccctttaatcataaggccctgttagctagcgagctaaaccaaagagggaaacatttagcaaactatctgacgttctctatatttgtttgtcaacttgtttgttttttctctctgcaagtagaatatagaatttcagagagtgacaagtgctaagagaaaaaataaagcaggataagggtagaatagggatatttcaaagggtaggttgccattttatgtagtgggtcctggaaaagcctcacttaagaggcatacaaaaaacctgaaggaaggaaaggagggcatcttgcaggtgtcttggagaagagagttctaggcagagggaagaatatgtacactctgaggagggagtgcgtgtttgtgggataacaagggagtcaagatggctggtgcagagtgactgaggaagagcggtaggatctgcaagtggagtggtattagaaggacaaatcagatagggccttattgaccattgtaaaggtcttggcttgtacattgtgggagattaggagattttgagagttctgaacagtagccagaaataatgtaagttagaatgtaggatgtaaaggtagaagtagagagatgagttagaggataatgtagtaatgaaggctgggtgtgtgcgtgtggctaggattaggttgatgtccatggatctggggagaaatgatcgaattttggatacattttgaaagtagatgtaacaggatttgctggtggactaaaaatggagattgagagagtggagaaaaacagttttagcttgagcaaaaggaaggatgggatggttatttactgggataagaaagactattgcaagagagagtttggtggcaaagtataggtaaatttcccatggaaaatcattgaaaataattttagttttagtatgtttttatggaaggagtatttattttcaactcctaaaatttatcctcaagaacaagaataaatacatttatctctattaaaaaataaggaacaatgagagatgatacaagtgcctctagcattgtatgagtgtgtacaaccagtgaacgttaacttgtaaatccagtagcagtaacttgatctttgtctctcttctgatctgatagagtgcaaggtctatgtctacattcatttttttgcatgtagatgtccagttgtttcagcattatttgttgaaaaggctatctttgctccattctattgccattgctcgtttgtcaaagatcagtaaactgtattcatgtgggtctatttccacactattctgttctattgatgtatttgtctattattttgccaatacactgtcttgattactgtcatttcatagtaagtcttgtagtcagatagtgtcagttttccaactttgttcttctccttcaatattgtgtgggttattctgggtcttttgcctttcatataaactttagaaacggtttgtctatataaggcaaggtaacttgctgtgattttgattgggattgcgttaaatctgtagatcaacttgaggagaactgacttctttacaatattgagtctttctatccatgaacactgaatatttcaccattcatttagttcctctgataactttcatcagagttttgtagttttcttgtaaagatcttgtatattttttagatttattcctcagtattttatttttgaaaatgttagtggaaatggctttgtgttttacatttcaaattccacttgttcactgctggtgtgtaagaaacaattgaattttatatattaatcttgtgtcctgcaactttgctacaattgcttattatttccagggttatttttcgattctttcagattttctacatagatggtcatgtcatctatgaagaaatacagcttcatttctacattccaatagatatgtctattttctttgtcttattgcattagctaggacttccaatatgatgttgaaaaagagtggtaagagagacatttttgtcttgttcctgatcttcctgagaaagttttcattttctcaccactaaataggatgtcaattataggtgtttttgttcatttttttatattgtcatgaccttgttttataaaatacaattatttctctcctaactttctgtggacctcaattataattttcccataattctcttctgcttgcattgctcatgttttctgtcttcttcccatttgttcttatttgctttattttgaggaactgtttctcattattgaagtcattcctcaaattacaagtgatcttagcttttggtttatatttaagtgtgagatactaacatttgataaaattaaaatctatttcatgattaaagtacatttaatataaaacagaattgaataattttgttgacatattatatatatatatgcgtgtgtgtgtgtgtgtgtgtttgtgtgtgtgtaaagtccaaaagtttgtacattacttaaagaagaaacatctgatgcattctggataaagacaggaaaaccatatgagtactacagctacctccattaatacttaacattgtgttgaaaatattagccattgcaaccagacaagataaaccaattcgaggcaaaacaattgcaagcagtggtaatgggatcccaatttacagatagaattgtttacctcaagagatcacacaaaacaataatattaacaaacacaaatatgaacacaaacaaataccaataaaataatttagtaagttagcagactataaaatttacaggcaaaatcagtaaaattcattttataggtaatgagctagaagtttttatggatggtgcacacccatttgcaacaatagcaacaacagcaaaaacaagaaacacatttaacaagaaatttcagtacctatgtttaaaactctcctgaacaacccaaaaggaaatcaaggagaaagatgctccttgttcctgaaaagcatggcttaacattataaagtaaactattgtttttaagttaatgtgtaaattaaaggcattccaatataataagtagtatttttttctggagttggataaattgattataaactttttataaaaaaatacacaagtaaaaataaccagaaaaacactaaaaataaatatcgatgaagggatagggaaacataaaattataaattaaaacttagggaaaactatcatattaaatataaattttcaataaaaactaacaatttgttaaaatgtgttttgtaaaaatatatttctatcagctgggaaggtctggtagtaatgagtatacctagcatgcagatattcattggtaagtctcattccacactgaaagaagtcacagctcattagaagaatatatgatacttcatcctggccaaggaacatagtgggtgagcctgcagcctttgttagagccataaggcaaggaagtacttcccaaaatttgctaacatcttgagttgttcatttttcttctcctgttttctttatgcttgtagagttacacctttttaaaaggttttcttcctgtcattttattggaaaggcttcaaataatttttaaaacatatttatagatgttcatactcatatattttcctgatactgaaagagaaatttatgcatttagtaacaataaatgttggcctagattttctctgatggtctcttcaagaatctggagcgttctctatctccacaaaggatggaaatgtttcatttcaatatgccagttttcaagtaaatgtgatttagtttctctcttttaagaataaagtcatagcagaatgctttatattactgattgtagtatcataacttacttctgaaacatcgaatacaattttggaaggtcagcaatgtcctgttaatatttaagtatgcctcactatataatatgtgcatacattctggaagaagcatttaaaatgaagactgtttctaataatatattaaacgagctatgtaagtagagttttatgatagctgatattgtgattttattcagagactatttatataagacatttcagcatatctgctaaagaacaaacctatcatctaagtcagtaaaccaataatttgaattaaaaaaacggacaaaaagaaaatacgaagcaacttgaaagatcattaaatacactgcctgatagttaagattctaaacagttacattatatgaatagtttactgtatattatatattttctatttccactttgttataggtaagctaatcagatgtctcaagttataaaataatagcactaacttataaaagaagtgctacctttcttccactccccaaaatacacaagattttattcttcataaatgataacatttgttgtttgttttctgtggttgaaagggaagtacaggaatgaaataatgtattttgcaacaacttggatagaactggaggccattattctaagtaaagtaattcaggaatggaaaaccaaacaccgtatgttctcactcataagtgggagctcaactatgaggatgcaaaggcataagaatgatataatggactctagggactcagagcagggggaagggtaggagatgggtgagagataaaagcctacatattgggtacggtgtatacttctcaggtgatgggtgcaccaaaatctcggaaatcaccactaaagaacttacccaggtaaccaaaaaccacctgttcccccaaaagtattaaaataaaaaaatttaaaattttgaaaaattaggaaaaggaagtacattttcatgtgttgctctgttttagcacacctggtgcagaggtccctgaggaattttttctttttcttttttcttttttcttcttctttttttttttttttttttttttttcgagaaaaaaatatcacacatttgaggcaggagaatagggtctggaggaagggaacctaaggccatttcacgctgacttccctaggactaaactgaaggcaaaaccctaactttccacccctaagtaacataaggaccagaggctactccctttgcaaacctcccaccttttctgtgtagcagatgggaaattggctgttcccaaccaatcagactgattgcgggcccagtctttgcacagaagtgcaactttgtaacttcaccttagcctctgattggttgctttttgcaaccaatcagatgtttgcacaggagagtgtcctatgtaactctacttcagcctctgattggttgctttccacaaccaatcagaccaattgcaggccaccacttcatttacgtggggtgagcatgaagtggccaatgggaaacctgtagagggtatttggaccccagaagattttctttatctgggcacttgagccgctgctcagcccgctctcacactatggcatgtacttttcattttaaataaatcccttcattccttccttgctttgtttgtgcattttgtccaattctttgatcaagacaccaagaacctgggcaccctccactagtgacacactgataagatcttattatattgggctgataattcacctacacttttaccttctgaatagaaaaggcacttgattagagatgtatatatctaggtgctgggatcaactatgccatttgcaaagtaccttacttcttgagcaagaaggtaaccaaaaggggaatgaataggcaatataatttcttttaaaaatgaattagtaagctcttgtggttacaacaagaggactgttgttttggttctttcacaattttctatagtaaaatttgttagtattaaagtataatgttgatgcctatatttttaaaagatataaaagtagagattttaaaagagaattaaaaaggttttgagggaactgttttagattaagtaagataatgaagagaaacaatgcttaaaatattagaaaaaaagacttatgagaaaagtcagaagtactgaaactgtctagccaaagtagaaacgaaaccaaatgatacctttctcattcatattaattatttgaatgctttggttttgtttttctttattttatattctgttagacgctgtctttcttgtcttcaaccaattcttttctatgtaacattagacagtgtctaataataatacacaaaacaaaaaagttgtaaagaaaccacccacattttctcttcaaaagaaaaaattgtctgagaactctgaatgtctaaagtccttgaataataatgggaaatggaggatggttcatgagtgtttttcagtattagcaaaagactgacaaaagcatgagtttatcaacaggaagtacatatagtcagacttatagactgaaactgttcctaaagctgtgtgtccctgttttagaactatcaccacagtcactgaagccctgggcaattcacagacattgcaaaatcaccacagtccctgaaggccaaagaatgagacacaggagtcttttatcatttcataactcagtgtgcccattcttcctaataggcaggacccagcatctgtggtcctcaatacaaccatttagaaagtcacattgtagtcactccttttgcttgttctggcagggactgaagttggagcacaaaaaatcttgtaaaattcagttcctatatcagggtgtttccccctttttatcatgaagtcacatgtcccatcctgtgtcttaacagtaggtgattattagaagagtagctggcacacagtagatttataataaacaatggaataattagagtgcctagcgcacagtaaatttataataaaaaatatagaataattaatgatgaagaaatgaatggtagatgtagtagaatagaaagatatataggaatcctgagaagtttggcagcacatccaatagaaatgtattgcaaaaagtttatatagtatttacatttcttatagcctcatttaaaaactgagaagaaacaggtgaagtaattttaataatatttatttaactatatgtaaaacaaaaatattatttcttcaacaggtaatcactatatcaattagtattatttattgcattatttattgtaccacctctctaaattccgttgtgaattttacacttccagcaaatctcagcaacacgggatagccactattcaggtgctccaaagccacatgtggctagtggctaccacattacacagcatagctatagaggggtcttagaatattctgactaagtcaggaagggacttttgtcacctccaccaacatcccatgggtcagaacccagttatatggctaaacttaattgcaaaggaaactagaaaatgtaactatagaggaatctttaagaaactattggtcagacaacctaagtgtaatgtgacaggatattatctaaaatcttaatttgaaacaattacatatagttgatataaaatgcataaaatagagaaggatgtactatttttgaagccaggttcaaagtgtatataatgaacactattgaacaaagcaagatttaaaaaaaattgtgaattgaataaaatatgtatagtaaatgtacactctattatgtaaactaaagtatgtttagtataaaaacacccctatactaaaactcctttcaatactccaaagcagtaagaaaaaaaacacaaaatatacatttaccaatcttaatagtctagcttataaactgatatggaattcgttacatgatccctgtttgaacattatgtaagactagcccaggaaatgatatggaaaaaggaatgaaaggtaactttcaacgaagttacatgggagagtgatcaaaagaaaatgtgactttttttccttaactcaacacgtgtacgtgacgcttcaagtatgcaacaatggatctgtgctcaagtcaaatgcacagaccagaaacagaaattggtcagaagacatttcttgttttttcggttttttttttgttttttgtttttgtttttgtttttgtttttgagatggagtctcgctctgtcacccaggctggagtgcagtggcacactcttggctcactgcaacctccgactccctagttcaagcgattctcctgcctcagcctcctgagtagctgggactacaggcacgtgccaccacacccggctaatttttgtatttttagtagaggcggggtttcaccatgttagccaggatggctcaatctcctgacctcgtgatctgcccgcctcagcctcccaaagtgctgagattctgcgttggtcatcaatgtttaaacatgttaaacgtaacatgttacatttaagtaacaatacctacataatcatgtaagtacattcattgccaacttaaaagggagtcttcaaagcagaattgtcagaacttttagcttccctgggccacactgggagaattgtcttgggccacacattaaatacagtaacactaatgatagatgatgagctaaaaaaaataaatctaaaaaatatctcatgatgtttcaagaaagtttacaaatttgtgttgggctgcattcaaagctgtcctgggcctcatgcagcctgtaggctgcgggttggacaagcttgcttcaaagctaacattttttctccaaaattttccctactgctatcgcgatcaatttgtttcctctgaagtgactgattttaactgagatatttttgtttgtttgttttctggttctgcatgtataaatccttcgaatagtgtaaggacactgaatttccagcaacttctgtttcgaaggttcacacttcaaactataacatgttgtgtaattattggaaaagtgtcctaaagcttccattattagcctataaactatagttttggaagagactttgcccaccattttacattactagctgtgagtgcctaacatttagtaagtacccaagaaatatgaatgttagaataaagtcatacatataagaaattctttacattgttcaactactggagaatatgttatatgtagtgattatttttaaaagcattataaaaagcatttcaatttgttcaagcatctcaataagttagttaaaatacacagaaaatgaataaaacaattagaatatatatgtagcatttgtgtgtgtgtgtgtatataaacatatatatgcaaatgtgtgtgtgtgtgtatatatatatataaataggtagagaactttaaagtaattaaaatctgaatgtggttagctcaagtcaggtaaatttgagaaaatctttacaaaagccatttgctcatactactcactctcagattagttgttcatcaggtaaacaatttgctaaataaacatttaaataaaagaaacacattgcataggggaagaaaacataattttacctctaccttgattttttttttttttttttttttttttgacactgggtctcactttgtggcccaggctggagtgtggtaatgcaatcttgtctcactatagcttcaacctcccgggtttgagccatccttccacctcagcctccccggtagcttagctacaggcatgcaccaccatgccgggctaatttattattttttttactttttggagaaatgagggtcttgctatgttgccaaggctggtcttgaatgcttgagctcaagtgatccttcagtctcagcctcccaaagagctgggattacaggtgtgagccaccgcatctagcctctacctttatttcttaactgggactcctataacaaaagagatatcaacaagaaaaaaacaataaagtttactaacatacacacctcatgtatacatgaaagatatataaggaaaaatgaataaatttctctgacaaagaacaatacgttttttgagaagtaacaagacaagggaaaaggaccctgagtctctatgagtggccaatttcaggaaggcaaatatatgggaaactgatggtagataaaggctagttaagaaaatttattatgtagattcctctgatgcagtctccgggctgataaagatctaaagttgtcattggtgatcaaactttgtcctttctgatagagaggagaggatggacacctttgcaaatgtatgtactgttttcaggcaaatagtgggagggcagagaacttatatctgcttcttctgaattgcctttagctcaaaatagtcctgtgtcaaagtggcatattttcatgaacatagagaatggaataatagacattggagacttcaaaaggtgagaggggccgggtgcggtggctcacgcctataaccccagaactttgggaggctgaggcaggcagatcacgaggtcaggagttcgagaccagcctgaccaacatggttaaaccctgtctctactaaaaatacaaaaatcagtcgggcatggtggcgcgtgcctgtaatcccagctattcaggagaccgaggcaggagaattgattgaacccaggaggcggaggttgcagtgagccgagatcgcgccactgcactccagcctgggtgcacagggcgagactccatctcaaaaaaaaaaaaaatggcgggaggctctcatgtaccccagaaatttatacacctacagtgtacccacaaaaattaaaaatacaaaattttttaaaaggtgagattgtggcaggggagtgaggagtgagaaattacctattaggtacaatgtacactattggagtgatggtttcactagaagaccagacatcactactatccaacatatgcatgtaacaaaactacactgtacctcctaaatctataaaaataacaacagaaaaaggcaaatatacatatgctttcttatagattcattaatctgttttatttcagtgaatgaaaacttttgacaatggctaaccttgaaaatatgttattagaacatgtttttctttctccattgtgccctatgagcacaacttgagaaatccagcaataaaatgcaagctagtttttttttttttttgaaacagtcttgctctgtcgcccaaggtggagtgcaatggcactatctcggctcactgcaaccttcacctccagggttcaagcgattctcctgcctcggcctcccaggtagctgggactacaggtgtgtgccaccatgcctggctaattttttatttttggtagaggttttgccatgttggcccggctggtctcgaactcctgacctcaggtgacccgcccgcctctgcctcccaaagtgctgggattacaggcatgagccaccgcggccatcaagcctgctttcttgacatattttgtgacatattttgggatggcatatttcggtctcctacagttggcagggcaatctaaagtactttaatatccttcttcatgatactttcaaaaaatggaatttgatgcctcagaaaacaatactaaaactttcttaaaatattacaatgtgtactatattacttttttaagtaataggacttataaatatttatttttaaaatttgtaaatatttaccatccacctttgattgaacatttttttctcattattttatccaaaaatgtctattgagacctttaaaatttgtattttgtggcaccatctaagacgtgatttatgctccttgtcattatttaatcgtcaaaatgatactttgtctttgcttaaatcagtgtgggtacatcgaacaaggtttgagagctactctgtaggactgagtcattagcctgtaattttacagcggatcaagtactacgttttcattacttggaaagaaaatgaccttgcaattgactcttacatttaacgtttttatctcagctttaccaccattaaatataactgtttgcactgaccacataagaaaccagaaaaatcactgggtcacagtttaatctaattcaatttaaatccgagctagatagctataattggcagtttaccatatcaaaggccagagttaagttacactcaaaattgtgttgatttggaagtaatttgccttaaattttcaagcattgttctgggggtactaaaatgctctttcaagagtttactatatggtacgtaatattttccaagtgttagatgatttatgaagtctacattattatctaaaacaaccaatgttgtaactaccatacaagtctatgaatagaccttatttcacttggcctatctcagggtacaggatcccagccttcttccgtggcaatatgcaggctgttcctcagcaacgatttctagtattgtgtgaaataatcatacttacaatactaacttcttgcttcccaatgccaagaacactcatcttgtttctattgaataaggtgacaggcatgatagaagcagggcagagccaagtcctgacagtaacatttcaagtacagagaaattcatatgagaaaaatggacaatgagggcttgttgtccgtgactttttgttccatgaaaaatatgcctgttagcaaaatcacataactaggaattttagataaagtttctatgtacattatttaaaagagtgctttatacggcatttaagttaaaaagaaagaaaaaacattcacattaaacctaaaagtaactaaaaagtcatagaacagagatgtcatacagatggctagcctttattaagtgtcaagcattgttataatggatttgcatgagttctttaattgcatttatttatcttgttttggtttggtttttgagacaagatctcacttcgtcactcaggttggagtgcagtggagtcattgcggctcattgcagccttgacctccaagccatcctcctacctgaacccccaagtagctgggactacaggtgtcccccaccatgctcagctaatgttcctattttttgtagagatgggggtcccctatgttgcccaggctggtctcagactccatagctcaggtgatctacctgctttagcctctcaaagtgctggcgtgagccacggtgactgaccttatttatttatttttaatgaacaagtaacagttgagtaatttatggtgtacaatgtgatattttaatctatgaatatattacagaaacattcaatcaagctaattaacatatctatcacctcactaacttatgttttgtggtcagaatgttgtctactcttggtgggaatgtaaattagtatggtcattttggaaaataatatggagattcctcaaaaacctaaaaatggaattaccatatgatccaactttcctacttctggatatatatccaaaggtattttaattgatttgtcaaagatatatgtgcactctcagttaattcttaaagcaacgtactgagatagacattattagtatcctcattttacatatgacagaaccaaagcagagaatagttaaataacttgttcaaggctaaacggagaaagaatcaggattctttttaatattttcaagattcccaagttcaaatgattaaacaatctattttttttttttttttaaattgggggcttccaccttttttatatttgttgttagtgggatttaggacatatcatccccaaatatggcaccttggcatttcgggaaacagcggaagtgagaaagtctctgaccttctgccaccattttcctctgaagcagatcagaaaagaattatctggccttgctctgaagtaggccataagacccctcatgtgtcccatacctaaaggaaaggaatgtcacactgggacacagagaagactgaacaaacaggctttgctacattcccccccaccccaactttattaccattagattacacccttttgttctccaatcatacttctgccaggttgtccactcttcatcaaatttagcataaaaatacacaggtctcccctttttctttaggtattcatttctgaatgctcctgtgtcctggtatcatttgtaaaatttatattaaatacatttgtatgcttttctcttgttaacctttcttttgctataggggtctcagctatgaaccttgtgataggcgaggaaatcaattttttctcccctacattgttcacaatccaatttaagagaaaaagtgagcactcttgatgatccagtaccccccaaaacacacagacacatgcagaaataaaacaaaagttttataaaaggtggcatttttagtatatgtagccacactttaataattttatttcattcttttctatttgtttttttttttcctttttttgagatggagtctctgttgctcaggctggagtgcagtggcatgatatcagctcactgcaacctctgcctcctgggttcaagcaattctcctgccacagcctcccaagtagctgggactacaggcacacaccaccatgcctggctaattattgtattttagtagagacggggtttcaccgtgttgcccaggctggtcttgaactcctgaggtcaggcagtccgcccgcctcagcctcccaaagtgctaggattacaggcatgagcgaccgcaccagccttctatttgattttttacattaatggcagttatgacacataaacgggttgtacagctcacaaatgtcttgacctatagcttgaagagcatttgtctaaatgacttgctcaaactacttactcacaaatccgggttctaaagttaggttttttggtttaaaaactgtaggctttttcctcttggttttataattgtgtcagtccaaaaattcttcatttcctaacttttctccatattagctataaatcagaatagttgggaactaaatgggagctttgccaaaggggcaatccccaactacaatgcgttggtctaatattcagtaaaatacattgattttagtaaaattcactgcatattttgcattttactcaaattcaatataaaatagacagtttttttttttttttttttttgagacagagcttggcttttgttgcccaggctggagtgcaatggcgtggtcttggctcactgcaacctctgcctcctgggttcaagcgattgtccttcctcagcctcccaagtagttgggattacaggcacctgccaccatgcccagctaatttttgtattttagtagagacggggtttcaccatgttgaccaggctggtcttgaactcatgacctcaggtgatccgcccccatcggcctcccaaaatactgagattaccccacctggccaacagtctgttcttaaagaaagaaaattaaaataaatataattactagattcagtgtacattttacttttgtgagtatcattcaggaattcttacctcagaaaacctggaaaaggcaagttatttagaaatatgaagaaatcagggtgttttattcttaatgaaagcatgcatcttaatttatctttagaaatgactgggggaagttgattatacaatcaaaatgattaaaattaggcatgtagactttagtgcaagcaaatctgggccactcatttccaggtacatgaggaaatgtactagcacttcttttattactatagctttgaaggcagcgtgttgtcttacttcccattgtttggatttttaaactgataattaaattcatttgcatcactgctgcttggattacaaatacttaaaacaattagttttctgtcagatcacagatctacatcaaatagatgttactttttaaagaataagccctcaccaattagaatgattcaaaagcttttgattgttttctccaaattgttaagtatgcatttgtctttaatgtaaataaatagacttaatggcataaaaagccattctgaattttaaatgaatgacaaaatgtaaatcatgttctggcataatagttttgccaaagtttcaagaaaagaaataggagcattcacaataagcaattgcaagctgtgaaatggcatattaaaacagaggattaagttatttttctagttagtttttggggaaaaaatctccagtcttgcagaaatggctaaataattgcatttggtatggaggctacttttggtcaaaattatgttaataaatatctgagttcctcacattaaagtgaagcaagaatctgtggcatttttttaagtcataaaacatttgtatgttggcttttagatagtaacaagatggcatccatttatctgtatgcttctgcgcatacaaccttatatgacatatgtaccaataaaaaaagtatacatgtattagtaattaaattctagacttgtgctgtccaatttggtagccattagacaatggcaaaaaattattttgaatttaaattagtgaaagtaaaagaaactatgttgttcctccattttgctagctacatttgaagtgctcagtagtcacatggttttagtggccatcgtgttatgtagtgcatgtatagaacattttttgttttttatcaccaccaaaaattctaatggacaatgctggtttagctcttcagtattgcaaactttagcctttaaaagctatttgcaattatttagcgtgtattgtttatgctccaaaatactttcatctcaatgtagaaagaaaacgattgcacttttgaatataagagaaatcaaatccttgatttttttctacataaaaacgtggaatttaaactgaattatttaacaaaaatcaaagtaccttagaaataacctgaaaagaaaaacaaattttagataatatatataattttgaagtagaagaaaactaagataaaacgtactgcatttgtatacttttatagttttctaattattattataattggaaaaaatgaattttaacaaattaggtataattatcactgtggtaagcagtctccagaatggtcccaaattaaggttgtctgattacggaataccatgttcttttaagtccagtaatcccaaccttttctaggataaagcttggtatatggaatcaagatatgtattcttgttattcttctgttaccattactgctgtgggtttcaagaacaggcacatacagtttctccttgtgtgacacaaaccttgtgtgaatactttttggtacgctttcaaactggggcagcactagatgaatgccttttccctaggtatgcctttcagtaaactctccaggtgagaggggtgtagtaagtactgctttacatggatctaagtgacatgatttgatcacagttcaggtggttgtagttatgaaccatttcatgttaaattaaggtttaggggtttattttctaaaataatgctacttacagtgacagcatagcatagaatctacaagttctaaagcaactcaataacttctcttaaatggcccttattattttggattagcattttggatgacaactaactccactccctctcttgaagggaaagagatttggtagaaataattgaatgaatcctggattaatctagaatatgattttatcaatgactgatgaattacactgcactcagttgataacggtgtcttcttctcttagaaatgttgagtttgttcctattattatttcaggagacaaagctttttaaaagagttggtcaactgtagctaggcatgaaagcatggtctctaagaagacacttataattccctaagtatttgattaaaaggaaaacaagtacctcaaaaactcttaagtttatgttataggcaaagaagtccccaaacaatttagtcaacactctgaaataaactcttaagagtggtgattttcacttggcattttggagattccatgtgtggcaatgtgctcctcaatcaaggagttacatttctatgtgcagtaacattgcagttgcacaattaatacaaaaacaaacatatattaatcaatgacaggttttctcattttcatacagagttatgaaacctttaggctaaggaacagaatagtgagaaattagacaactattaataataggattaattagattctggccctacagctaagaaaatggagtgacaatcagaataacaccaaagttttgcaagttgtccaagtgacaaaatacaactaattaatactaataaactaaagtcaaattggactctatttacacaaagtactttttatatacaggcaaaaatttaagtagaaaaattatggcctcccagaactaataccaaaaatttaatggtaagaaaatgaacgtattcatttaatatataaccacatcatttgaaaatattgagctctcattgtaaagacatgacattttctctaaaattaatatattccataaaaatagtttttaaaagagaaaggctttgtcttcattcttttcgtgtgaaggtcaaatatcttagattggaatttaactgcaggaattatgcttctgttcttactttagcaacactaacgatgacattttctgaagtacatattgttaacaccatcatgatgaaagcaaatcatttttctacacttactttgatgctaatcagagcagtcatttaagttgctacatgactctgagacagaaatttcaaaatgaaattgaccaccgattcccagacaaaaccagaatagtggtgtcagatgagaagggttttgcagtgttttgtcacatttcattttgatttttacttttttctctgtttgacatatgttctgaactagagtgccataaagttttatcaccataagtttgaaatgaccacattactcatgagctacagagtcacaagtgagtttttagcttctttcaaagctgtagaaataaaactttatagtaccctaccctggtatatgttgttttatgtgacacattttgttccactttattcttttcttttatttcccttcattattttctttttgaattatagcagaatttgtattaaatttttcctaatacacaacagtttaagctacattttataatatcttatgtatttttttcatacagattatctttgacctgtaatgcccatctcttaaagaaattttagatggtcattataaacaaggttcattgtgaaatatatttctgttgaaacactgattttattacaaaaaggtaatgtttgatttccatgagaaccaaaactattggttgagatatgaaagatgaacatttgcttccctttacacaattgattaaaattcttaatgcatacatagtcacactacacaattagtgtagtacatacatatccgtataacttgagtcttccatgtatatgttatgcaatagaacttctacaaagacatcaatatctcatgctgaaactatccaaactataaaatgattttaggattagcttatcccaaagggaaattgtgagcaatgtggctggcctgacagcctgaagtgatatgctcagagtggatctgataggcagccattcatttcaagctcaggaagcaaacttattattttgtcatacacggtcgtttttccattgaagacattaagacggtaaagaaagtcctcagagtctatggaaaggatcaccagactttcattttatctccagatcttgaactggagcttttgaagattccattttagtgatttctggaaggctgctaatcttaatgaataaagtcagaaacacatgtgtgtggctgattcagattccagaaagaattttggttgctatcatgattatttttaaggcataagtgattaacgctgagatatactgcttttcctatttgtggattaaatttcttctatcggagaagttctaattgaaatgtctccattcaatgtggttgtgcacacacacaagtacacccatgaatgatattttacatatgtaaaaaaagaaaaccgatattaagtaacttctacttttcattatgagacatgctgtgtgtgattttatatatatatatacacatatatatgtatatatgattttcctgtgttttgttaatcattttttatcattttataatttttaccattttcatcattttttattgtgtggctgatatatactagatattactcactcagggaggatacaccctcatctgggcactcttttatacaagttatggcttttgttttaaataattcatctaagtttaatgaaagaaataagtgactgctttatcctagagaagcagcaaagagattttgttcacctgtgcctttagagactacatgacagcctctacaagtagcagggtagaatcaggttgattataaaagccttcatttcatgctaaatggaaaggagaaaagaaagaattttctcctttaattagaatgtggcagtttaatgacagaggcactattgttgtgggttaacatggaatgaaatcaattaaataggactatgtatacttaggtgtctgtaggaatcaccaaaaatgtaactctccaacagtttgctgaatctgcctctgttttgtctggctgctatacttggtatgtgggccatctggctcctggattccagtaaggtttgcatattcacacatcaatcagaagtggtgtagggcctattaggaagcaccagccagttaggtgacatgccaggactgcaaagcactcaagcaggaatgccaagtggggagcttctgctgaagctgacgctgacacgggcattggaggcaccttttgatccgtctagctttactgttgatgtcacagtcctgctagatcaggcatagggatgtcaggtcacgtaaggcctcatttatgtcattggttttgcctggataattcaaatggagcaaaaataaaagtgatcttgatccttaggtcccatgacttttgatagtagaaggatcattgatctgaaattgtcttgcattcctgactagtagacagaaagatatcagaagcaactttgtctattctgtttctagaactatattgtgggtactagtttttcacagtagtactagacatttcagaaacagctaccgaataatctttccaaataaagggaaaggttgtaataaaatgcattcccattccctatgtcttctcaaacagttcactgaaacttaaagggatgagcacactttacaagaaatgcaaataaccttttagttcactgaaataagataaacaacacatgtgtgtatttttaattggaagctctatcattcagttccttgaactaacagctactatacttttcttttgatgtatgcttcacagatatccattgcaagttttagattgtttgcttcaatgtagataagacaaattaactgaaaacttaaaaagcacctagaggattggttattttaatgttttttagacctctggatgctttgatcccatacagaataggatgaaattccactataatggcattgttttaaaatttgaattggccgtaatgtgttgtgtgtgcacacatttatctagctatgaacacaattaatactcactgagagagctctttaaaatgatgacataatttttttctttgaaaagttatttcttacgccctaaatttctaaagtcaccaaaaaaaggtaattttctatatgtaagacttatttatagtaactaaatttctaagtaactgatatctcctaaacagaaatgtctaataacttacttctagatcagctttaacaatggttttgatttatctaacttagtgcagtaatacaaatattagtagtaaaataatacaagtttaactaacttggtataataataggaataatataattgctcatgtttgatgtatgctaactacttggcaccattaagtacatcacatgtattatttcacttttctcattaaaatagcagtgtgatgctattatctccattttacagagagggaaagtgaggcatggagagaagtcgcaatttagaaaagtaataagtataatacttattttaattttaaattattctttgctagaggaaagatgcatgttccttggacatcttctatactttaataatattatttctatgtttctagcaacccccacaatgaaaagcaaatacacgatgcctttgggggacaaagcagttctgtagtcaggcccacacatgaagtgttttacctttataggtttcaacaattaattggaataagctattttttctgttttggcatctgtctacttggcaaggcccccaactgtggtgttggcagctgcatgacagcgactgcctctggtttttccacagcaactggctgaaactcgcctccctgggctgtcctattatgttgaaaattattttctttgactcaaatcagaagagtgtaatagaaattgtgaaaattcctgacatcttcccaaagatgtttttgaaataggttaaggttctccgggagtaaacttggattctaaatatgattttttttttctgacagatgtatgcatgtgttatggtaggtattcagaaatgaatgctctcatttgtaaaataaaataaaataatcccaaactcttaactatagcaatttgtggttttaatcgttttcccttgtaaatggaaacttggtaagttttagagtgcattgtacatgataaaatacatcttatgtctaaaatcttagaaaatattatcttgcattggggaaaacatcataatagtgcatatgtgattcattttatgtaaagtcctaaaattatctaaattaaaatatctatattctatagctgtgcatgtgtgtatgcacacacaagaatatacacatctgcattttatatagatacaagtatattgaaaggatgatacattcttatacagatgtagagcttaggatttctttatcaatataagatagaaactgcgaaagcatgaaaatgaaattaagcatacttcctttattcacttatcacccgttttcagaattagttgccctatgggtaggtaccttttaaattatattgtacatctttcaattaaatatcgggaggttgaaaattaagtgacaattctaatatttctagtggaagacctgaagctgcactattaaaaagctagtaaatggaaggggaaggatatttctttatccatggagttaattacacaagcagtacactatgtaagtgctaggagaaaaggtgatacaaacactacttaaaaggtttccagcgagaagcagctctgaacaaagtagatttaaagtgttacctccttactcctacaaattctaatgggaatcaattatgttccatgagtaataataataattaatatttatggaagtgcttactatatgcttggctctgaaataagggcttcacatattatagcacataactatcctaagtagaagatactatttttacttccctttttatagatagggaaagtaaaacacagaggtgggccgggcacggtggctcactcctacaatcccagcactttgggcggccaaagcgggtggatcacctgaggtcaagagtttgagaccagcctggccaacatgacaaaaccctgtctctactaaaaatacaaaaattagccgggtgtggtggtgggtgcctgtaatcccagctacttgggaggctgaggcaggagaatcgcttgaacctgggaggcggaagttgcagtgagccgagatggcgccattgcgctccagcctggggaacaggaaggaaactccatctcaaataagtaaataaataaatagcacagaggttaaataactctcctacactcacacactccatgtgtctctggtgatcacttggtaccacttcttttcttgcatgtctcacctctcttataaacacattaccaattttaaatgggtgttatgaactatgtgtattaattatggctgagaaccaccatttttaataacatggaattttctttagctggcagggaaggaatgcttccagtttaaaaaaaacggtaaaggacatagctttaaacagaaaagacgctttgaagataagttcatgtccataaagtccattcaaataacttagtaaattgctgataaggtcatatcatgtagcattttttaaaaataagattgctgaaagttcagcttgctctgagtaaacacagagcaagatgattctcaattatatagtgaataaaatcaataagaacatctagtgaaatccaaacagaaaataaaaaaatcaaaattgacttttaaaaaaattgacattttatggagataattgtagatacatatacagttaataagaaataatacggatatcctatgtacactttaccattttttccctaaagttaatattttgcaaaactataatataatatcacagccagaatattgacattactacaattcagcaattttattcagtttctctcggtgttcctatatgtgtgtgtgtgtgtgtgtgtgtgtgtgtgtgtgtgtgtgtgtgtgtatttagttctgtacagtttcatcacatgtgcaggtgtaggggaattggatatcacctccaatcccccttttagttcttagtaggctcttcagttggatctagaaaccaaatcgacatcaggcagaaaacaaaagaaaagaatacaaattgtattacttatacatgtacgtggagatcatcacaagaaagtgaagcctgaagaagtagtcaaagcaagatgcttttaatgatgaatgatgaatttgatgaatttggaaagcaatgacaggataaagagaatctggctagggacagtaaattttctctaggggagtcactaggagatagatagtgggtataaaactagtgaaagataagggttacttcagtaaatatatttattcaggtccattgaagcctccaattctaagtctctggtaataagggctattttctcactctggtcctgtgagggtgcccctcccagaggaatctttatggtttgctgcatgtaggaagagacaggtgagctaactctttctgaaactacaatttctccaaagtttccaactgaaaatagccaacataccaatctggcatatttggggatggaacatcctttactccttcacaggtatctgtggatgagagctgaagcaggcccaccaggaacagagagtgtttccccttactgttggcaattctctggattgcatctacccatcctgtcctagaaagtgtcaggagaacctgatgttgtctcagggaatcctcttagatgtggagagataagcctttctaggctgctttcgactgctggttgtgggtctcgaaatggtgagtctgggtcacttgcttctattaagtgaaaagatgtaagtcactcaacttctgctccagacccagtaaaccaaaactccgtcgtcttcttctgactaccttcagagttatcttgggtttattcctgcattattaccagcatttgttgctgttttagtgggaagaggaagggaaaaatgggtcgaagttatcttacccttaccagaagttcctaaatagactttttcatgagaaagaatatttttaaaaaactgtttatattataaatattcttggtagtttttttgctgttacatattttttaaaaatccatagtgcagatataataaaaactattgcaggtatttaaattaacagaactagttgaattcctacaacgtgtcatgtacagtgctaggttggttgatctgtctgtgcttctgctttacttggaatggatgagcaaaggcttatactaatttgcacttagtattataatgaggtgtgagaaaccaattttcatattcaagtgtctataaaaagtgactatttttcaacagttagctcctttaattataaaatcagtttttattaaaggcagttgatgctttgtgtgttgttgctagggtgacatatattatagaaacatacagtttatctttccagtaagagggaatacagtctctatcttaccgttaatactttaattagagaatgatcgacagaaaaatcttttttctcttcatgagatttgaaaaatgcatatcttctttatctgcatttaatcaaccctgggttcattaggatttgttgtgttggcacctgagaacatcttagaaattattaaataattcattttctgctttttttctttattttttatttccagcagaggcttgtattaaggagattctcttttgacatacccccacatacattcacactaatatatatgcactattttcaactgacatgttttagagttattgagatattaattttataggatactatcacattttatagctcttagtaaatagtatggtatttcaaaacataatttagttatagtaatagaaataatccatcatatttgttgtatttataaaatgtcttcaaaaatatcatataaatgatatctgaaattttgtcctagtcttgcaaatgctaggggattaatattaataaggttgttgtcaatataaatttctagtgagatgctcattaactggaaatccagtgctagagagacatttcagaatacctaaaccttatttagagacaaataaacatactagttaatatggctattgctatgaaccgcataaaattgaaatttgcccgaactcattcagctaagcatgctaacctcggctttggaaaagattgaatggcctatcatcagtcaatcttggtactagagttaaaagaagaggcaagtaatatggacagcacaaggaaaatgacagaaatagcggcttgtgatgataattagcaagaagtttgaataagcaaactctaaagaatattgaaaatgagacaaaaactgttaatgtatatgcaattaaatctttggaccctccttgcttgttgtttcaaatatccaattgtggagagaactacgctagggtaataatattgcccgttttccctgtccctccatgtactccaattaagaaagcagaaatgaaccatctaccctgatttttggaggaggaattgagtaggtatggcttcatgctctttaaattggggttaagcccccatgatataaattatatagggaatgcttcttcttccatttaatgcttactaatggatgtcactaggcaaattattagcaaacatacataataagaagacttaatgctatgttcgctgataacagctttatcattagtaaaggagatattttcatctctattcgtctgactcctatatgtgcggcttaattgattacgaacctaggtggggaatagatttaataattttctcaaactccatctataagtaatatgaagacatgataaatttttaagcagaaaaatgaaatgaaaaatattatgattcggaaaatttgtttccttgtactatgaaggatacttgggagcaggttggagaagagggtgaaggaaccgtttgggggacgcgtcagtaaaactggtggtagagactaggctgaaggatgatagtgggaatggaaaagtgaagacatttgaagggaagaagacattgtgtcggagttctaacgatgttcatttgtgcataaaacttgcatttgtctatcttattgtactttatatattcttcctaataccctgtactccattttactcctttttttttttttttttttttttttgagacagagtctggctctgtcgcccaagcaggagtggtgcagtggcgcgatctcggttcactgcaacctccgcctcctgggttcaagcattcctcgcgcctcagcctcccgagtagctgggattacaggcgcctgctactacaccagcctaatttttctgtttttagtagagacggagtttcaccacgttggccaggctggtctcaaactcctgacctcaagtgatctgcccgcctcggcctcccaaagtgctgggattacaggcgtgaaccacctcgcctggcccctgtaccccattttcaatatggcaaatggaataaatgtttttacaacatttatttgactgttgtttataactcttcaatagctgtccattactgtaaagtttatgccacaacctatagggctctaccttttaacagctatctctttctgattttccacttctctccaacctccctccctaaattacggtgatactgattttcttttaaaatacaggactactatcagcctcctttttcatcttttaggccacaacttaatgtttcttcctcagagaaatttctaaaggacccaaacccacaatagcttctatatgagactacttctcccattatatatcttccaggtatcctgtaatctcctttacaacagccagcagaattgaagtacactatttgtcaaccaaaggtgtgaagcttcttcttactcctggtgtttgtggttttattgactcttctttgttttctttaccagtgagatcccatctacatctttcagtattttcaccagtatcttggtcttttgcttgcttgctttcttgttttctaggttgattataattttattcctctaaacacatgaataccttccgtcattccaatggaattttggacaaaagggaaaaagttataagtgccaatttggttgccatgaaccaaaacagaaaattaaatacaattgcctagataatcaggcccaatttgtattacctagtatgaaaaacactttggtaacaacagtaggtcatgttaaactaattaatttctaggaacattgataaattaaacattggttactctccagagtaactctaagcccagaaaataagtgacttgtacatccatcatctgattcaggttcaaagagagtttctttattttggcaaagccaactttactgaaatgagatgagaagatttctgttgccaatttataatggagattaaaaataagaccccattgtcagagttggagatcatatgttggtaattgtggttttgtacaaaattaagaattgatccctaagaacttgtaaattataaagactttgtttagctcagtcacatttgcctaatctaagatttctgtctaggagaaataattttctagatggagtcaactagtacacctagtttaagtcttctttatgtgagattgtgtttaaaacagtgactcttttggccatagttacaatgagttcttcaagggttgtgtatttgcagactatcagtggaaagcacttgaatggcaatagttggaaattttgaagcaaaggaaataaaattgttacttgaaaccttgtaaaaagatcatacggccgggcgcagtgtctcatgcctgtaatcccagcactttgggaggcccagacaggtggatcatttgaggtcaggagttggagaccaacctggccaacatggtgaaacccgtctctactaaaaatataaaaattagttcagtgtaatggcgcacgcctgtaatcccagctactcaggaggctgaggtgggggaatcacttgagcctgggaggcggaggttgcatcgagccgagattgcaccactgcactccaatctgggtgagagagtgagaccctgtctcaaaaaaaaagataaatttttaaaaatccatgcaaagagcttgctattttgctattttagggagggagcatgagcttcatactcacttggaatttcctgagataaaggcagaaatagaattggaaaatatttaatataaatctgaaaagataaggcatttctcttagaagaagtttctaagcaaggcagctatatagcaaagggtgaggtatatatccctggctgcctcttagcacagggaactggcaccacggggcctacactggcccaagagttcttcaaagataattgtgttcccacaacttttctctgtgtagtaaactcttcctgccctgtagcagtccgcccagttcatgaaaaccatgggatttgacccactgaagaagacttttctcttaaagtttttcctgtttatccaggttttacccagtaaaggtcagctataactggtaatagttttgtcaatgtttccataccttgggacaaagttccttatttgctcggtatttcctctcaagttttacttggcattttgaaatttgaaaaaaattctatgtttttcctggctgtgaaaatgtattttttctttagtatttgatattcaatttataaaataagacttaaagcagctagatatttgcccatcgttatgtttagtggaatgaagaactaatcagctactactagtcttgttccaattaacattctattcctccatttccttcccacactgatatatgtacatatatagatatcagtgtgatatatatatatatcacacatacatatgctcatatatacatatatatcttatataagtctttgacctttctaagggtcaaacaccatgtttttcacaatctaggcaagctgctacaaggaaggaagagtctattatacacagaaaagctgcaggagcacaattatctttgacaatacaccttatattggtattttattttttttctgaaattactctgggttgagtcttatatttagtttctaattgtgaaggaaagccctgtaatgacctggtgatccatcttctttagaaccaagtcggccacagtcctaaaataaacatctgaaggcataggaacatttacagatgaaaatcataatttaatcaattgggtgtattatcttattttctaaatatgtatacattatttctttttttcttttttgtgagatggagtcttgctctgtcactcaggctggagtgcagtggcatgatctcggctcaatgcaacctccgcctcctgggttcaagcgattctcctgtctcaacctcctgagcagctgggactataggggtgtgccaccatgcccggttaatttttgtatttttattgtaacagtggagatggggttttgccacgttggccaggctggtctcaaactcctgacctcaagcgatccgccccaccttggactcccaatgtgttgggattacaggtgtgagccaccacgccaggctaccgtgtttcttttaaaaactttttttcttctatgtaccgtataggttttaaccctgtaagactgaacaccctcttttgtaagacatattttgtaatactcccattactatcctcaaagagaatttaccaaaaatgtaacttacatatatatataaaattctaaaacaattaccttgtaaaaaataaatcaaaggacaataatgaattaaaaataatggatatatttatcatcaataattaattattcaatatgaaaataagaaaggtacatactgctctagataaatgtagtacctgtacctaaaaccacagaagtagacagctcgaaatgctgacgtatgcaggtgagtggtatgaatgattaaaatgccatgaacagcatattttaaagtaatgggatttttctgtatgattaataacatttggtaaagttctgaataaaataagtgcacattttccctttgatttattgtgggatagtttcattcttggaaaatgcagtgcatataaagactttgtatttatatgtaaaattgagctaggttctatatattcacatacttataaacaggctgtcccctacttttcaaaagctgaataggacatgaaacaattactcattttcctggactttcctgcgtgttactggatgtctggcgtccttagagcacctttccatccgttatggggacaatcacagtgctttcacgtttcttaaatgtacccagggtatggtggtgtgcccagttgagaggaactgcaagtgagggttgtatttttttttttttgagacgagtctcgttctattaccaaagctggagtgcagaggcgcgatctcaattcactgcaacctccgcctcccagcttcaagcgattctcctgcctcagcctcccgagtagctgggattacaggcttgcgccaccacacccagctaatttttgtatttttagtagagatggggtttcaccatgttggccagactggtcacaaacttctgacctcaaatgatccacctacctcggcctcccaaagtgctaggattacaagcatgagccaccgtgccaggccagggattgcatttttgcatcgaagtagcagaaactagaaccagaggattttaactttctcatatgatggaatctgaaggaatggagtctaaagcaagaaactggccctgtgatggcatgaaaatcccaggcccctttgatcttcttgctcttttacaccttactatcattctcatgcttgtcaactcttggttgcaagatgatggtttcaacatctccagcctcaagtcttacatttcagagcagaaagatgaaaaaggaagcaagaagaaggaagaggcagcatgtacatcaggaaaacaaaactatcccagaaatccctagctgtcgtcctctcagatgccaaaaggccatgactgggtgccagagatgcttgaaatagagctctttgttcttgcttgacaccttgctacttctaaacaaaatcacgattttgttgttgagagaaaaaggactcctccctatctacttgtcctgagactgcttcagcctctcagcttcctagaccctcatgcagttgatttccaattcttccaggagctggcttactgtctactttttcagggtttcaaaaaaaaaaaaaaaaaaaaaaagcattttttaaagtttaaaaagcaaaatgtggagtgaatattttttggttactatgctttttaaatttttagaatttgtttttactgtgggttggctgttaatagtccatcaagacaactatttctttgctgggtttattggatattgggcaagcaaacaagcaaatagcagtatctgccactggatgtaatcaggaagaaattttcagaaaaaaaaaatgatgcttcaaggtctagataagcagattttccactggttcctgattattctaaataaaatgtttagtcagtggttgtgtaagtttcaaggatgttatagatggctcttgaaaacaataacacattaacctaatattttcagtactcctttttctagcttcatttatcctctcccatgcctgtaaacatgttactttgttaaccaaataaagtcattaatacatgagaccattttgccaaaagtaaacttaaaattaggaggaattggtctttcagaaggcaagaagagaccaagatgaaaggaagtcatttttgtgaaccatatgttttgacccagaagaactatttcacagcctttctcctggtagcaaacaatgagggaaacagtttcttaccatctgcacaataaaacttgttgaatcactcgggaattgggattattgctactgtttgtttgttgttaagccttaaatttaaaaaaagacaggatatataagcagggttggttctaatactgaaataaaacaaaaatgaacaaacccagagaaatctgcttccaaaaagccacagcacaacaaaaagaggtgtaaacatcagaagacctcaagggaaaaatacgtttatttagaaatgggatatcctggggattttgttacagcagctttattaagatattattcacatactgtaaaattcactctctagaagtgtacaattcagtgttttttcagtatgttcacagagctatgcaactatcatcactatctagttgcagaatactttcatcatccccaaaagaaactgtatgcccattagcagtcactccccattcctctctccctctagcctctggcaaccgctactctgtgttgtgtctctatagatctgcctattttggacatttcatataaatggaatcatactatatgtggcctctagtgtctgtaatctttcattttgcataatgtttttaaggtccattcatattgtagaatgtatcagtctttcattccttttatttgctaaataaaatttcattgtatggatataccaaattttgtttgtccatttatcaccagtttacgggtattcgtaaggcttttttttcccactttttgcttccagtagactttttgtatgtcacaaatggccatatgtttctttatcccataatcagaataaaaattatcattcttttagtggacgtgcctttttttaatcaaggcacagaaataaaaaagtgagttgtattttctcattaagaaaacattttggggtgtgcatgttttcagttgtttggaaatatgtagacatattggcagggtatcccacttacttttgctgtgtataaaatcaccctgatacttagcagtttaaaacaattactttattatgccgtggatgctgtgagtaataaattcagataggacacagcagggatgttctgtttatgctctgcaatatctatagcctcatctgtcaagacttgaaagctaagttggactcaatggctggagggtggaattctgaaggcctacatgtgaacttgctatgttgtttggcttcttcctagcatggtggctttacgatactcacacattttctatggtaactcagggttccaagcaaacgctgttctagcaaacaaggtagtagtcatatggtcttttatgaccctgccatggagggcacaaaacattactcttgccatcctctatctgttgaagtagttacaaactcacccagattgaagaggaaaggacatagaccctacctttccatttgccaatgagttttgggaccatattttaaaaccattgtgccataaagggcatgttttatgacaggtgaagctttacgtcttaaaagtatataattacaaatgattaaatttaaaatcacgagaataaaccattgcattcatctaccatcttgccactaaatcagaatcagtaaaacaaggtcaaattgactagaagccacatatagttgacatttggaagaatttgacagaaatatggctcaattggagttactgaatttaaaccaaaacgtttggcaccaagaatcatgggagcccagactaaagaggaaacatacattatatagctcttattatctaatggtgaaaatcctatcaaatctccacaaaggtggtgaactctggtcttccatggcatcctagacaaactttatttacaggcatgtatggtatataaaataggcatagataataaatataataatccagaacaatgataaaacagctactatgtcaaggtaccatcctaacctcacttataatcaggcattaaattctcataagaatcctatgaattagacaccattattatccatatttaacatatggaaagaaactaaagtacggagatgctaatgaacttacccatcgtcccactaataaatgttaaagtcaggatttgaacctagatgctcaggctccaaagcctatgctcaaaactcttgctatgtgaatactggcatattactgaataaaatagccccagttttgtttttaaataaaaaatgttgatcaatttttttcaataaaatattgtttcatcacaataagacctacttattttcctcctgagcagtttttagtgacatcaataacaatttttttaggctgggcacagtggctcatgcctgtaatcccagcactttaggaggccaaggtgggcagatcacttgagctcaggagtttgaggcaagccagggtaacatggcaaaacctcacctctataaaaaaaatacaaaaattaacagagcgtcgtggtgcatgcctgtattcccagctacttgggaggctgaggtaggaggatctcttgagcccgggaggtcaaggctgcagtgagccatcattgcaccatcgcactccagcctgggctacagagcaagaccctatcttaaaaaaaaccaaaaaaattataagcgagtcatacaagttcttcacagcttttcattatggtaaaccttgattaaaagccaaggttataaatgtaatttttgctaagtgcggatgtattgtatctgtagcaaactgtaattcaggcccctgaatgtaacatcctagctctcattccttttgctgtcagatttccctatagataacgtctacatctgctaccttatctactcgcaaatatttatgattttcttccatgaaatttacttttctcccctgaacctgtaagccaaatcaagtgaccttttgtgaatctcaaacctctgtgaattttaggtagatttaatattcttggccaccactttctattcagtcaaattcaagaattctataaagttaaatatatatggatgtgtgcacacatatatatatatgtgtgtgtctctaggtcatgaatcttttaatactatagaacatagaacatagaaaattataagagaaattaaaatatattgtcaatttaaaagcataccgaaaacatgttatatgagaatggaataatacaaattattggtatggggagaagaatcatgaatagtttcatgaggaatgtggcatgtgtaacaggcattaaatatgattaagaactaacactgagtatatacaagttagctgtatcaataaaaatgtaaatcattcagcaataaactataaagttatttttactccataagggtttttttccctgaaattttcggcccaaagtgactgttttttcttcacatgccacttatatagtgtgaccaagtatttagttaaaaaaattattctccagtcaaatcatttgttgtacacttcttggagctgtggcttgcttgtgtttttattgattaaaaaatacagcacaatcttgcacctaataaaaacctaacaaactggctgagtgcggtggctcacgcttgtaatcccagcactttgggaggccaaggcaagcggatgactggaagtcaagagttcaagaccagcctggccaacatggtgaaaccccatctctactaaaaatacaaaaattagcctgacctggtggcaggcatctgtaatcccagctactcaggaggctgaggcaggagaatcacttgaacccgggaggcagaggttgccatgagccgaaattgcgccactgcactccagcctgggcaacaagagtgaacctctgtctcaaaaaggaaaaaacaacaacaataacagaagaaacccagtaaataataggaaaaaagtgaatatagaaaagtaatagaaaatggttgcctttgtgaggttagatgtaaccaaaatattttagcaattgtttagaacaaatagattaaatgaaaaatatttccattaatattttaaactgttaaattctgtctaatttcacatggtagatacacattcattaagacttttcagtgttaagactaaataaagaaaaagaaaattcttcttattgtgccttattcagaatccactgaatttcgttattatttttattatcattatcattatcattatcagtattatttgagatggagtctcgctctgtcacccaggctggagtgcagtggcgccatcttggctcactgcaacctccgcctcccgggttcaagcgattctcctgcctcagcctcctggggagctaggattacaggtgtgcgccaccatgtccagctaatttttgtatttttagtatcttatttttgtgggtacacaatagatatatatatttatggggtacatgagatgttttgatacagacatgcaatgtgaaataatcacatcatggagaatgggatatacacccctcaagcatttatccttcatgttacaagcaatccaattacactcttttagttatttttaaatttacaattaagttattattgactatacttaccctgttgtgctatcaaataggtcttattctttagcaaagcatatttgtaaagagtttggagtttctctttgctttacacactgtaaaaaaaaatgtcaaacaaggttatccaaagagtagtaggagaatgagcattgagatcataagtgtctcatctgatcaaagttattcaagaatgaatgcattttggaggcaagagttgaggaccatcgccatcattgactatggagtaacacaagcccagactcttgagattaatttggcattatctttcaaaattaaaagtataattacatatttacatagcaattctacttcaaggagtttgcccttcatttatgttttcacatgagtaagggtttagatggacatgggttttctttgtagctaggtaatagtaaaataggtaatctaaatggacatagcttggtggtagtccatgcctgtgccctttatactacagttttaaacaagagatgaatttatataaacagatgttgaaatgtgatcgttatgtagtattaattgcacaaaagtagaacatatatatgtgcatatgtatgcatacatacatgtacatacatatgtgcatatgtgttctagtttattatatatatgtcaaattgttctatttgtatgaaaacactataaatacatacataataaataaacaaatatgcgtttgtgccaaaaagcacagaacatttctgtttagtctcataccactcattttatagctttatagataggaagaaggtagactttgatggtacttgaatttttatctatgtatctgggcaagtattttatctatgtatgtggtagcatattttatctatgtatgtggtacatacatgttttatgtatatgtatgtatacatgcatatatgtatgtataaaatacatacatattttatctatgtatgtggtagcacgtgagagaatttttgttaatttatatgttatttcacttcaaaaattgataaactgtgtgtgtgtacatatatgggtggtggctatatacatatagatattatatttctgggtggtttataaagagcagaaatgtgttgctcctagttctagaggctggtgagtccaaaagtcaccagcatgttaggtgtcttgtgagcccgcttcctcagtgacgttcatcttgttgatgattcctcacatggtggaggggaaagggagcgttctaggttctttttttttttttttttttttttttttttgagacagaatctcattctgtctcccaggctggagggcagtggcacgatcttggctcactgcaacctctgcctccgggtttcaagcaattctctgcctcagcctcccaagtagctgggattataggcacccaccaccacgcctggctaattttttgtatttttagtagaggtggggtttcaccattttggccaggctggtcttgaactcctgacctcgtgatccacccaccctggcctcccaaagtgctgggattacaggtgtgagccaccgcgcctggcctgtaggttctcttttacgaggcaactaattccaataatgagagctccatcctcgtgacctaatcacctcccaaaaagccccaaacccatctcctaatactatcactttgggagttaggatttcaacatatgaattttgggtggacacaaacattcattcaataacagtgactatactatcctatgttaacattttactattttcaaagcttttgttcactttgtatatatgcatttatttatctttgtagcaaatgaaggataaaaatatcttttggagtattatcttgacatactctccagctgctagggatgacctgtcagtattgaccccttgggctgaagcaattcgatcctctcaaaactcaaattgaagtgagaactatctcttctcctttatttcctttcaccagaaatagctatttcatgttttaaaacaactggaaggtaactgaaaactttcagtggtgttaaatcactgtcagaaaaaaaaaaaaaatctgtttgaaagttggaaacagctcaagtaaagccatttaatctgaccagcataagcagattctgaagaaaatggtgaagaatatcattagcagcaatgcacacagtcatttattcattcaacagatgaacatttgatgaacacttactggttcttggggactatactccatgcctaaaatacaaagatgaacgaagacccaattcttgctctcaagaaaatgatagtctgttaagaagaatttactggaagatagataagtataatactgaaaagtgtgaagaatgaaacaataagatgtgcaaagtacagtgctgtcacaaaagagagagaaataaaagctaactggacaggtcagaagaggcttcacatggcactgtcttgaagaatgcatagaaatattctacaaccagcaacttccaattcagttgaactatctccatgcttcctgttcaaccgagattacattttcaatcttgtttctaaaggaaggaaaaaaagatgagtcatttggtacaaaaaagcaagaacagctatagtctacactataagataaatgtagggtactctttaaatctagtggacgctgtccgtaccctttcagcgctcccattttgtctcatcatctaattgcgtgcacctgaagactttctctgatgggtttgccactgcggggaaggctagaagtgctggaatattgaagacccaagcagcattcttcaggttaataatagatgagaattggatgataaaaactctaaactttttacactcaaataggatgcatgaggcatgtctatttcatttgctagaagtctccagtggcattaagtcccagtcatccatagtcataacttgctcattaatgtactctgtgtgttcctttcttctctatctcacttctctacttcctgttgatgctttctgtgatctccatcacagatcttcctgtttctcacttcctgttgatgctttctgtgatctccatcataatcagctacatggactcaaatttgtcatttaagtctgatcttggggaatccaattttagacattgagcaatggactggctgggagggatgaaagaggagacaaaggggctcctatgttcctggttcaggaaacggatgaataacatcaccagttagtgaataggcactgcctttcagtacctacgggagtgctttgttcagtacatatcctgcccagccaagcactgaagaattcatgaattttattgtaacctaaactgcctgtggcattatgaacctgtgtaatcatgggtagtgttggctttataccaggattttgctagcttgttagcatctccatgtgcatttgcaagaccttggccactcttcagtgttttctactccaatttgcatcattgtccctgcaggatgtttatcactcagacattctgaaatttggactgatgcttgacttagctctgtgattggatgcttctcccagaacctttctcacctctatcagctacgctaatgataatctagacagaggtttccctccacgggtgctgcagctcaaactgtgccctagaccactgtcagtcaacctcttcaatgccactgtttggtgctttgcttggttctttcagtctgcatgaagtcgcagctactcaacttacatccatgaagcagcaaggggaaacttcccattctcagtgttttaatctgttctctgttataaaggaggcatagtagagttgctggaccccaaagagtgacttgtaataaaataattctttaaaatgtatacatagatcttgtatcccagggcacacatttgacatgaaaatggctgttttggttgtaagtgcaggtaacagccatcaaggtgtacttgggactcctcctccactccaaatcttaggcctcattattatttagtttatcctgtctgtatctgcaagatgatttttacgtgagaacactagacttaccccttgacactgtgctttttgcagctcctcatatttgatgggcatgaaagctaatatgttgtctaattatggagagttttaagttattaattttatttttatcaggagatccttaaccccctatacaaattagatctaaatagatactaaaagatgaagttaatatttaactcctttacccaccagatgtagctgaatctttgcattggacaagtgagaatcctacttactctgaatcttagatactttgctttgagtatgattcaatgtcactgttgctacagaagtataaatgatggttatttatgcttgcatgttttccagaaagttaaagactattttattatattggctttctgattacttgactgaagttcataaactaacaaataaaaatctaaaaacactctctggggacctagacaaactataatgattaaagcatatagttactttgaagccaagatgaggtaaaggggataacttaagacatatttattcttaggctgacatatcttgtcattattatgttacaggtgcacatggaccatttattttttctcttatgaagaatttcaaacatatacaaaataaaaaagtaacataatgcataccatacactgctcattagctctaaccattattatcattaccatctggtttcctctctacctacccacttcctattctctgttttgaggcaaatccccgaaagtatatcacttctactctaaacatttcagactgtattcccaagtaacccccccaccccacttcttttttttttttttttgagacagagtctcgctctgtcacccaggctggagtgcagtggcacgatcttggctcactgcaacctccgcctcccaggttcaaatgattctcctgcctcagcctcccgagtagctgctactacaggcatgcgccaccacacccggataatttttttgtatttttagtacagatgggatttcaccatgttggtcaggctggtcttgaactcctgacctcaaatgatccgcccaccttggcccctcaaagtgctgagattacaggcgtgagccaccgcacccagccccggaaaatatttgcttaatatcatcaaatacattttatatttcccaaattatcctataggactcctctcttctctctgttgtctctgtttcctccacaccctacatcctcctcctccctcatcctcgttctcactctcccttttcatttttgaagaaacaggaccttttgtctaggtttgttgattacatccacatgatattgtttaatgtgtttcaccagctcctgtggtgctgacaaattagcagctaagtctagagagctacttgtagtcagtttgattttgttctttttttactcaagatgattgtatagaaagtgttgtgtactttcaacaaaaggtatataacgtttgatattggcagccattgatgatcattgttttgattgattatttcattatgagttgcaaaacaatgatatactgtttttacttcttcatttgttaggaggagcagttctataaagagaactttttgttttgttttgattttttgtttttgagacagagtcttgctctgtcacccaggctggagtgcagtggcataatctcggctcactgcaacctctgcctcccaggttcaagcaattctcctgcctcagcctccctagtagctgggattacaggcgcacgccaccacgcccggctaatttttgtatttttagtagagatgggattctgccatgttggccaggctggtctcaaactcctgacctcaggtgatccacccacctttgctttccaaagtgctgggattacaggtgtgagtcactgagcccggcttataaagagaactctgcatttctatttggttgcctcatagtataattgatacaaagcaaagcagagtaaatgcttcagtttttcccccaaaagaacaattttcaaaataatgaattgcttctctagtctcttccaaaagttgccagtgaattttttttttttttttttttgagatggagtcttgctctgtcaccaggctggagtgcagcagcgtgatcttggctcacttgcaacctccacctctcaggttcaagggattctcctgcctcatcctcccgaatagctgggactacagacgcgcaccaccacgcccagctaatttttgtatttttagtagagacggggtttcaccatgatgttggccaggacggtctcgatctcttgacctcgtgatctgcccacctcagcctcccaaagtgctgggattacaggcgtgagccaccgcacccgaccaccagtgaatattttatttatttattatcatccagttgtttgttttggcatcactgcgaatgcatgaatttaaatatatttaaatgtaactgaggctctccaccttctgtattatgatctttattgtcctcatatttttcatctttatgcgatggaagcctcctttacattgacctcctgagtcctttctgtatgacctttatacactttggttgaccccaacttctcttgtagatcaccagtgggcattcctgaggtgtgggtataacatttatctctggattatttattcattcagaaactttacttagtaattaacatttactaggcgttaacaaggaagcagtaaagcagcaaacatgctcatttcaatatttggattaatacaatcaatcaaaacagtagttattgacaacttacttattgtgtggttagcacactcaaaatttatgcagagaaaaaagatgagagattagacctcctccttactgtaacacattttcaatctgaccagagattttgcttctgcaaatttggatgcctagcattggcatcatcaagactttcatagctatggaaccatcagatataaaatacaccttagtatgcaacctcaacgtgttcttcctcttgcaattgaggttatattaatttattaagttcattttgggataaagaagacagaatcatagttctttcagcctgttattataacactttattatcctttacctccttccaatttttgtgtctaataattcgtgtgcatgtgaactgtcttcacttttgagttttattatgaaactcaaactacaatacacatgtatgcataaatttctgtatatgtggcatgcgtgtatatgtgtgtatgtatgtgaatatataaatttcgttgaatagagtggtatgattgtctttggcctccttaattatatatattagcatatgttctagggctcctgacgcttcttgcaggcagaaggcatttccagaggttgtgtagatccatgaaggacagttatcgggtcacatctcacatcatcactgtttctttcttgcccctgtcttacactagtacccttcagggtattgtatgaaagcttcattggttcaaattcattttgtcctctagtgctactttctatgctgacaaaagcatagtgaaactgatgccctggcttgtactgcagtaatattgcctccaagcatatcaagtacaggaagttaaatcctatatattattaagccagatcagtaacatgtacccaacaatgtggtgagacatattttgttttaataaaacgatgatgttacaaattcttcaaccttcccatatgtgtggaggtgtgtgtgaatgtctgtattaatctaccccatgtctcctggatagagtttttctacaaagaaccaagctcagcttcccctagtgttaagacattttgcttcatgcttggtatagtgtagtgctactcaaacctgagtaataaacaggccagtttaaagaaataaaaagccctatgctcaaccaatgctgattaaaattatttttattaaaatttacctatagaagcacgaatataaaacaaagggcacactctttatggtgaaagggcatatagatctacaacaacaaatcatattttcaaatcaaataaaacagaagtacagaaaagcaatagaactcaaaagcataaccttaatgtgtctgccaatgttgtcttggatacattaaatggccttttataatgtgaatatagtactagctgcaatggtgcaagttattgtatttttagcatttttcaatatatgttgtgaagactattttactgcttttctctattcagatctttgcaaaaaaactcatgtatacactataatcatgttttttgccattttgtagtcctatgcttttgtgtcatcagccttccccagctagaaaagtataatattctattattgtatgctgttgtcattttcccacaatcaaaagtacaaattattaaggaaactgaagtttcggtctaaaatgtgttgttcagatgaaattatccataagaaattaaagttgtgttcttataactggaaaaagaacttaacgcaagtataatatgtgcaaaactgggatgacttagttcttgctatcattaagaggggacaaatggcaacgagacgagctttaacagctgagaaaatcttatgcctagatgtacataggcctggaaattacatagcagtaaaactgtaccttcaaatagctcaaaagcagctcataataactgcttgagattatctcagtgataaagtcagtataacatagtgttttttattttaaaaaggaaaaatgattactttctttacagtatgctaattaaaatatacaggtgattgaaaaaactattaataaaaatcagtaattttgttgagtgggattatgaatattaattatttaattaaaatttccttcaatagttaacaaagatttattgagtttctgagtcaagcattcttctaaaggctctgccttattagaatttttaaatgtatttgcaatgagtgtatattaaatgtaaaatgtatgattcaggtttaaaaaaaaatagcagtgagagtaattgaatgctgaggttaaatagaatgggtgaatcaaccataccataaaaaacttctaagtggatattatattccaggcactctttcctacttcagctgttgataaaatcaaatatttccttagagacccttgactaatgcaggaaataaatgaatacttgcctatatagacaaaataataacaacaaaagccagaaaccaagccataccaaaacgaaacaaaaacagaaaaactgtgatgacataacttatctttcaataggattttctcagaatgggaggcaatatatattttatgcttccatggtctgtagattccaacatttgtataattaacatatacaattttacaagggaaaaatactattcaacaaatacgtaaatacgttcaatgtaatcatgcagtacttcgtttaaattgaccttttttttttttttttttttttacaaatggtgcaataaaataatcatgtttaccttcttcacatgttcattgatgttggcgtgcacggttttatctatatgatgtgaccttttgagaccacatgacattcacaaactgaaactaaaccaactaaataaccagttatccaaagataagcaaaagtggacgtcagtttaattagtaaggggagattttaatcagtaatacactattataatagagaagagttcagcatgaactgaactgaactttgatttgtgtagaggtgactgggagttttaaagggagaatgagagaatgagtttgagtggtggctcattaaagtcagggaagtaacaaattacaaaaagtggaaaggtgggattgttccctgggaaacctctacgtttgctaaatggcacttaaggttaggctcctgccttctcactgtcttcgggttttgactggaacaaagggtaaattattttggcagctttgagttttctcagaaatgcaccttaagtggggctagagttatcctagagaggtggctttgacctgttagaagctatgttagtgttttttgttcaggtctgtgcaggccaaggttatggcctagctgagaagagggctcagaggagcctagctaaagtttggtcaaggggagcgtcttggtggagcctcactcctgttcaagtaaagaagacacattattcatccttctgaacagtgtaagtccatttgtcattcgattgccttttgtttactaaggactagctaaatcatcggttgagacttgctagtagagcatagttgctggatgatgcacgtgatcaggcatttaatgagaggcacctctatggaaacaaacataaaaacaaaaacttgttggagaagaatataaatcctatttgttgagtctagagggcaggcagttaagaagttttctagacattgaattctaagcatcttcagatggtagagtggtaatctgatggattttctggtttatggtttgaatgtggtgatggcataaacattaatttcacagtcatagttatttcctggaacagaacacggatgatgctggagttccagtggactttctgaatggctcttgtagcaggagctccaggcatgaaggttgcctatacgtgatttgttgtggtggtaagtcttttgaagtttatatcaagttcttgggcttcagtgtgcaaggctttttcaaatcctgggggagaaagacagctacaagacaaccttgtaggttgtcccagtagaatcagtaggttgtaggagtcccagtaaggatttgggcagtcagattttaattctcagtgatgtcaagtcaagagggaaggcaaaaaattataaacatcaatttggagagatgtagcccgatattgaaggaaaactaaacaattgagtatttagtaagagtggcaaaatgggtgagatggcagaattcagtttagtttacaggtaaatgataaaatcctcaagacaatgaacaaaattggaatctgataacccacagtggtgtgttttacataaaacacaacaaaaccggaattggatgagaagagtccctggatctagggtcatcagaatgtagctattaagagttggattctgaagccaaattcaaattaggtgccttgtactttgcgcactgaatgctctcaggcaaattatttaccttctttgtgcctcagtctattcatttacaaaaggaatcttaagagtatatatctcataggattgttttgaaaattaatgagtacgttacattcaactgtgtctgccacattgctgtgaagttattaccttcctaatatacttacaaacttcataattaagaaaaaataaaaattcataaaatgaacatatttgtaataacttattataaatattgtatagttcattaaatgtattacctttagacatattaaaaataacacacccctcatccccccccaaaaaattcctgtatgcctgttttaaagcagttctgcatgttaaagctgcatttatgatatctaagaagtgttttttctcctaaatagcaggttggtaataatgtatattgcaatcgtaataatgtaagttctggttacaatagtttatctgggtaacatgtagaagttaagtgaatgaggtaataaattaaccaataagattacctttctggtagggaggaaaaacacttctgggttgaattaatattttgtacacatatgaaaggaagaagaaaaataagaaataccatttgcaaagctgactttaataaattttaattgaatggataaacattttagttaaaggtagtaatcttaacttgagattacttgagataaaaatatatattttcttaagagacatgattgttagataacttagagatataataagtggaagggttttccattaaggtaactgatagtccttaggtaaattaaataatgggaggaacttgtgttaggaaatcaacatccgagttacagttaaattggtgggagtctttccagtgcctgaagatacagagattttcaatagaaataaggtttttctgagaaattaagtgaaataaaatgtgcaatagtgattgataagcactgtttattgaagaaacgatttatctttattcttgccctttgctttttaaaacttttattgcattttcttctatttttaatacactttgttattgaagcataacataaccatataccataaacacagatagctaccactcagatcaccacttggatcaagaattaggaacgaacatatttgattttaactgcagtctcttctctcttacgctgaaaatctatgtttctaatgacattagtataattgcttatatggtaattaccttactatatacatataatggttccaaaataacagttcttgaattatttttataaaacaaaattaacacaaagatttatagtgatttctgcatttattttattattatatgtttacagacattggctaatgcttctgatgatcaggcttctctcgattaactgaagatagccttactctgcagctgtgtatttcttattccatctggagcctatgccatcagacattatgtctgccatattttttcttctgtggaaaatcagttttctttctgaagtgcttatttttacctttggctgctgatgtagatctttcatttgttcttcatcttaggctgtgccctggctctaaaaagtgttctcactgtctctttgctttcatttttttcctttcctatccctacgcccttaaatcacaatatctgtcagagttccagaagaaagaataaatactcaaaggagtcatgactattataatagttgatagtgtttactttggcctagttgtttctagatttgtctcaagaagcaaacaaaccaaggattatatatataccatcttgaccacaaaccaagcctcagattcctctatacatatgtcttaagttaccaatacatgttaactgttataatatttctttgactatatgtatacaccatgtagatgtagactatgtatactttgcatcctgctgtttatcacatgcctggcacatattaggcactgaaatagttgcttaatacatcaaaataaaattgaatagggaaaatataatttcttaagttagcattcccctctctccacccaaaagtattaaataaaaaaacaagagtttacgatgactttaacattatgatagagatacaagaaaaacaaataagtatagtaattgaaatggtgcccagaacaccctctttgttgacactaaaagtaagttcatcagaccaaatctgtactgttcagctctggggaacataatttaaatgagacactgaaaaactggagcctgtctagaaagcaacttataattttagggacgtattagctgttttcaaatattcagctaatcagtggaaatgcaatgaagcatattcttattatgatgagaagaaaggaaagagagccctttgtccactaaatatttaaacaaacaaactttgtaacagtgagagatggccaaaaatataaaaagcttaatctggaagtagtgagttgtttttcactggggtgtgggcaggggcttcatgtctatttaaggaatgctgtgttcccatggaaaaccagcacaagacaaggatgccctctcttaccattcctatttaacatagtattagaagtcctgaccagggaaatcaggcaagagaaagaaataaagcgcctccaactaggaagagaggaagtcaaactatctctgtttgcagacaacatgatgctatatctagaaaaccccatggtctcagcccaaaagcttcttgtgctgataaacaacttcagcaaagtctcaggatacaaaaccaatgtgccaaaatcactagcattcctatacaccaacaacagagagaaatctgttccattgcatctgttgcatgcagtgcaacagggagaaatcagtaatgcaatcacattcacaactgccatagaaagaataaaatacctaggaatacagctaactagaggggtgaaagatctctacgtggagaactaccaaacactcctcaaagaaatcagagatgacagaaacaaatggaaaaacattccatgttcatggataggaagaatcaatatcattaaaatggccacactgctcaacgcaatttattagattcaatgctattcctattaaactaccattgagattcttcagagaactagaagaaactattttaaagttcatatggaaccaataaaagagcccaagtagccaaggcaatcctaagcaatttattagagtcaatgctattcctattaaactaccattgagattcttcagagaactagaagaaactatttcaaagttcacatggaaccaaaaaaaagagcccaagtagccaaggcaatactaagcaaaaagagaaaagctggatgcatcacattacctgacttcaaactatactacagggctacagtggccaaaacagcatgatactggtacaagaacagacacatggatcaatggaacaaaacagagaaccaagaaataagactgcacacctagcaaccatctgatcttcaacaaagctgacaaaaacaagcaatggggaaaggactacctattcaataagtggtgctgggataactggctagccacatgcagaagatagaaactggaccccttccttacaccatgtacaaagattaactcaagatagattaaagacttaaatataaaacctcaaactataaaaaccctggaagacaacccgggcaataccatttaggacataggaacagacaaaggtttcatgacaaagatgccaaaagcaattgcaacaaaagcaaaaattgaaaaatggcatctaattaaactaaatagtttctgcacagcaaaggaaactatcaacagagtgagcagacaaactacagaatggaagaaaatgtttgcaaactatgcatccgacaaaggtctaaaatccagcatttataaggaacttaaacaaatctatgagaaaaaaaaaccctactaaaaaagtgggcaaagggcatgaacagacacttctcaaaagaagacatacatgcggccaacaagcatatgaaaaaagctcaacatcactaatcattagagaaatgcaaatcaaaaccacaatgaaataccatctcacaccagtcaggacggctattaataaaaagtcaaaaaatagtagatgctagcacggttgtggggaaaaaggagcacgtatacattgttggtgggactgtacattagttcaaccattgtggaagacagtgtggcaattcctcaaagacctacagacagaaataccatcaacccagcaatatcattactgcatttatacccaaaggaatataaatcgttctattacaaaggcacatgcacacgtatgttcattgcagcactattcacaatagcaaagacgtggaatcaacctaaatgcccaccaatgatagactggataaagcaaatgtggtacatatacaccatggtatactgcgtagccataagaaagaatgagaccatgtactttgcaggaacatggatggagttggaggccattatccttagcaaactaatacagtaacagaaaatcaaatactgtgtcttctcacttgcaggtgggagctaaatgatgaaaacacatggacacttagaggggaataacatacattgggacctgttggagggtggagggtgggaggagggagaggattaaaaaaaaataactgatggttagtaggcttatatctggatgacaaaataatctgtacaacaaatccccatgacataagtttacctatataacacacatgcacatgtacccctgaacttaaaagttaaaaacaaagaaaagctgtggataggtttggtggacaaactaggaactggagaatatatgggaattttacaatagtctcactggagccttagtgggttttagtagtgtttcaagggccatgtgtagggtgagaagacagtggatgcccaccaccaccactaccaccatcagcattcctttagctgaatagctcactcttcatctgtttcatattgggcttctgggtcacattctatttaaagaaagagtttccactcgactctgaggtccttgaatccaaagtatctctcataggtccttggagcaatcgtattggaatttttaaaatgttgattgaatggcttgaggtgaaaggaacctgttgcacagaactagttctctgttatgagtccacaaaggtcttaaattcgataaacattgtttttactagtaagtgtcttagtatcttaaaattatagtaagcttgattcttttctatcatgttggcacagttcagttagcaaataataaaatgaaacaatgatgatatgtaggtagacatattaacatgcctttgtatggagcaaacaataagaagcagatgggacagtctgaggaacgcattaacaagagtttctgaagccaactgctgctgcacctgttaacctggaaggagattaatgcagtagaacagctactgtctttccatatttcttaccacaaaaagatgttttattacattcattgtaacctcttggtaacacattcagaatacaagcttcttcctagtttccgcacatgtctttctcatgatagcatactgtctttgaaaattccatctgctttgatgatttgggctattctatcaaggcaatataaaattgtttttcttaaactttattacaggtcattgagtttcatgatctatagtgaatatttctgtattgatttgttggtatttttattttctcttctcaagctccttgtaagtggggactagcaatgtattttttaattttccgaactatttaaaatctttgatgccaatgattcaacttaaattctggttatatacaccaatgataatattttgtatctagccgatatttaatatttatcatttttttaaagaatcattcactttcatcactatcatagagatgggacaaaaaatataaagactattttacgtatgtatgacttgcttggtaattatttgctgaatgaatgaaaaatacaaaaattgatagttttgctcttacccatcttgtatatctcttccagtgctcattttgcattatgtattagttcatctttgcctttattaagagtagaaaacgccatttcatcttttacatataaaaatgagtctggtctgatacagttactcacatcttcgcttaaatttcttttcttcttcttttttttttttttttttggtggagtcttgctctgtcacccaggctggagtgcagtgacgcgatctctgctcactacaacctccatctcctgggttcaagtgattctcctgcctcagcctcccgagtagctgggattacaggcatgcaccaagccacccaactattttttgtatttttagtagagacggggcttcaccatgttggccaggctggtcttgaactcctgacctcaagtgatctgcccgtcttggccttccaaaatgctgtgattacaggtgtgagccaccgcacccagcccagtgaaatttcaatttgaatttggaagctctactaaggtagtaatgtgaactttcaatattattagaaagctcatcaatctgaaatttaacataaggtaaagaaataaaaagcattaagaccttacttcatatgagagctagaatccatgacctgaaaaataaagtagataaattcacttataaaactataatttaaactcttaacttgtaaatttggggaaattagtggtgaatgggtttctaatatatggaacatgaagcagtaggaaatatgttatgagttgtgacagatattccacctcccacgagactgtgatttttagaatcgacgtgttataaaattgatctgaactttgtccctgatgctggaaaagtggcaacctgtgactgctctaaagtaagctaaaggagctgaacaaggctgggcacagtggctcaggcctgtaatcccagcactttgggaagcagaggcgggcggatcatgaggtcaggagttcaagaccagcctgaccaacgcggtgaaatcccatctgtactaaaaatacaaaaattagccgggtgcagtggtacatgcttgtaatcccagctactcggggagctgaggcgggagaatcgcttgaacccaggaggcagaggttgcagtgaaccgcgattgtgccactgcactccagcctgggcgacagagtgagactgagtctcaaaaaaaaaaaacaaacaaaaaaagaagctgaacaaatgctggcattcatacatggtttgagaaatagccctttttcatttaagggaaagacttactgagatccagattgagaaaacaccccatcaacaataaagtggctcaggaaaatgttttatactagcacatcttcaagtttctacttaaggctattctacatgaatatttaaaaagaggagatgtcaaatataaaagcacaagaggccccgagggcttagtatctttatttgcgttaaggtttctcataaataattctatttggggatataggctctggtatatatgtaataaatgtgagtctttttaatatcagagttacccttaggatagtaagtgtatttatttcaaagaaatataaaaataaaatgaataaaatatttcaggtacctcagatcattgcaaattagtcctcaagtctctttcagtttttcttggattatatgaataatgctttgggatagaggaaactcaccaaagtatatttctgaggactgggggtgggaaaggtttcagaaaggagaaacccatgggaagaatttttctactgactgtcaagtaattcatctcaacagaagaaaagctgattttcgatcagtttaaggtaatagaatatgtcagaattcctggggttttctttgttcaatagcccacttaacctgctgcagaacaccctaggaataacaaatgaatcataaggtagagggacattccagcacacttgttttcttcaaatattgatattttccccttaaaattatatgtctagaaaagcttttgctcggacagagtctgtagggccagaaatataaataactgtcaaatataaagctgaatcgcctccacaagattttaggaacttctgggctggggaaatgtggcctgaaggaaggctgctggtttggccactctctgtattccatcagaaaaaatggtggggtataatcagaagttgaaatgctcacagtagttttaccccatggcttgtcagctgaatattgcgacaatataggaattcttcatcgcagaaggaatgagcctccctggactgatgattttctcagtttatggtgtgtgtgacgtttttgtaaagtggcaaatagttgggggcatgagctagaaggtaactttaggaggttcaaccaaccaagtaccacctgcgaattggacaaaattcaatggacaaaagaaaacttaattgtcagcttactcccgccttttactcccgggacctagcttatagcacatggttcataaaagactctataaatgattactgaatgaatgaataagtgaaagtgcacaaatgaatgtatctctgagattttaagacacttttgtgttcatgcgtcttgcctacctgtctccggtccttctgaattcataaaaagaagaaagttcattttttctggaatgactgatcttaggaaataggaataagtaattctgatgggtagaaagtgcagtgtatgaagattcagaagggtaaggccaattaatttaaacactctgagtctatgttctaacctgtaaagaaggctgataatatttgccttctctgctatggtgttcccgaattgtgctttccaagaaatataccatcacacaatatatggccgtggtgaatacagtctccaatgtccttctccccctgcaatgtgccaacagagtgatctccctaagcatacagggtggtgcagtgtaaaggcacactggtttctgtttgaattccagctttgctacttactacctccataatgtgtagcaagatacttcatcactcacctgtaaaatgatgataaaatgatacttatttctatgagaattaaatagctgatacaagtaaagagcttaaaacagtatttggcctgttttaagtgctcaatagatcctagatgttgtcattgctgttactactgctgctgctgctactactactactactacatatttgtttttggaccctacttaatcccataggttgccacaactactgtctacataatgaaatctaacccccaagtataggatactggtttctaaaaatctagttcatggctatagttctagcttcattcaccaccgttctactagcaataccagtccatctgtatttcctccaatagaccactctatttttttttttttttttgcctctgcacctttacactggatgtttattttgcctttagtcacatatccacaaagagatgttctgggctccatatgatggagttgcatacagtgctgagcttttctttcagggacatattcagaaaggatgagtttttgattgttgtcaaatttgctgttatgctgattttttttagaactgtttgggcgactaatacaaattcatccaaagcttgttaagaatacattgtaatcatcagtatttttaaaaagcgattcttcattctttaccattgtgtttcccatcccaaggatttcttcagattaaaatattaaatgggacaggcaacactttgaatgtaaaggagaaatgggaaacactaacacaatggtggcatgataggggatgaaacacagaaagttggaaccaaaggggagcaccatcgttcatatttatgtgtaaggaaaagaacagaatgtccttgggtagtttactatttcttaataattctcctcacttttaggcaagcttgccagtttttttcagtggggatcacaaatgcctatctgtctgtctgtctgtctgtctgtctatctatctatctatctatctatctatctatctatctatctatctatctacctacctacctacctatctaatctatctatcatctaatatattatgtgtgcgtgtgtgtgtgtgtgtgtgtgtgtgtgtgtgtgtgtgtgtatgtaacgatttaattgaagcaatggtaagacattacaacttcaaaaatactgttttacttcacatacactttacctctaggtttcatagcaagacaatagatgggtgtagttttagtattatttacttttatttgttaattcaaggcactatagaaatacttaatctgtttaaaccccaaacatctctttaaaatattttatgtgacgagcaaacagaacatcatgatctaataaaaatgaaaatgtttttgatgttaaatgttgaggtaaaacttttgttcagttattataaaataatgacattttgagaacctcttatttttaattttatcgtctctaaaattgagacaatcacatcttggtatcgataatttttgatgcatgatgtaatatttaaaggactttaaaaatgtaaaatgctgcataaatattattgctctgcttaacagtgtttcaaatacatttttggaaaaatagcaaagtaagagataacatgtatctaaagttctcatcccttatcaactaaatattatgaaaaccttagcttctcttgcttctccagaatgacagattagcttcagcctaccttagactaggcatatggaattggcaaacgctctccttagcaactgcaaagttcaccgcagatgcatttaacagaaatagcacagatacaattaagcaggtagaaagaaagaatgagcatgtaaaacacctacaatattccagatttcctgctcacttaattggatgattcagatacctctctttcataatgtccaggtgaaagaaatgccggttcctcttatttctctacatcaaactaaagctccacttaccagagcaaacacaagtacaatctgttatgttttggactgtctaatccattctctgtagtttcacaagaatctggtgagcttacatggcatccagagaacagggtgatgagtaaagcccttaactctacattgtctaaagaacctgatttattcaaagaggaggcagctctctcacttcttattaacagagggtagagagtttctttcccaaggccaagaggggttttagctattaatacactttctctccctccgtccctggtgtgtgtgtgtgtgtgtgtgtgtgtgtgtgtgtgtctgtttctctcactgtcaattttgagtggggtttcaaggtttaaataaggtgacaagtctagtagaaaaatctctgaaagagctatttgtagaacattaactgactagttgtgtgactttgtacaaccagcttaaggattcagttttataacagataagtttagggaaataaattgcactgcacattgccttcggtctgttgtacctcaaatagcttaggaatctgttttctcctaaaacatcttcctggaagctgggtttccgctccaccccacctcccatgtgtttatgcattcctctgctcctccccttaactgagaatcctcattagaggcctgggtaaaatgtttcattgttagagttataatatatcaataatttacattaccttaattttgtaatttcccagggcattttgaaatgttatgataacatgaaaaatgtatgactttcctcaatgaaaagttaattaacaattgcttttattcttcaatgaacagctttatggctaaattattactagttttgtttttaattagatgactaaataatgcaaaattagaccatctttgtcctgacactgaattagaccattctttggcaactcgtgtacaaactattttcatttttaaaaaaatgtatgattctgagaacaagtaaatgcaattagaattgtctttcagagggaaagtggccccaaatgatgtcaagaagccagttttatgataaagatgtctatttttatgaaataaaagtaaggagaaaaaaagaattaatacaacttcactttgagattttatttttttaattcttgagttaggctgaaggccagatttgtaattgctcgtgtatgtgctttctaaaacttgcttaaggaaaactggatggattttctaaaaggcaattaaagatttgcagttgaaaaatcatcctccctcataagtattggtgtatacagtggtttccctgcatggaggatatgctggacaatatattgagaactgcagctccaggcaaaattaaactagtgttttttagagatactaggattagcttgtttactaatttgttaaagcagctgcgtttacgaaatacataagccttaagttttaatcttagaaacaccctttcccaaatattctaacaagctcaatggtcctctgcctttgctgatatttagaacatcacgagagtctttaaaacttacagatgcctaggtcccacctgggaagtttctaatttaattggtttaggtggcaacctagtcactgggctgtttaaaagctccccaggtgactataatgcacaggaaaggttgcaagccattgaacttgtaaacaatatagcagctcccatacaaaagcccgtaaattcaaagaaaatccagccatatgaacaagaaaaaaaatgtcaacgaagcagggacttcataaacatatgtttgcaacaacacatcattgaatatgattaatttgatatatctgttttgttataaaatgtctagaaaaaaatgtaatgtaacaaaaccagcaagcaatttaaaacaaataggaaaagatgattagtagatcatatgatataatttttagataatacaggaatcggacattgaatttacgttagatttttatagacagatatacagaaaaacactcagagtagacaacaggatgttagcagtggtgctgcttaatgaaaaaatgagttatctgtacttttcttaatagttattgttgtatctttttatggtaaacatacattgtttttgtaacaggagagaaaaagtagtgttctttccttgaaccaaaaaaaaagtaggccatttaaaaattaatgaataaggaaaatacacatgaaaacttctggaataagaacaaagctgtaatcaaagaaaattaatagccttaatttttttatatttgagattaaagggaaaataagagaactaaacatttgattctgtaagaaacctttaaaaagcagtacaagaaataacttcaaaaatactatattgagaaatgctttcaaacaactaagtatgaattatctgtttacaaaattccaaaccatgaaaatagtatttaaacctctatgttcatgttctaaagcccttataatcttgattatgagacttcaaaaaaatagcatacacattgaaaactatcaaccaatctcaggaatacagacgttcaaatcttataaaacatagcagatttagccaataagagaagaagttatcatgccaaattggatttatttcaggaaaacatatatgcctactataagagaatctatttacatccttcattgtaggtaaagatcagaaggaaaaaatatacaatactttttagttatgaaaaagtattgataaatgaaaagaatctgtccctaatttaggagtagaaacaaaacttttagcaatgtaagaatagatgatagtttataagcatgaaaaatattgtctatctcaaaacaagagccaactctgtgatcaatgttgaaatattgaaggtatcctcattaaaattagaaatataactagaatgactaccaaaactgctctttttaaatgctattttgcatattctagtcagtgaaagaagccaagtaaaagaaacaggaagtataagtattggggaaaaaagtcaaattattcatattaatagatgatattgtcaacttggtactaagtaaatcaacaatgacaactattataactaatgggaaaaattagtcccaaagctcattaagaaaagaaaaaacctagaaataattaaatattaattaaatgtaatttttctaaatgctaatttctcttttaacaacctattgaaaatcaaagctatcattttccacagaagttcaaaatgtgaaattactgtgaatttatttagcatgaaatttggtgatatacaagcctttactggaaaaataacagaatatttgcatccatggacagatataattttatatttcttggtgggaatattaatattttagacatataatttactacaaattaagctaaaatctgatagaaacacataaaatttaaattggggtggcaggaagacattggatgtgacaagaattactctaaagtttatctggcagcaatatagatgaggattaatagaaaatgttgaaaaccttaaatgaaaggtcatttgcccatgtagctattagagtgtttaataaaacttctactggctgggtgcggtgtctcacgcctgtaatcccagcactttgcgaggccgaggcgggtggatcacctgaggtcaggagttcgagaccagcctaaccaacatcgtgaaacccagcctctacttaaaaatacaaaaattagccgggcatgatggcaggcgcctgtaatcccagctactcgggaggctgcggcaggagaatcgcttgatccagggaggcagaggttgcagtgagctgagatttcgccactgcactccagcctgggcaacagagcaagactctgtataaaaaaaaaaaaaaaatctactaaaagtctatacaaacagattagtgaaacaaaagagaaaatcccaaaatatgctcaagtgtatataataaaaatggaatttcaaatcagtggatagagatggactatgaaagaaatggttttgataatcatgttaaaaggcaaaaccctgctttacacaatgcagtgaattaaatttcaccttgaacaaatattcaatcataattaagcttaagaagcccaaagaacaggaagaacgataggtgaatatttctacaatgaggcgatggtagagaactatgtagaaatgattttaaaaacccaaaatttaaaatggaaaacacatagataatttttaaaatctgtacattaaaaaccagtaaactgaaattgaatcttacaaatcaattcagaaaaataaatgcattgcctaattttaagcatacaggaagaaagtgttagacctggaggtcattattttaagtgaaatgaaccagacacagaaagtcaaatattgcatgttcacccataattgtgtgctaaaaaatgtgtacacatgtacacagagagtggaatgatagacaatggaaacttagtagggtgagggggttggagtggagtggataatgagaaattaatgtgtatgatatatttgggtgagggacgctctaaaagccctaacttgaccactacacaatctatgcatgtaacaaaattacacatgtaccccatatatttggacaaaaagaaaataaaacacatccaaaggtatatgaaaaaatgttcgatctcatttgtaaccaaataatgaaaataaaaataacttttccttgtatactttgtatgcttctgacagaagactgaatcaatttatttcatgagagcagtttgcaataccaatcaagagaaagcgtgcttacacttgactaagcaattgcatttccagggaaattatcgaagaaatgcttacatctatgtgcaaagactgagttgtacctatatttattgtttaattgttattacagtgaaaaatggaaacaacaccagtattcatcagtaggaggctactaaaaaatgatatatctctaaagaagggaaatttaaaataaaattttacaggtgattgcattgatattaaaggtaatccaaatacatacatgaaaaaataaagcagactgtaatacacagtatgtatacatataatgctgtattatgatcccgcttatatatgcatatatattaaaatataaatttttaacctctgggaaatgcattcctacctaattttaagtctctcattttttcttattggaattttaaaaagtgtacaatgcttattaatgaatataaatttgtttgaatcaatgttttcaatttttaatcaaattatctgtacatgattcaagtaatttttacttcataagttcttttatttaaatatgctgcattcctctctcatttctcactcctcagaggcagatatttgagtcattctctttttctaatgcgtgacaaatctgtaataacatgtttatatctctaattcttgattttctcattttttcatggtctacagtctctcttatgagagatgaaaaattatctcatttatatctaccccatgtatttgttctattaactaatttttcttttacatgaagaccttaaatgttaatttttttcttcaaaacagtgtcaaaagtatgtcttaacccttcacatgataaaatggggattttagtggtcctccatgtttcttcacttctcctactgaatttcttctcccaaattctgtaaagtctacttttaattttatgttgagttgcattccttctgtgttctctaactatgattaggtctcgtgttttgtcaaagatttattctaaaaattgaaaacatataaacagtatgtacactattattatagcaccataaatatatttcattgcagagtctattaccgtgttgggcttatatttcctttcctatgatttccatggcaatttacctctgctactttacagaaaatttcaagattcaagttaaaatggattctctttttttttctttttttgttttttgagacagagtctcactctgtcacccaggctggagtgcagtggtgccatctcggctcactgcagcctctgcctcctggattgaagcgattcttctgcctcagcctcccaactagctgggattataggcacacaccgccacacctggctaatttttgtatttttagtagagatggggtttcaccatgttggccaggctggtctcaaactcctgacctcaggtgatccacccgcctcggcctcccaaattgctgggattacaggcatgagccactgctccagccaaaatggattatcttttcttacactcagtaatctctcaaattcaaataacgacataggaaattcctaagtctattgagtctttatctaccaaatctccctctctttcactttctctgtctctcttatgtacacgtagacacgcacacactcccttctcaaaaggtaagagaataggatggtttgtaaaggggaaacgtctctggaaacacccacactttaataatgtcttaactaatcacattgcttgggtgtttttgttattttgtagtttgcggttttgtttgttttattttctgataacctgcagagtaggaaagaagagagtccagaaacttgttgtaaagctggacttcaagttggaagaaatattggaaggaccttttaaaaagagagttgtatgatatcgaagcagcctatttccctgaccccttcccgggactcgtgacagggttgcctcatttacctagaccagttttcaactccttatgggagggagcatgcaagtgaattccaggggtttggggtacgaatgatcctgtcacccaggtactgagtatagtacccaatagtcagtttttcaacccttatccccctccctccttccccttctagtaatccctagtgtctatcgttttcacctttatgtccatgagtacccaatatatagctcccacttacaagtgagaacatgtggtatttggcgttccgttgctgcatgaattcgcctaggataatggcctccatcacagctgcatctgtgttgctacgaaggacatgatttcattctgttttatggctgcatagtattccatggggtatatttagattttctttatccagtccaccaatgatgtgtatctaggttaattccatgtctttgctattgtgaatagtgctgtgatgaacacgtgaatgcatgtgtctttatgttaaaacaattttatttattttggatatatattcagtaatgggattgctggattgaatggtagttctgtcttaaattctttgggaaatctccaaactgccttccacagtggctgaactaatttacattcccaccaacagtgtataagcattcccttttctctgcggcttcaccagcatttgttgttttttgagtttttaataatggcctttctgactggtgtgcgatggtatctcattgtggttttgatttgcatttctctgacaattaatgttattcagcattttttcatatgcttgtaggctacttgtatgtcttcttttgagaggtgtctgttcatgccctttgcctgttttttgatggcgttgtattttgcttgttcagttttttaagttccttgtaaattctagatattgaacctttgtgtgatatgtagtttgtaatgattttctcctgttccgtaggttgtctgttactctgttgatagtttcttttgctgtgcagaagctttttagtttaattaggtctcgcttgtcaattttttggttttgctccaattgcttttgaggatttagtcataaatgctttcctaaccccaatgtccagaatgatgtttcttaggttttcttctacaattcttctagtttgaggtcttacatttaaatctttaatcatcttgggttaatttttatacatgtcgaaaattagggatccagtttcattcttccacatatggctagccagtccatttattgaacagggagtcctttcccattgcttatttttgtcaactttgttgaaaatcatatggctgcaggtgtgtggctttatttctgggttctctactttgttccattggtttatgtgtctgtttttgtgccagtaccatgctgtttttgtttttgtttttgctcttatttaaatgttataaaaattgcctatatttaagatgtataatgggatgttttgatgtgcatatacgcagtgaactgattactacagttaagctaattaacatatccatctcttcacatagttattttgtgtctgtggtaagaaaacttacaatttactctcagcaaatttcaagtatacaatacagtattactgactatagtccctatgctgtgcattagatctccagaacttattcattgtatgtaactgaaacgttataccatgctgattcggttgctgtagccttatagtatagtttgaagttgggtaatgtgctgcctctggctttgttctttttccttaggattacttttgggctcctttttggttctatatgaattttagtatagcttttttccagttctgtgaaaaatgatgttagtggtttgataggaataacatttaattcgtagattgctttgggtagtatggccattttaatgatattgattcttctaatccatgagtatggaaagtttttctatttgtttgtgtcatctgtgatttattttagtagtgttctgtaagtcttctcatagagatcattcacctcttttattttttatggctattataaatgggattgcatacttgatttggtgcttagcttgaaaattactggtatgtagaaatgttactgatttttgtatattgattttgtttcctgaaactttactgaagtcagtgctatttttagatggatatatgagaatatttaacttatatggagagtcatagaaattacacaatttgtatttcatacatcatccacacacatgctttctttacttaccagaatagtggaaatgctgcataaaatgaacttaatggtttttatttcctttcttcataaatgtacagtttatcaagaagatgccctttggcttactgacgtgtaaggagggactaaaaggaaaggaaaaagaataggtagctctaacttttcctttctgtctacatcatcattttttattgcaaggtggttggccaatataaggaaggaacaccactaagaaaagatattatgtggttttttggtcattagtgtttcttagaatgtcactcacttcttcctgcatatatatatctcaaatatatatatacacgtatatacacatatatatacatatatatctcaaatatatatacatatatatctcaaatatatatatatacacatatatatttagaagattatttggtgaatacactattagaacaaaaagaaagaagtattagcgaagtgacagggtatttcccaactcagatatatgatacctgctaatggactgttcgtgattataaatgtagtatatgctcattgtagacattatgaaaaacgtaaaatcccctataattagacctctatttgtgctaggcacatgatgacttttcttgctctgcaacaactattttttttctcttaaagtttataatgttgtcagtattgtcggatatcctcagggattccatcatcttttcttaattgtggttaattacttaaccaattattacaaattattttcctataatttattgctcttagtatcaaacaattaaacaccctaggaaatgtcttattacttgatctatgaactggtgagaatctatattctacataggggcttgttttctggttttaaatctaatacagtcgtttggcaaataaagacaaaaaataaatgttgtctacctacttttcaattatccaagtagtttaaaataaaaacatccttactgattttttaaactcttatataattgcctaattctacagtaactggggttggtagtaactaaaacctgttgtattcctagtgatgcccaatgagccttgggaaatgaataggtgggtatagtccagttgctagaaaatacttgcttgttactgacttatctgagaggaaataaacactttcatttatcagggacagagtataaagtgttcctcactgaagcatttctaaaagctctacagtcctttgaatactgataaggactctgaaatgcaagggaaaatatgcaagtaatctggactatcacaggttattttatgaactgctcatatttttactcctttgataagtattatttcccccaaccccaaacccgataaattcgataacccttttcatatataatattatcagcaaggcatcttagagtttcctttaaaaaatgtaaattaccaagagaaccagaatgattttggggctcataatggtagatcttaaagagagtggaaagatcagtagttttcgcattttgctacacattggtggagtgtttacaaacagtgatatctgcgttctatttccacagagtctgacttaagtggtctgtaatccgagcatctcagtttgaaaagtttcctagataattttaatgtgtatccaacgttgaaagccagagtaaaatgaaggaagttctggggcctcagataagcaacttcactacttttttcaggttctttgaataattgacatcatccccaaattcaaatcgttgatagtcatgatgagtacctgttttactccagaaatctatataatattggttacctcagtgcttgctcttaacttccataatcaaaggaggaagagagactcatcgtgttcagatacaggttgtgtaacgtgtgtctgtaaaatactaatgtgattgacttcatccatccattcacctatccatccatgcatccatccatgtatacctcgtgtacctccattcgtctactcatccaatgtctctgtctaggctccaggactgctgccttaaggttgtttaccaactcagtaggtagtatgttatcctcaggctttggaaacaggggggtttagttaaagagcaaaccaactcaacatactagattaacttgaaagggaaaagttatgcttagtgcataaattctttccctcttgtcctttcaaatccatttttcattctttaccactgtgctttgtgtcctggggactgccctttaggaatggcatcagagttcctttgccctacagtttccagttgagacaggctgcagcaggaggagtacagtggataagaaaagggtggagtatttattttcatgtggccccatgggatttccacaggttagctctgaacagctaacattagaccagagcttctgctggacagttctctcttgcatttctattgggtctggctctctagttcaggaaacgtccttcctcttaacccttgaggtctacagttaactctccgtcatcccttcttgaatttcctaacactgagcatatctctgttgataacccctttagcaaactggcctcacataccccgagattgagaaatcaatcctccagtttctaccgggactctgattgagttaatgtgggataatttgcttacactaccctcttataaagtgactatgtacattagcatattaactcctttgaggattttcatttacttttgttattaaagcattacacgttttttgataatgtgtaggagactcaatcatagccagaagtgtctcagacgcaagcacctgtaatgattcccttatatacagttttatcccaccagaaattgggactaggcacaagtgttctaggtaacatttcaggatcctactgtcataaagattattatggcacaaaaactatttggctagaagtatccccagactcctctgtgccacattatcttcctttatccagttatctgaggatgtgcttgcagtggcagactagcttttggggaaattttatttcaagaaaaaaagcagggaggaagaaaagggtaagaaatgaggaagggaagaggcccatgggctaggagtgggctgtcctgtttctgggaaactttgtgaaggtttcaggagtagtagtaactcatggtgaatgaaaatgagagggaattgttggcttttaaagtaataggatatgcccctttatgatgggattaagagatacaagtaagctgggcgcggtggctcacgcctgtaaatcccaacactttgggaggccgaggcaggcagatcacctgaggtcaggagttcgagaccagcctgaccaaagtggaaaaagcccatctctactaaaaatacaaaattagccaggcgtggtggtgcatgcctgtaaccccagctactccggagtctgaggcaggagaatctcttgaacccaggaggcggaggttgtggtgagctgagatggcgccattgcactccagcctgggcaacaagagcaaaactccgtctccagaaaaaaaaaaaagagatacaagtaaagttatgaaatcacctgtggtttctagacagttttttttgtgtgtgtgaaatattaagaacagaatacatgtgctaaaacattttaaaagcttaataaggtcttttaaatcttgcctcttccttttgctcgtctaatattacctcctatgtccacccccacggattatttacatttaatgctttctagtgaaatcattaaaatgagatttatggattattcataataggcaggatgaaaaaggaaggtgaggcgacagtgatccttccttagctgttaatggataaggagtttcacagcaagaggaaaaaggcataacattagtattaccggttgtctaagggggagagatagaattgtttttttttccttgcattttctgtactctactcttatttccaaatattctttaatgtttgtgtgactttgtgacttctatattcagcgcaaaaaggattaaagaattaatttaggaaatcaatttacactgagtgtctccagtgccagagagggagggaaggacattcgtagctacagtgttcataatagcaaataattgtattatggtcataccatggaatattatatagcagtataaataattaactatgatcacatgtaagaatatgagaaaatcataaaaacataatgtagaggtccacaaacattttcttaaagggccagatagtacatatttcaggcttctaggtcatattgcaaatacctaactatgttgttgtggcatcaaagcagccatagttattatatgagtgaataggtgtgagtgagtctaataaaacttcatttttaaaaactgtcagggaggccgggcgcggtggctcacgcctgtaatcccagcactttgggaggccgagatgggcggatcatgaggtcagcagatcgagaccatcctggctaacacggtgaaaccccgtctctactaaaaatacaagaaattagcggggcgtggtggcgggcgcctgtagtcccagctactcgggaggctgaggcaggagaatggcgtgaacccgggaggcggagcttgcagtgagccgagatcgcgccactgcgctccagcctggggaagtgcactcactccagagccggggagcccatgggcggtagtgtgctgacccttgtattagacaacactccagaaagctcaagcataggaacacctaatgaaaatattgttttggcatacatgcatgtgtgataaatcgaaaaaaccaacacaaaacaaatgagcaaacaaaagaaatcaaaggcaatgatatgacaatccccagattctggatggtagttaatcctgggtaaatggagggaggggtacaaaagagtgaagaactagtgtaggagcacataggttcaggtgtgagttgttgctaatatttcagttattgggatggacatatgtttgttttattattgagctttgtaatttacatatccattacatatattcttttatgcatcaaatatcacattacacaaagggaaatcataaaaattggggaaaaattggaggcaagcatagatcttggggcccagtgtagcatgcttttttctatttttaaatttaaaattgtttttagagatgcggtatttctctgtcacccaggcttgaacccctaggttcaagcaatcctcctgaatagctgggattacaggtgggtgccacttcacctggctaactaaaacaaaattcttttaaagatatggtctctctttgttgcccaggctgatctctaactcctggcctcaggtaaccctcccacctcagcctcccagggggattataggcacaagtcagtgtgcctcacttccttcaacattcttaaatacatcttggaagcacagtgtttattaccttgtttctaaaagagatgcatctattgtaatcatatttataatgttcttatatatggttttcattagttttactgaaactctcaacctattgttttttgatgatgactaccaatattcattgattcactgataatctttgtaatgtccttaactcttagggattagatgacattaaatctttatcaagaagtggattttgttacttaagtattttagtagcaacaaaattggtcacaacgacattccactgaagcagaatagtcagaaagcaatccaagccgcagaaataaattaggttgagcaagactacacctaatggcattgagataaagaccctactcctgactcactgccccgtgttctagtggtgtgcctgctctgcaattctccttaagttgatgtgcatctatctctttaggaccagggggtatttagtctgtaatggcttttccggcaacgtgtctcatttcagctgcttcagttgtcgagataacactctcgtcactgcctctctgatggtttcccattcaacagcagtcatttcatcttgggacacttttcctcacagtcaacagtttttcctttgtgtaattaagtctcatttttttctggatagatccatttgtgccagaactcttctgctgccttgaagcctgcaccattcagttatttttagtgttatctctttcctttcattagcacagagctaaattgtgcatattttgttctttcagctttatacagattaagatcttctagctccttagtcattcattttagctgttgcattgaatttcctacagttcatttaaatcacccagttcagtttaatatgcccagaataaataaagcatcattttttttcacatctaatcacctaccccgaccaatggcaagtgtaaggattataaacctttgtgactttgcctgtttactcccttagtaggtgagctctgagccaaaatataaattcattaaagtttttcttaatatctctagtctctacttctggctcccttccctcagggtattatcccctttacaaatatttttttgtgtctttaggtttccatttgttttttaaaaatacattcttatcaaaacgggaaaatattttcccatttctttcataaaccatgttttctcaatagttatctctaatcaaatacaagaaacagggaaataggtagtgccttacaaaggaattttagccatatacgtttggataaggtgaattttccatatcctggagatggttttgagtactcaggaggctacatctgaaaaaaaatatatagttattctctatctgggagtcaacttaattcttttgatggaaaaatagaggctgtgaatccccagctccagctggcagagatcactttgctcagaagttttgcacgtaaaaagaaacttcttttctgggatcactgatttatttcagctgtaccctgaaactggtagtcagatacaccctgtaaccagcagatctgatattctccagccttttcgggcttgtacatcaatcgtttaaactacactataatggggatcatttgccaaagctcattgccattctcttctagtcataccaatttataattacttttctctcaatatgtacccacgactctcctttcttcacccttatgatatttattcaaatattaaatgttgccctttttttctacctttattccaaatgccttagaggtctggcgtaaactatatggctataacctattgcatttttaccccatagatggaaaatgtattggtgaattgtttataaggttggaagttcccctgaaaataaaatccacccaccccactaggggagtacggaaactatatataatatgacacacatcgctattacttttattacatatgcttattatttattgttcaaattttcaaatatggtcctgcacacaggcaattttcacaaaagagcagtatcagtgttaatcagtttgaaacaggaaaggatttgtgaccccaccttacaaaatacaattccttatggttacaaaatctcattcaaatggattctattgtagccatatcaataaggaaactgatctatcagccaaaatcggaaatagccctgataaagtagactgagcttacattcatgcacagatgtttgctcattatttttacttgataaggacagatacgtttgtgtttagcataatgcgtgtgtgtatatttgaatagattttctagaccctcattttagttctagtaacaattgtctggttctgaatagggactttccactttacagaagcaggcaaaatttaatttgtcatagctaccactgaacccatttcctttatatactcaatctgctttgacacagtagatattggagtttcaaaccttaaaatgaaatacagctttatgatgaaatataagttgatatgaatactttcaatatacctatattctatgttacactcagttagctggcatttggtcttcactcatggacattttaaaaactcatacattctttagtgtttgataatgtgacaaatcaaccccctataaaattaactttaaatcaattgatacgttagcatgtgagtatatgtgtgtgactatgaatacatacttatataagcacacttatatgcttatacgtttgtttgaatctctcactgaccttagccataaaaacacttttattctgttgatttatacctcagcctacatgtgaacaaaagattcagcaaatcagaataacacagttactctattttctaatttatttgtaataaatatgcattacctgcataacgtttacatcaatatgggcatacattacttatgcaatgtaatgatctaaataacgcaactatcgacagtaaccacgcactctccccctagcaattacagaatacagtttctctgttgcacaacatgcctgactatcgtaaatttagggttatctccttattaggattccatttacactcttaatgaatcatatttattttatagcagcttattagtaaagttgactgccaagatataggcaatacatacaatttcctcaaaaactggggctttcactgttaatttaacaaacctatatgaatccatataatatatgaatcatatgaatatatataatatgtaataagataaaatgcataatttaacatatatgaaatatatatagtattaattgttaatatgtattaatatagtataaaataatatatataataaatgtataatatataatatatgaatcatataatagaaaaatatatgcatagacttgagttaggtgtaaagaatggaaaaattaaaaaatagtgcacttgatgagttcacaacctagtatagtgtgtcatagagaatgtagcattttgtgtatgcaatagtaaatatatataatgcaaaagaaatgaatggttttgcttagggtaggaggaatggggtaatatttgagataaatctcaaagcatgtaaagatttatcaaatgaagaattggggttatggaggagtaggggttgcattccaggagggagggaccaacatgtacaaaagcttaaaggaatgtaatttcatagtatctgggaaggacaatgggtagctatatgtttctgaaatcttgaatgcttgggtgaaataccaaaaatagggctagaaaagcaggttatgattagattgtgaaggcatttaaaagcgtcttgattagttgggaaataatttctacaacgttttagttgtataaataacaaaagcttcttttaatccagatacttagtggaagttcctctttctctaagtagaatactagacctaataataataataataataccgtatcatatatttttattacttttttggttttctgactactttcaagtacagagatggtccccgacatacagtagttcaacttaacaatttttcgactttaggatggtgcgaaagtgatactcatgctgtggaaaccatactttgaggacctatacaactattctggttttgactttcagtatagtatttaataaattacatgaaatattcaacattttattataaaataggctttgtgttttatgatttttttcccaactgtaggctaacgtaagtgttctaagcatgtttaagataggctaggctaacctatgatgtacagtctgttaggtgtatcaaatgcattttcaagtttcaaaatttccaaactatgatgggtatatcagcatgtaacttcattgtaagttgaaatgcccatcaaagatagactggataaagaaaatgtggcacatatacaccatggaatactgtgcagccataaaaaattatgagtttatgtcctttgcagggacatggatgaagctggaaaccatcattctcagcaaactaaaacaggaacagaaaaccaaataccacatgttctgtcttataagtgggagttgaacaacaagaacacatggacacagggaagggaacatcacacacctgggcctgtcagggggtggggggcaaagggagggatagcattaggagaaatacctaatgtagatgacgggttgatgggtgcagcagtccaccatagcacgtgcatacctatgtaacaaacctgcacgttctgcacatgtatcccagaacttaaaatataataataatataaaagaaaagtatctgtgcttgatgggttttgatatcctcagtaactatggccaattagttgaacatggcacagtattatccatttgcagtagaggaaacaaaggagaaaccagaggaacagtgagagagagagagagagagaaagctgctggtcatgtcctctttccagcatgtcaccctccatattcttcttcaaatcaaaaaacgtagaacggaagggagcttagtagcattcagctctgctacactgcacaccagctatacacacaggcaatcaatatggtttggacacagctgatataatttggtggagctctaattgaatttttccccttcttaatataattacacctacagaacgtctccaattaagtgtccccccatcagtctcaaaattaaatataccaaatggaactcattatctactcccacataaaccagctcttcatgactctttcccctttctattaagcaccactgcttccaggctcctatatctgaaatccctgaagtcgcttatttttgtattcctttctccatcccgaaatccattcagtcactgaatgctattgactaatgtttgaaattatatctatgcataccttcctttacgttatgggtaaatgtttttggaatgtgtttaaacagaacaaggaattggtgaacaaaagaataaagccatgcataaacaaatgtttattcaccgttttcattatatttgtttgtagtactgcaacctaaagtttgtaatgtctgagaatatctgattgtaagcaattaccccaaccccatgtaagttaacagtgttataactggtacgtctccttataggtgaatttgttcaaagttgcttaattatattttaaaaatctcttattttagaaagaactctcaattgctttactctgaataagataatactgtttagaagacaaatcattgcaagttttacatctgtaagtaggttacctgatgaaacggattgaaaaactgaaggcaaatattgaatgttagattattcccaggtatctgacttcatcttcttacttgctaggtgtcattgttaatgataatttaaaaaatcacacatacctacgtatccacatatacaaaacagtaagcagtcatgctattgaattcacaaatatacaccaaaagacaaggggaaaaatataaacaacagctttcttactagcaagcagagtgtggcgtgaggtcaaatttttatgacgaagagcatacatattcacaaagtaatttatctcaacttatgtagctggaaatggagttgatgggttctgaaaaaagcttctagatgacattaaaaaaaggggttcttatgacaaagaaaaaaattacctcaaagtagctttcaaagagatcgaataaagtcatttcatgaaatgcgagactaaaaaacatgccagcatttctaatatttctaatgttttatatgatataaatatgaaatataaaaatatttaatatttttatcatagaaaattaatggcatcaatttcttatcaaaatcatgcatacaattgattatatatatttgctaaagtcctaaaattttgtgtatacatgttggcctaaaatatttttgagggctcacaggcatattttcttttgggaaaatggaaactgcctaatacatgagatgatttatatacatgctgcattttacaagcggttagggaaacacatgtctattttttttctaaatcaaataatccgtgtgtgcaccatgctaccttgaatatcagattatcagatttaccatccctattagggatataaatgttccagaagaacataagagcaaatttttagaaagattaatacagaatctaaagattgaagggataagatgatttacattaaatctgtttccaggatatcctagttgggaaatcaacctaaatacccgaaaacttaaataatccaagacagtatgcatttgcttaacagactttttctccatcatttgtctgtgtttagtaagataaaagaaagacttgcggccgggcgtccgaggcagcgggtcacctgaggccgggagttcaagaccagcctgaccaacatggagaaacatcatctccactaaaaggcggaggttgtggtgagctgagatctggccatcatactccagcctgggcaacaagagtgaaattccatcaaaaaaaaaaaaaaaaaaaaaaaagaaagaaagaaggaaacttgctacccctcagtaaacaagttatatttccttcataactttcttcctataaggcaataaacaaatatttattaagaacctatcatgtgccaagtaaataagtactctgtcaaaacaagttagattcagagtgggctggaatgatttggacagaagggaatgtgagaaaggctagataagatggaaacttttctgccacaggcataccttcccagtagacgaagtagagatacaaataatgtagcgaagggtactatggaataaaaaagtcaataaatttatttatttagtgattacagctacgatttgctaagcaattaatatatgtcagacattaagccaagacctctgcagatgatgccatgtttagatcttataacaacctagtaaatgtgttaggatgatcaaatccattttattttatttaaattaaatagttaattttaatggatagaaaaaattgtttatctttatttcattcaacatgttgttttgaatatatatatatgaatggctcagtcaagctaattaacatatttattacctcacatgcttatttttttgtaggaagaacactttttttttttttttttggagatggagtcttgctccgtctcccaggcaggagtgcagtggcttgatctcggttcactgcaacttctgcctcacaggttcaagcgattctcctgcctcagcctcctgagtagctgggactacagcctcacgccgccacatcctgctaattttttgtgtgttttagtagagacggggtttcactatgttgcccaggctggtcaggaactcctgagctcaggcaatccgcccgcttccgcctcccaaagtactgggattacaggcgtgagccactgcacccagccaagtgaaaaacacttaaaatctactctcttagcaattttcaagagtataatacattgttatgaaccacctgtagaatcaacatgtacaatagatctctcgaacttatttctcctgtctaaatgaaattttgtattctttgatcaatatctctgcaagcctcacaccctcctcccagtctctggtaaccactattctactctctacttctatgagcccaactttttagataccacctataataagcgagatcatatgttatttggctttctgtgcctggcttattgcacttagcaaaacttcctccaggattatccatgttgtcacaaatggtagattttcttctttcatgtctgaattatattccattgtgtgtgtgtgtgaccacattttcattatccattcatttgttgatggacatttaggttgaatccataccttggctattgtgaacaatgctgcaatgaacacgggagtgcacatatcttttcaatataatgatttcatttctttgggatacatactcagtaatgggattgctggatccatactcaatttaaagatatagaaaacaagccataaatatttatgtcccccaatatccaaaagttaatcaatggccaaatcagcttaatttgtctgttttgtttttactatcaaacttaatacattcaccaatgctctttttcatagttgtagccttttcttgaagattataacgtttagtagtttagattgttatgtagacatgtggtgattaaagtaactcctgcaattaatttaactaattttagttatcatgtactacacttttacatactatttccctcaaaaatgttaaaaagcctttcttaaagcctttttagcagtgccttttatatttattcgtgttactgtttcatcaattgctttagtttggtgacagtttcatgtagttcatttactggattcaagttacagtccagttacttgaggggcccaaaagttaaggacttctgaaagtgcgtgaattgcttctactcactgatgcatcccaaacattcagatcttgttacctgaatcaggggttctattctttaaagttccttggaggatactatcagaatgaaaagactcaaaatagaagtcttccggaatacaatgttgtggttttaaacttaaaagtattgccagtacaacgttagtatctactgaggtggtcacactcattccagcaggtcacatactgagaactgcataggctttgtatggtaggccaaaataactttcagattgagtccatcaattatttttctaaaaaaaaaaaaaaaaaaaaaaaaaaaaacccagagtttttgaaaaacctacttagtcatttggaaaaatactatgacattgaaaatcatattcctggaatccctaaacattattaccaaaaccatcggccacagagctgtcttctactttttccccaaccccactaattccgagtgtatctgttcttaatattcaggttatacttaatattccatcttaatattttattttaaacacgttttatgctaaaaatttacacatatatttataatgttctttctttggggatatgaggattctactgctgacctactgctgaagtactaaaaaatagtacttcagtgtgtacagtaatagggttgagcaatttattcatgtcccagccaatttccaagtatccacacacatttcattggcaaagtattcatatccactcatcagagtttgtaatgtaaactgtttctaaagaatattttctcactctttcagaggagaaaatcagtgtattttaaaacataaagctaataaattccatcacacagaaattaacttcaatagggctgtggtttgaaatatgttgtaatccactgaaggaactcaggtaaaactagtaggttagctaatatttattttttatttttatctttaagggacaagatctctctctggcacccaggctgaagtgcagtggcatgatcatagctcactctaaccttgaattcctgggctcagatgattctcccacctgcacctcctgagtagctgggacaagtgcacaccacgccctgctaattttctttttatttttcgtggagacagggtcttgctatgtttcccaagctggtctagaactcctggcctcaagcaatcctcccgcctcagcctcccaaagtgctgggattacaagtgtgatccatcatgcctggtctagctaacatttttcttttttcttatttcataaaattgagactcactttgcatccatagacttatggaaacattttgaatccagatgccgtagccatttttttgtttgttttggtttgtttttcaatatcaatagaatcttttgtaagcaaaagaaagcaaggacttctttaataatttctgatttttatcgtggcatttcctcactctcctcatgccagcatagtccaaagttgctatttgctcaacattattcaggtacttaaatgtttaaacttgatagtttttaatgcatctataaatttaaacataattctggaaagcttcattttctataattaaaagtgataatctatcttattttaaatgtatttctgtcttgggtatcttttcctaattaaaatttaaactcttattttacaatgagacgttacctcatttatttttcattaaacaaataaaaccagacaatccctgaaaaacctatgaagaattatctttttaaaaatataacaaatccatgtgatgaaaactatctttttacatcaccactacacagaaagtttttcatttttttatgtaatcactattaataaaatcatccatgtaggacaataggcaattatcgttaacacctatagcaaagcatagataaagttgattttttgtttttgtttttgttttttttttaagatctcacttctgttgcccaggctggagtgaagtggtgcgatcttggctcactgcaacctctggctcccggggttaagcgattctcccacctcagcctaccgagtagctgggattacaggggtgtgccaccacacccatctaatttttgtatttttagtagagatggggtttcgctataatggccaggctggtctcgaactcctggcctcaagtgatccccctgccttggcctcccaaagtattgagattacaggtgtgagccactgcgccccaccctgacaaagatgattttactttatcttaacctcatcctcataatggggtttgataattacatttcatattttgatcacttaaaattatttttgttagtagcattagtattttgtacatgaggaaaaggtgctatgtaaccatcaaagtacagttctctttctaacggtaaaagtggttgtgcaaaatgtagcagttaatgtctataaataggagacatagaattctatgtttctctcaagaagaatttctgttaaaatataggaaaaatatatcaattcatatttggtatttatgtagattatgttatagtactcctattttacttttgtaatttaataagggaaaactttttaaaatattcattcagtgagtaactttattgagactctacaatacagtgtaagatttatataccaatactacaaccattttactgacagaaaaataaaaatctagaacagtttcagaaatgctgcctttttatgctgttctccccaaagcaggggtccccaaagcaggggtccccaaaccctgggccccagaccaatcggtccgtgacctgttagaaaccagggggaacagcaggaagtgagccccgggcaagcctgagctctgcctcctgtcagataagcagcagcattacattctcataggagcgagaaccctattgtgacctgcgcatgcgagggatctaggttgtgtgctccttatgagaatttaatgataaatgttgtaatgtgcttgaatcattcccaaaccatctccccagcccaagtctgtgaaaaaattgtcttccacgaaaccagtccctggtgctaaaaaggttggggaccacttccctaaagcttagggggtaggtctaaatattttctcaagactcctctaagtaaacacataaaagcataattttaatgaaagcacttgtatattactgcaaatgtgatacctgaacttttgtttgcttgctttcttgtttgttagcttttgagaatacaattgtttttattacttagagagtatacattgaaggaaattataagaattttcatacttgaaagggacaaaagaatatgcaataggaaacagtaaaaaaaaaaaaaaatcatgtcagggctttcaaacctatctgcagaattcctttcaagtttcagtcctttgggggagccttttagctctctgcaccctctccttctgcttatgtgtaagccttggtgatgcatttaccaaacccttcatatctgtaatcatgaggtagcttttctccttcattgtaaatttagggatagtagaaactgccttatttaacattgtatctcttatataaccttacatgtaccatacatacatagagtctatgggataaataaacgtttatacaaattaaacatgagatggatgaagagataaacggatggatggatgaatggatggatgggtgcatggataaataaataaatggttggatgaatatgcttataattatttctatgtaaaatatttttagtgttaatgacccccaaagtgctcttaaagctccaattacctagttaattgcacatagtacaaaattcatagaggtaaacaaaaaagaacgcataaagaaaattgtttctcctattatgttagctagcctcctagttatcctccttctctcttactgggggtgctggcattgcggttttctgtgtattctttcagatatctgctgtacatacatgcgcatagtcatacacatggccacgtatatcagttcaaatctgtcaggaaggtatgagaacatcaatttcctcataccataaaaaacgcagtatactaccaaacttttgatctttgccaatatgattggtgaaaaactatgaaactatgtcttttagtttgcacttatctactcaggaatgaggatgaacatattttcaaatatttaagagcaatttttgttactttttctctgaattctgttcgttttctttgcaagttataatattccttccaaaattgttttataaccagttgacagatgggaaccagtctctaggtggtatcagaaacagtgttatccagcatattcaaacctaccaacttattcgatttatcactatagctaattgtttgagtagttcatacatttatttacactatcaagaaaaacagtttcaacattcttgaccatatttaaaaatgccttttaggctacaaaggtagattgaagagagaagttccaaacagtaatgaaggcctctattccatcccagggaatttgcaaaggctctttcctggacaaacttgtgctattattttgcatgatggaataattttcatccttcaaatctgtttaattgcacatccaaaaaaacaccttctttgactatgaaatccagactagttctctctccttccctggactctctattttaggtactttctatctgaacatcttgtttatttcttcaataacacttattatattgggtgattatgttattttgtcatttatttgctattccctacaatagattggaagttccatgagagtagtttccttgcatgtcttgtttactgttttatcttcactgcttgatccatagtgtggcatgaagtaaacattcaacaaatatgtgcggaaggaataaatgaacatacacatctaatttctggtgtgtttatcaaaaattcaattgtatacttctggtagactgaatttaattcaattgagtttttcccatgtgtgataagaaggatagggaaagggacagatggaggatgagagggtaggagagaagaagagagaaagagatgggagggaggagaatgtagactctccaaggagcctaggctttttactgcatttatttattcacaatttactgcaaatgaatttcacagacacagaaactgcaagcttagacaccatcattgctctgagacaaatgcatccagagtgtatttgaagttcagatataattgatagataaatgtaaagctgggagaaatttattaaaaatgattggtaactcataactttcaaggaagtgaattgtttaaaaaatgtacataatacttgggttagatactgtgtttcttagttaaaatataataatatatgtatttcaatagatcatatatgccaggagacacctgggcgtattgactattacataatagtgattatctttatccatctagtgtttgattgaggacggaggttgatgtatcaaattaaattaattgagatctaagaatgacatcaataaacaaaatgttaagtttcaatcttcctttttgcatatgtactgctttaatctttcggctattgatcaccagttatgtttgcaaagatcacatttaggctttcctttacagagagatttaacttaccctttaaaccatgagtcagtgcttttagttttggggatttagtttccttaaagccctctgagggaaagaagggtatatatagttatatatctccagagaaattgaatatcaaagtctatataacatgtaatttatcaatgattattaactcctgcacttgcctgtgactgcctgtatttggtgatgaagaaaatatagaaaagtagatgattagaatagggaacctaggaaataggaattggaatgtagataatctacagaacaaatggtatcttcttttatttcaattgtcatttgaaaaactttctttgaagagtaaataaaatataacaaatcgggactgaattcagtagaatagactgaatactactaaaacataaaaaataaaagagctaaaaggtaactttaaggtgtagctttatgttcttacatttatggcatgagtgcaaggaaaggctcaacagttacatgcatccatttactttatagttgaatagtaaaaaataatgcagtgaaaagtaatacttcctagggatgttcttagacatgcaacctgatcaaaaaagtataaaacaggttggatagtatctctggaatctcccattaataccaacaatgccttttcatcaaccaacactatttgccatagtcttctcaattctatctggacttcctgattttgatcttttcaagccaatccttttacacactgctctcagacttagtcatctaaagggtctttgatgatctccattgtcttaagttagaagtcctaagcctggcctacaaggttctctattttttgtcattttcctattttgacttatttcctccactctttgactgtcctacttaaactttaaggcagtctccttagacctggaatgctgtttcccactttctcaacctaccaagcttttgaacgtcctttgggacccagacaaaatctgatctttgccgtgatacatttcattaattctctgaggtggaattagtctccctttcctttgattcttctgtagcacctgtaagaacctgtacaatagcaggtatcatattgcatggtaattattttccaaatgtccttctcctcattccaattatgtgtacttcaagggccaggacattgaatcattgtgtgtatcctatgctggaaatatattaagcttccatagagttctcatgtaaattattgtgaaacatttttaatgctatgaagaaagcattttaaatctgtttaagaatacatgttgaccgggtgcagtggctcatgcctgtaatgccagcactttgggaggccaaggcaggcagatcgcttgagcccaggagttcgagaccagcctggacaacatggtgaaacctcatctctgcaaaacccacaaaaattagctgtgtgtggtggtgggcacctgtaattccagctacttgggaggctgaggtgggaggtttcacttgaggcgggaggcagaggttgcagtgaactgagatcacaccactgcaccatctgggcgacagagtgcgaccttgtcacacacacgaaaaaataatacatgttgaaactttgggaaggttttgaagcaagttttgattaaataggacttagatttcaggagtcagttttatcttcaatgcactcaaatttttcagataataaaattatttaatatacagtcatactaataatatagacccttgcaatagataagttggtgtgtatgcgtatgtccaacagaggattcctacagtcacatatattttagccataaaataggaaatctaaataagcacctttgtcttagacttcagcacaataggtcgaaccttcatttgaatgtgactagggactgccaagtccctactgcctatctctaccaaaggctgatctggaagtgaacccttttctttctttttttttttttttctagcagatgaatgttattgagtttatctgtggtctagtgatgatacctgcagagcagcttcatttttcagagtcattcagaaagctatcataagcttcttccttcttgtcaggcagagcaaatcctggcatgacaggatgtactgggagtctccgatagtgggaactgacaaagatgtgccttcagcactcccacaaagccatattgtctttctggaaatgaggaggatttattcagcaaatctaagtgtaaactaggagacccatcagataaaatccatacaacaaagatcaccaaccattttttcttcttctgaatagagccagaagatgcaatttaccttcttctctttttttccccagaagtgacaatatagagttagagagaaattatagagcggagattttgaaattcagtttcctccccaactaccagttgaaaaagcatagccttaggaaatgttctcatttgatttcctatgttttataacatgttatgtttgtgaatttgtgtgtgatgtgtggtggtggtggttccaaaatatctaagatatatagtaaatgagcaaacaaaaatagtttgtagcttttgatatatcatagttgtacatattttcgtgttacatgttgtattagttcatttttacacagctataaagaactacctgagactgggtgatttataaagaaaagaggtttaattgactcaaagttccacatgactggggaggcctcaggacgctgacaatcttggcagaaggtgaaggggaggcaaggcacatcttacatggtggcaggagctgggggatgtgggggggggggaagtgccacacttttaaaccatcagatctcgtgagaactcactcactatcacaagaaaagtctgagggaaatctgctcccatgatccagtcatctcccaccaggtccctcccctgacacaaggagattactatttggcattagatttgggtggggacacagagccaaagtatatcacatgtaatattttaatcatgtatatactgtataaatgatcaaatcagagtaattgggatatccatcatctcaatccttcctttctttgtgatgggatcattataattattctcttctagctattttgaaatatacaatgaattattgtttattatactaccatatactagaaaaaatgctctttaaacctcatcagaacacttgctaaattgtctttctatatgcttatgacaacagtaaaaaacaaagatcacatgtccaatattactgggctgtgcttggaaaaaaatattttactcttttttaaactttagccaattatatcttcaatagatatcaacactaatatcacatctttaaaaagtttctatgggttttagtaaggtatataaaaccatcaaatatattatccagagagacaatatattgacatttaaaatatgttcttactcatttatggtatcacctactgtcagaggtaaagtaaatttaatgatgtctaaagggattacagttgcttaaattggctagagttttatatgatttatattttcattcttttctggacattggaatcaagtagtaaattttgaaattttatattatatttttacttatcctgtttacagtatcacacctgactcaatttagagtagaaaatatttctagttacccttcgtcagaatataaacatcttttcaaattcatttcagcattttaattgtgttaatagaaatagttcaaaaatatagcataaacctcagcatgttctattttggagagaaggaggacaatgattgttgactctgatggatagtttcccaatgtgaaaagagtaaatttttcttcataataatattttatttcatttcatatggtactctaaaataggcaaaatatacctttacctctcttctgaatactagaagtagaagtaaatgattttattattgacattattaattatactatatttatgttgatatgatgccttacagttcatcaatcattttcatatattttaattcatttggccctaatagctgtgaccacctcccagaatagcccagtcaaaagaggttgaaaagaaaaatcatacaaaatacccatgaagtttaagaatttatggcacttgaaatatttgcccttagacaatgttcttagtatttctgagcctcagtttttaatacatgaataagaatactttaagtattattcttccacataatgggaataagaatacttactccatgaaatgagaataagaagacttactttatgtagctactgagggagtcaagtgaggaacaattactaatgccatgacacagtgtagatgctcaatactcatcattcagtttccccttttgaacttaaggccagaaagaagtgacttcagtggtggtactaaggagagagggggtgatttagccttcgcttaacattcatcagacctcacaccaagccacaggaagcaaatatacaatctctgaaaatagggaaacctacattcaagacaaatcctgtgtgtacctcctccccttcctctcccagaaaagatggctatgtctgaatcacaaaatgtaagcggtcgcctaaaaattcagaaatcaggataaattatattttacctcattttaacaattaaaatcaatgcaaaataattcatatgagcaaaatattaaaattttaagagaatacaagatgtaatcttgcattcgtgccactcatgttctctggcctcatccttatctccacttaaccaccaactgaaggactagaaagttggcaatgacataaagcacagcttcctcatgccatcttcccatgtccccccaactttgggatagtaaacattgcctgaatttataatcctgtaatatttttaaatgttttatcagatacatatgtttcaacaatatttgttccagtttagtgtagcaggtaagactgtgggtttcagagcatttccacctggatttgaattctgtctacactaattactggatatctgaccttgggaatgttactgaagttctctgagcctcagttttctcatccaaaaaaaaaatggggacaataatagtaaatatgtcatagggctattgtgaacatatgtgagaacattaaaaatatttactgtatgacacaaaatgttttagtttgtttttatatttaaatgttattaaaaagatatttgggactcatattttcctcatgcatcatcccatccctagaatttatcttgattgttttgtgtagcagtcgtttctttgactactatgtaatcaggttaactgtccattttcctgccagagggcatttgggctgctcgaagatttttcgtttattgtgttattttgggcagtgctgctaggaacattctcctcatgtttccttttgcaaatgcctctctgtttttgatgttgcagatggattttaccttgccatggcatgaaatccaaaggctgtacccacagattccgatatttatctcttgcttgtccacacctagtaataaactttagccaaagcaaactgttgcttgttactatgagcctaaagtcgctgtgctggtccctcctgaatccttttctatgagtcgcttagtactcttgctctcaagctctggtctgtaccgagctgacagctttttttatttctaggactttattgctgttttaaagtctttccactctgaatctgtacctattcaccccagagttagttgcatttctctgtgtctctaacctgagggtcatgagtctgactttgctcagtgaaggcaaatattttcttcctctgcagtctgtgttcattttgataatgatgcttgatggggggactaagcatccccctgagaggaaagaatctcgtttggattgtaatttgtcacagtttgtcttagtttggatttctttaaaagctaagcctgaggcgaggactagagagcaactagctcatttggtagctgatcacagggagcacaagtgggaggcaggggaagtaaggaaaaacgggggaaaacaatagtgagtgtattattcagctggctactgcagtgggaaactgttgttcaatcctgtgaagacccctctgaggaatgctgtagaatgtactcataattgtccctctgaagaataagaggctggggaatatgtctctggttcctgtgcctcattaattatttctcagggacatcaggtcccctcctgtgtgttggatgagtgagtttctataactttggacaaagtcgtgaggctgaaacacagagaagcagtgggtgcttgacctggtgggctgttagcatgcccgagactctccattacagggctgatcaagccagaggtaaaccaacagagtgggcagtgtctgctacacagttccaactggatttcccaattacctagtgctatggtcttctttgacaacgtgtctcaagaaggtaacctgtagctctagcccactgctactgaatgtttcatacctggtatcatgtggattataactgtagtatttcatttttcaggtattgtagtatcgaaaagccctatagcctgttttccttagtataaattttgattaaattatgcaagtccactttaaattcacagtttgatgttatgtacttaggaggcactcaataaatagttcttaaagcaataatttttaaatgactttttgtattatgtagacacatattaactataatagagcccttcggcaggaaaactgtttcttcaaagttgcaaagtgactgacaacgatatatataactagaagcttcaagaaaaatgttaccaggggccacttttaaactagggggaaaatcgtttttcacaataagctatcccatctcctccctactgaagcctctgatctgctatgattattaaaccctcatcttttagtgcaagaaacccagcaagctgaaagggaaatgcttttcagatttaaaaaacaaaaacaaaaacaaaaataaacttaatttcttttaggttgatgttgttatactaacttgccaatcagttaaacatgtatctgtcttttaaaaatatcttattacataagaacaaaagattttaagacatacagtttcaatcataaccaaatgtgtttattacttcgaattttccacagtaacttgaagccatctatgtacccatctccaattccatcgcttccccactaccaccagagataacggtggtcgtgaaatttgctttgttttatagtcttgctacatatatatgtattactaaaagagaaatagtcttgctctgcatgcttttgaacttcgtatagttggaatcatattgcatttattcttctgtgactgtttctttcaatcagcattatgttgctaagattcatccatgtctgtgactgcagcattatgtcatattccgtcatagaaataacccacaatttatttatgcatactactgttgatggatactagggtcgtttccagttttaattcttttcctattacaaacaaggttccttgtatacatgtaggagtgggattgctgggtcacagggcccatgtatgtgccctctggtatactctttggctcctttacactgctctactgtgtaccactgggagactgacctttgtagactgtgtgtgccaggcttccatttccaggtgacttccagctctctttggctgatggtgaaggattggaaactcagggaagacacaagagtgcttctcttcctctctttgtgtttcaggcagtatctttggcaacagctgcatatgctttgatgtcccccctccaaccagataggcccactatagctgcagcttccaatgaatgatctcataacctcattcactgaattcatgcaccctgccttcttctttcctcctcctccccattccttctcctcttcctcctccccatcctcctccttctctctctctctctctctctctctctccccttctctcccactcttcttctctcctctcccttcctctccctgtactttaagggtaatagtggcttcctgtggttgctaaactctgagtcactttgtcctccacagcttgtcaactctgttcttctctcatttgtttcaattctataatttaagctttctgatttaaatatcaaatgactttttgtgtctgcttagattctgactgacatgatgtatttctaagtttccaagattatgccaaattatttttaaaattggttacaccaatttaaattctcacgaacttaaaaattctgcttgctcccaaattctaacacttgacaatgtcaaacttaacttttggctactctgttgagtataaaattgtttctagctgtggatttactttgaattgcattaatgaaaaatgagtttgggcattttttcatggttccattggcaagttttaaatgcagacaattgtttagaatacattatttttatttaataaaactcattattaaatgtatattcctttaaggctgtactttgatttagtgtaagtagtacacaatttacctcagttttccgttttatgtattcactcatttaatttagcagatatgaattaagttctacaatatactatacagagtttaatgtgaaagtaagaaatcagaacatgttatggctaggataacttgggagcacagccttttgaaactggtttagtgttaggatacacatttttgtgtttacctctctttcccaccgccagtttcaccatcattcataagatcaatgactgtggtacattacaaatataatgtgaaattgtttacaagatttagtattgttcaatcattttgcaggcactatcatggaccttcagtgtcaataaaggattcagaggttccagaaaattctaggctatatcatgccttgagaagtcctatctaataaatatatagaccacttttagagtgtaaaggaattcgtaaaatgtgtcagcttaaaatattgaaatagcgagggtgacttttcctttccaaactgttgatgaagactgcagacagggataaacattagctctgtgtggacaggatagtgtctgttgtctgagattctggtcatactggtttaatacccataattgaaagagctctaagacatggctttgtggagaaagaaagatactacttgagagaaagcaagttcatatttccttttactaataagtgttcagattcctaaaatactgtaacagtaaaaagatattttgaaactttctaagaaagtgtgttctagggcggggcgcggtggctcactcctgtaatcccagcactttggggggccgaggcaggcggatcacgaggtcaggatttcgagaccagcctggccaacatagtgaaaccccgtctctactaaaaatgcacacacagaaaaattagccaggcatggcggcgggcacctggaatcccagctactcaggaggctgaggcaggagaatcgcttggcaggagaattgggaggcggaggttgcagtgagcccagatcacaccattgcactccagcccgggtgacagtgtgagactctatctaaaaaaaataaaagaaaaagaaattgcattctaggggtgaacatccacatgtacctgggatcaatccttccacagtcatatcttcacatcataattctaaccctaaatcatcaagaaaatattatgttagacataccatacataagaagggaaagagagctgtcctacataatcattttcatgtaaacctttcatccagaagttgaggtgttctgtcatccaaaggagtagctctcagctgtctggaaaacctttttgttcagaaggacatttgttgtgctttggtttaccttgggttttattgtgccgcgtgtgtgtgtgtgcaattctcattctattaaattattgtgtgattttgatacatttatgtcagggattagaaattttagaaatagattatttctggttttctgatcaatgtgtcctgtctatgtattttgtctttgtgcaaaggaataagactaaaacacaagttatatgcctgagtctacaactgagtgttgtaaaccaaaattccaaatgaaagaaagatatggggtggatggcaggattagagaattgaaagagtgaagaacaaaaggcttgcagacatcagtaaaatatgctttcttagttaaaaatagtaagaatgttttggaatattttacattaatttcgtttcccactttttctttacttttgcacaattaatgatttagtttttgagtttcaaatatttggccaagcttatctactgattgaattcaatttcttactggatgtgtgtactgcttttttgttgcattcatggcataaattttgtggacgcatttctacaaaaaccgtggattcagcatgttgcagagtactatggcaagaaaactgagtaacagactaagctgagacttggtagaaaatatctgttctcctacaaggcttgactctctactgttacttcaagaaaatattatgttaactatatgtgttatacttaagaaggcagaaggatactcactcctctgacgtggcgagatactcctcattacccccacggaaatactatctagattgtgaactcatccatagaatgactacatatgattcattttgtgatttccctaatatgtattgagtttaaactacattgaattccctggagtttgactagaaggttgattatccagtagagtttcttgtaagaaattcttatagcagtgaactattctttatggcagataaatcctacctgtgtatactgattttctttcttagtaccatagttatactcaggttactttttttttttttttttttttttgctcatatagacaagactacataatcctttttagaaagggccaatatcctatttggaataaaaacaaaacagttagatggtaccagggtcaccttaaattaacttatcagactatcaaccaaatcgaaatatgatttcagatgtaattaacccatttgcctagtgagatgcaaaggtgtgaggatttcttgaacacatctttctcttatgtagcaaatatcaacctcctgataccttttgtagtcagttcacataccatgacaatacatcctaaattttcaggtgtgatctaaccagcataggttcacataattggcatgacacggaatttttaaaatatcaactacctcaggaactttattcatgtgaatctggaagatcctttttggtatttgagccctttcatagattcagatgtcaaagtatttttagaatgggtctgtaaggcatcattattttgtaattataatcttattgattgacagcaaatgctgtgttccatgaaaatgttgcattgaagtgatcccggttagtgctaaagacagactgcttagatctaaagtctcatgagaagaaagaaagaacttaaaatcattttaaattcaccaatatgacgatacaggatctctcataaaatgctgaaaggttgtttttgctgccagacttttagcacttccgttttacgttcaaatgttgtaaaggttgattactcataagttaaaatgtttggtgcaaaatgtactttaaaaatattttcagtgttttttggaaattgtagacatttgattttgaaaagtaggccagaaatttggaagactacaagccatatgatggctgatatttcccatggaaaatataatatgcagctgtgctctgctgcatggtagaacaggagattaaaatatgagaaattataataccgtttgatgatgatattaatgtcactgaatcaaataaagtatgtgatatatcataagttaatagaacaacacttaattattgattagagcctacatcacattttaaattatcggcatgtttggtcttgcaaagggtcaagggtgactcgtagcaacagaactattctcctttcaaaaagttagcagaaagttaatatcaaattctatgaggtagagagggatttgggctgaggtaggtcaggaggaacgtaaagagatgtgtcatgtgtagatttgtgagctgtgggcacctgattttgtgtttaacagtatttacgaccaagataagtgaatgaagagctatgttcttatgaaccttaagtttattttgctaaaataagtaagaaaattcaaattcaaattaagctatatagtcttgcaaatttcaggtctctgaggggtgtgcattaataagtattcaaaagtattttgtcatttaattactattatatgaatttttatgtaattgaattattcttgaatgttgagaaactgtctttactaggctaaaaattcccttagtgatctcgttacccaattcctttgtgttccactctcagtgtctgaattgtcaccaatatgtggagtccaaattatgaaatacaaagctttaccagaattctgatgattttgaaggaagaaaattacagcaaattttgatcaattctctcctattagtgattaattcaatgaaccgcttgaatttcttatttcctcgtagaactgtatgtacatgaaggatagatacaatatttagtacaatctatagtgagatatgaagggaaggagattatgagaaaagaataaaactttattataaaaatgcttgttcataaagatttgacacaaaatcaatatgataagttttcagaaaatcaaacaatgaatttcgtatgaaacctcacattggcaaagcagttatgtgaataccaatattttttaaatctaaaacaaagcattttgaagtagtttcatgaataatgtactgaacctgtttcacgcaatgaaatgaacatcacagtgagaaaattattccacaattgtaaagttaagtgaagcttgcattataaggccaataatactcaatagggtattttctcatgaatttacactatagaatgtttttattctggaatttggatgatatcatagtcattcaacaaatacagagactaagtgatttttaaaatctttcaggaaattagttctttaatttcatctacatgtatgtaaaataaccaaacctatgtcttatgcatataatgtcattctaatatattgttcatgatcataatatttatatagaatccattttgcttggccgattgatttggcttggcctacaaattagtacagtccctctcaactttgacacttctgtgtaccatcagctccttcctggagtactgaaatagcatcctaactgctctctctcatgtagtcttgaccccatctataaatcctaatttcagcatttggagcaaccttttagaaagatcaattaaatcatctcacctcttcattaaaacgcctctcattctaccaagagtaaattccaaaccttttaaccttgacctacataactggaccatgcctccctcgcccatttcaattcagctttgctcttgtagctccaggcaagctagctctgtcttagttcttgcatgtaataagctttcaagtccctcggtgtctacttatttactgttccctctgtattagtccattctggcattgctgtaaagaaatacctgacactggataatttataaagaaaagacgtttagttggttcacggttctgcaggctgttcaggaagcatagcagcttctgcttctggggcggcctcaggaagcttctaatcatggcagaaggcagacggggagcgaggtgactcagacggtgggagcaagggcaagagagacagcaagtggggaggtgctgcacacttttaaacaaccagatctcgtgagagcccactatcgcgagaacagcatcaaggggatggtgctacaccattaatgagaaacaccgtgatccaatcacctgccaccaggccccacctctaacattagggattacaattcaacatgagatttcgtggggacatgaatttaaaccatatcactatctgactggaatgtgctttgctcctgcttctacttccgttttctgagcaatcagacagttattcattaactcattcattcattcactcactcatttgttcatttatgtattaaattattcagtgattctcaactctgggtggttttgccgtccaggggttatttcaccatgtccggagagattcctagtggcataactaaaagaagagatgtttgctactggtgtctagtgggtagagaccagggatgttgctaaacatgtaataatgttcaggtcaacccaccataataaagaatcatcttgtgcaaaatctcagtagcaccaagattgagaatctctgcaatacgtcaacaacccttctaggtgccaggaatatgacagtgaaccaaatgaatatggtctaaactttcacaaactaatccattaaggagaagatagtcaataagctggctaacaaacaattaaatgtatactttcaaattatgttgggtgctctcatggacaaggggacaagagagtggccagtgaaacctaatttagagcaggtggtgttgggggaggtggtgtttatgctaagacccaaagaatgaaagaaagactcagccccaacttatatatatagtaaacatttattgaatatcaatagcaaaaagttgcatttttctcaaccatgtctttttatggtaactggaaattgttcaaattattttttagaatcttttaatcatagattctttgctaaggggattagtctagcatttttctcttgtgagcaattaagttctcaccaagttagtgaatcctatgtcttatgtacttcctacttattactatgaaattatctaaaaaatgctcatagggttcctaatgtagttgaaaagcaaactgttgctgcatctctaatcagtaacaaaacttgtatttctgtcgcaaaataatgtaaaattttatagtactttttacatatttatttaaaacaattttaagtaagattgtttctttgtggaaggtcatatggtcccaatatagggatgtgtacagaaatacatatatacatacaacaacacaatgttaaacctagcaaaagagtggagtctctttcttttatttttcttactttttgagcaacgagacaagcaacatattatgcctagtcacttgaatcatacaccattaaaacattatgggctgagtgcagtggctcatgcctgtaatcccagcactttggaaggccaaggcaggtggattacctgaggtcaggagttcaagaccagcctggccaacatggtgaaaccctgtctctaccaaaaatacaaaaattagccgggcgtgtggtggtggatgcctgtaatcccagctacttgggaggctgaggcaggagaattgcttgagcccgggaggcggaggttgcagtgagcagagatccgccattgcactccagcctgggtgacagagcgagactccatctccaaaaaaagaaaagaaaatatgaaaagaaccatttttaatgtcaactactgctttgatgctaatgtctgtcagttcagtgtctatgacttaccctttattctgctcaaaaccttcttgaattttccatttgaatatcccacaggctcttgaccccacttatccaaaattaaacctatcttcctctctactacacctcttcttataatctttctcttgctatttctaaacatttagtgggccaaataaataccctaggagacatgacttgaaaggggtatgaagtttagataatgttcggcttcttgatctgatactggttaaatgggtgcattacatttgtgaaaacttattgagtcacttatgacttacagattttctctatatattttatattttaagaaaaaagattacatataaattctagaagccaagctacacctttccctcttattcatccagcacatttactgagacagctagattttcataatgactgtccattgttgaatatttgctatatctttgatattgttatccattattaacttccttacctggtttgacagttgaaaatttctgtggtgcagctattattatttccatttcacatatgagcaaaaagagacttagagtggttaagtaacttgtctaagttcacacaacaacaaagtggcaggagtagagtttgaattcgagtcaatatttataatcactatgatatcttgcttctcgtgttccagtcgcattaaaactatgaatgccactcccactccttatccatccttactacctggcttcactttagatcttcaggtcttctttcctatattataatgataatatcataagaaatccagtgcagtttagtctattccaaaatcagtctaaatactgccaggattagtgttcattccacaatataaatctgattgtgtagtttacttaaaatccattaacacagccgttagcaaccttagctacatgtgaaaatcaccaggctccacccaagataaattaaatcagaatctctgggtatgagggactgggagtgagcattttaagaaagctccctgggtaactgtaatgctcagctaggcttggaaaccaatgctttaacgtttccctacagcttttattataaaaataaacccctcagcattgcacaaaatgccctttgtaatttggtttttgccttcctctacctcgcctcctctgctgtaattcccttcttctcccactttttccccaccctacctacatacatttcattgcaattattcaaaagtctttgtttcttctgaagagttatgatttttataccatacccttacacataccagtcttcccctctaaatgcttagttacattatctttgtacttaatccttttagttgctgataataaatgaaaatttctttttagtttctttttttttttttttttttttgagactgagtctcactctgtcgcccaggctgggctgcaacctgggctgcaacctccgcctcccgggttcaagggattctcttgcctcagcctcctgagtagctgggactacaggcatgagccaccaagcccagctaatttttgtatttttagtagagatggggtttcatcatgttggccaggctggtctcaaactcctgacctcgggtgatccacccgccttggcctcccaaagtgctgggattacaggtgtgaaccaccgcacctggccaaatttctttatagtttcttgacttgtttttaatttagaaaatttcccacgtatatagacaccatacaatttataatgtaaagctgttttcctatatcaatcatgttttaccttttttctctttctcctatatatgctgcttcctggaagatctaggagctgacaagtgtctttttatcttgctttgcaaatctaatcttttgccatttctttttatagaaatgaaagcttgtatcatgcatactaaagatggcttcttctttgggctgtagggccatttaatgagttatattgaactgaatgctttataagagttcaaattagtacattgggatactcctatgccagggatggattaatatatctgtccacatatatacacaaaaatgtgtgttgctaatttccaaattagagaatacttattttgaattatcagtatctatgacatattttgcatgtggtatatatttggttaattaaactgagttaccacttgttttatcaaaatttggtgtctttctaaatatatcatgaatatttttcttctaatgcacctcgctttctgctggaactatagaaacactttgtaaatttttacttgtgaccactcgaacatttacaggacattttacctgaaaattttttctgagtcagtgaagaaaatgtccatgtttctgcgtgtgtgtgtgtgtgtgtgtgtgtgtgtgtgtgtgtgtttgtgtgtgtgtgatgcttgcttatgaggaatttattttggctatggttctttattttgctattgcactcttaacattcgtatgatatgtattattaccctataaatacttacacaatatattcttacaaaaattaatacaaagattggccaaaatgtaatagcatatgtttttgtaaatagaatatccatatacagtcataataaaactgaagagcgattttatacttttccataaagccaaagattaagggtgtaatcactgcttataatttactaggaaactataaaacagataaaagtagatgaaaggatattacaaatatctcaataagtcgtcctccgcaactgaccccttgctttacacatgttcagacactctatactaaactctgtttatttttctattttataattttctatatgatcgtaattcagcgttttcctataatattattagtagtgctaccaacagatattacattttatgaaaaattttaaaaagggcacatgttgcataaaactaggttttgaaacagctgcttataatgctgatatttagcacatgactaggtggaatatggactttttaatgaatattttttcaaagttaggtaatttctcatcagtcagtttcaaaagcaaagttaaaatttgtgtttcaaaaaactgggtatgtttgaaaattgtatttaataatggattttgagagttctcaatagcaaattgcttggctgactgtagtttaagaagtaataattttgaagagaagttgaatgcaggtactttcaaagtgttgaaatttttaaagaagaaaattaaccttttcagactgtacacttgttcatcttttatattcttttccctttaaaaaagaattgtagtaagaagggagattaccttctgtcattgatacaaattttccacagtataaatgctgtttatcacatttgtataatatacacttcctatcaattttaaaaattacatgttactactatttaactctgacttaattattttaaatataaaataattcattcttttataaataatcaaaactatagttttacttttctttcaaaatataccactgactacattacagattagattttttttagtataccaaacatattttcatcttttggagttattggaagagtagctgcttactgccttacattttagatttctctatataacaagcattttcatcattttggcttattcgagtaattcttaataaataataatacaatatttacaaatgagatgtcatttgcaattttaacacttcataattttaacaaaatatctttactttgagttttttactttccttttggtgtgacattttgacctccaatgtgatcttcatttaaaggaaatatcaacgaaaattccttttttttcatttgctatagatgtacatataagatttacatgtgtaaggaatatagagcaataatgaattgagctattcctcataatcacttcacttaagaaatagggggctgggtgtggtggcttgtgcttgtaatcccagagttttgggaggctgaggtggtaggattgcttgtgtccaggagtttgagtccagcctaaccaacatatcaagacattaagtctatgaaaaaattaaaaaattatctgggcatagtggcatgcacctatagtcctagctactcaggaggctgaggcagttgaatggcttgagcccagaaattcaaggttagactgagagctatgatagtgccactaaacttcagcctgggaaacagagtgagggcccttctcttaaagaaaaattgactagaatatgactaatactctagaagccctcctccacatgccacccttcccaaatgcaccactattctctcttcccaattttcatttttgtatttattattcctattcataccaacacaattttaccagatgtgtatgtattttcagcaaatatttttagtttattatgcacttaattgacactatggaagaacagcttttaagatattattccaacttagggaattttaaggaaataagacctttgtatataaaaagttaaataggaataccgatttgcttttgattagtgttaaatcacataagtttaaatttgtaggagatcatagagatcagaaagcccagtggttcacaaactttcttttttttatcaacaaaacctcttttaaaaatatatagcataaggaagacggaaccataaaactgaaattacagcagctcaactgaattgtgagtttcaactgaactcaatttcaaacccacaaataagtcaaactcttactttactgagaatatatttggaccacacagagtttaaaaaacatgtttaaatttatttagcttatttataccagaaccaatataagaatccataacattctgcattagaattaagtacaaacactttttctttctttctttttctttttctttcttttttttttttttttgagacggagtcttgctctgttgtccaggctggagtgcagtgacgcgatctcggctcactgcaacctctgcctcccaggttcaagtgattcttctgcctcagcctcctgagtagctgggactacaggcacgtgccaccacgaccagctaatttttgtatttttagtagcgacggggtttcaccatgttggtcaggatggtctcgatctcttgatctcgtgatccgcccgcctcagcctcccaaagtgctgtgattgcaggcgtgagccaccgcacccggccgtagaattaagtacaaacactttctatgatattatactaaattaaaaacaggaactcaaaatgatacaaactgaactgaaataaaataaaataatacagtgaatggagtccacaattaaaatacctgcaaggacctgaaagggaatggaaataggtgaagcaaagatctaaatgcatacggacattgtgtaaattggaaagaatactggcaaatggcacgcctgtgcccagtctaaaatgggcaactgctaatcaattcagtctagcagtgtccatgtcagaatgtagagctatttttggccatatattttatttttcaagaggaacttaagaatctggagttgtatgtaaaacatcccagtgcactatatatttgcctcataagttgagcacttttttttatgtgtgcatgttgtctactggtgaatcccaagcacttggaacagtgcctgatatatagtaggcagtgatgtatatttggtgggtaactggaaaaaggttttccaattaaaaattctgtgcaagcctgaggtaggagttgggcaggacttatttcccattcccagaggataaagtgaagaaactggcaggtaccagcaggcagcgaccaacggaagtgagaaaaacagcagaaaccagcagatggcaacaaaagtgatccccagcagccctcattgcatattagcagaagccactcccaccagcaccatgacagtttacaaaggacatggcaataacccagaagttaccacccctttcctagaaagttctaaataacctgtctctcaatttgcattaatctgccacttaatttacatgtaattgaaagtgggtataaatggatataaatacagtagccagcagcccataccctgccaactttggaggcactgcctatgagttgtccctatttcacaaagcgcagtaatgttcactaaaacatagctgtttaacgccactggctcgcccttgaattctttcctaggcaaagccaagaatcctcccaggccaagccctgattttggggcttaacctgtcctgtatcaaactagccaaatgtatctcaggcctgaattagatcaatggctaccagttcaaatcttttgttttagatattagagaggcaggaagtgactctctactgtgtagcatgatactcagagcccaggaacttcttcagaatcccagtttgacttccaaaacgccagtgtcttgcttttatttactcttgtgggtggcagtaagggaagggagcatatctccttagcaaaacatctcatcagaacacggtccatagcacaaattattaattaaagacttacgtggaggctcaaatatagagccaaagcataaccatttaacaattatccttcaaagcaattttattcttggcttttggtggaaaaaactcttaaaaataaaatgataattctacatatgggatttgtgatgctatttagcaaggatatgctttattgcctgacatcccctttattttggcagaatactatgagattctcattacgtttccatttgctgcggaaagtggagaaaagttcagagggggaagactaattaaaaaaatggttgtctactaatccattgaactaaggcttcttaacagtcatgctcttcttaatagtatgaacacacattttgtattgattgcagagaataaagaaaaagaaatgacttgttttgaacttcaaaatggaaaaaatgaatacaaaatccagataagcctttgggcataccaactttttcgacttgtattatataacaacagttggcaaatgatttcaagttgctaaagcatagaaaatgatatttatttgatgaaagctaataaatcagacagaacaattaatggataatttggattgaacaagtatgaaagattccaccaataagaaccctcctacctaaaactatgaggtttttaaatgaaagactctcctaatgtcatagattttctctacctgtgctttatctgaaaataaaaatcacagcttttcccttcacctcttcattctctactcctccttatatttcccctttccttcttccttccttctccttcctttactctttgttctttttattcctgtttgttctgattacctgtgatgttttctaaaaacattaaaattttggtcaccattaatattttttacaatgaattaagaaatttatctcagaaactggatttgaaccaaagccttgttttgaacttctaataagtagactgaggaacaagcacgattttaagggcatatttaataggcaaaataaaaaaaacgcataaaatgcccagtcgttgatgaaaaaaatatatttttgtaattgctgttattcaggtgcttgaaggcccatgttaaagtatcactggagaagataaaaagcatacttcctcaatgtgaaaaccctcaaaagaaagggctataaacactttgtcctgaatatttgttgtttcaattgctgacgtttaacttttcatctgacagcaattcaagttctgcgtaccacagtgttgttgaatctttgaatctgaaaaatattttccttgcagctgtgataataatgtatctcctgataatgcatttaatgtggcaaagacacttttcttaaacacagtgaaaactaagtgttcattttgtcattgtaaaatgagacatgtttagttgctccaaattttaacttgggtaaccttgagacatagttgcacatttaacatcctatattttgcttgtcttgcagtcaagtgaattatcttagttactggagtgttacgtgacaccaattgttttgttaccactgctttaaaaatagctctatccctagaccccatcagtagtgtgtcttttagggccccgatttttttctaatctataggttagccctcaaggcaacgtggcctctttctgtttacttctcattattcctgtaattccaattctacatgtgactctttgctttattttaaaacagttgtgcattgctgatgagccttgaagtcaccaggggtggctggtgtcaatagtgagtctgtacatggctatttttatccataaagcagtttactttctgtatgatgaaaggcgttaaagtaaaacctgcctcctattataccctaggggtgtaatcaagagggatttgatcatagcataccaattaagcaggctacagcagactgctctgggttgtactaaggagtagggtgttctccacagatttttgaaccctttattgcaaaagcatcagggcacagcacatctaattcttttcatcgcacagctgtgtacataaacctctgtatacagtttctgctcagaggctgtgctcttagatttaatttttcttataagtcattacagccgtgatcattcatttaaacctcggcaagataagcattactagttcccagtaaactagatgatctcttcctctagactgtattttctcttatgaacaattataagattacaagactagcaatgttgcttatttacactacactacacacacacacacacacacacacacacacacgttcattccaagccagcagccagctcagcatccttgaaagctctcaacctcagccgaatatataaatatcagaattctctctaccaccctcaattagaaaatgttccagttctgcttttaaacttccactccaattcttcttgctaaggcctggaagcctcaaggtttcttgtattgccttatatacacctggattattcctctctgttgaaaactatgtcccattggaatgggagtgtctgaccagctggtgcccaagaatgctctcagaaaacgatcttccacaagccagagccaaaacccaaacccttgacccttatcaaccttgacgcccaaaactccaggtgtggattagcacagtaacccgcaaacccactcctacacgaaggaagatttttctagaacaactacagctctccttttatatttttgggtaattcagttatgatgaactgaaccagaagtataaagtatttgctcagttcagttcttaatctttgtcatggtattacaatactaaaccacttgctttgtcactttcatatagctcataaaagaaaatattactgtataaaatagattctgtagtccttcacttgttgttatggactgactattcgtgtttgccccaaattcatatgctgaagccctaacccccaatgggacgatatttggagatggaacctttgggaattaattagggtaagataagcacatgcaggtggggctctgatccggtggcccgtgtaaagaaaacaccagagagcttgctcttgctttgccatgtgaggacacaggagaaggttgttgtttacatatcaggaggagagccctctccagaacttgaacacgctggaacactgacctcggacttaaagcctccagaactgtgagaaaataaatttctgttgtttaagctgcccagtctatggtatcttgttacagcaggctgaaatgagtaagacacttgtattgtccctgcggttgacatctgactctgtaaaaacacccatgcatacacacacgtacacacaaaacaacaacataaccagtaagataggtaatcaagtatatggtaaatgcacctgattgcaataatgtgcgcatacccttagaatgaccctgtactgcagacacacctgaatgtgttttccgagctacggaatctgggagtagcccagcaagagagcccttccttgtctatgaggaacatctgagccccaagtgcatcccgtggaacacgggccatacatacagcggattgaggccccgagttttgggttggatgaaggttgccaggtgaacgtcattaagggcagagggttaagtaaaaatgctatataaactgcatgctgcccgcaagcagcgttggtttgcccgctcatcccaccgccgccatcactaccactgtgctgcgaggctatcttgtccagtctgccaccactggatcgtttctacaggtaaggcacttctcctgtccagcccaccactactgaattccctcccctgtatgtaaacctctaataaaacccaatgcctcgtttgctggctatgggtttcttcctcagtctcttgaacctgatgccttcgctattgagggttataggggttcagtacaacatcatgatgtgaacaaacgcgtttatttgggcagatgtattggtcagctctcaaaacaataatatcaagtaataatcattacctccaacttaatggttttaaatagcattaattctcatggtcatgcggggtttggctgacctaagttgatctagatttggttctgcatcaggctggtagttgctaggcttggctttcagcggcaggtttggtttggatttctttgatgtgtcacgtccagaggcacacactggaatggcaccggccacccagtgcatgttttcataggttgtcactagatagcaagcccaaacatgccagcccatctcaaggctctgctcctgtcatgttttcttaacaccccgttgaccaaaggctatcacatttcccaccataggctagatatgccatcctattaagtaggaatgagaaagtggggaccaataaatcaacctacagtaggaaaagtaggggattatttagtagcacaaacagatgagtttcagtgggcttgctgcttttttgtggatatggaagaaatacctaaaaaaaaaaatttccagctccactacaatatttaagaaaaaacttaggtgtgttcatagtttactactttgcttaataaccccactgtttatcacagcaaatttaatcacctctgaggggttttaatggctttgataagacaaagagtaaattactgaggaggaagacggtcactttcacatcctgagagatgctaactgtgcaaggtaattcacatatatcttgtaaacatgtttgcaaacatatataggagataggtggtattctcattttttaaggaaagaaatggaagacatgagagaatgagtaatatgtttaagaggacacagctggaaactggtataatctggctctaaatacgggcttttgtgttacattgaacagagataaattcagcttatgttaaggaagcatggggtaaaaaggtcaagaaactgaacaactgaataaccaaataagtaggcgaaaccatttggttactcagttgtctgaccaaccgaataatcaaaacaaaaatgtcacattagaaaactacgatcagtgtaattttatgaataattgaactattgagaccatagtgtagcagctgatctatcacgtcatgggattccatcattcattctcatgaattaactactctcagtccttgcttttagcattacctctactccctaatgatacatgatttttactctaacataaacttcccaggagaaaatgtctgataaatatcataaaatcatgaaaatatctgataaagtcatcatcctgcatcatgtgtgggagacttaagtttgtaactcttcccattcctttaagttggttttcagccttgcttacacgatcattgtggccagagagacagaatgtgccaagcgtgtaggcctgagctgggaaacaatgtcaataagtaatacagtataggggatgagaagtttgccaaataatacttggtgtgtaatgttatgaaagaaagggggcattagaggccgggtggctcacgcctgtaatcccagcacttcgggaggctgaggcgggtggatcacgaggtctaagagatcaagaccatcctggccaacatggtgaaaccccgtctctactacaaatacaaaaaaaaattagccgggtgtggtggcaggtgcctgtaatcccagctatttgggaggccgaggcatgacaatcgcttgaacccaggaggcagaggttgcagtgagccgagatcgcaccgttgcgctccagcctgggcaaaaagagtagaactctgtctcaaagaaacaaaaaacaaaaaacgaaaacaaacaaaacaacatggcgtggggggcatcagaaacacacaatggtacagatttaaaagctcctcgggtgatgctaatgtgtagccagggctgaaaacctaaaagaagaatgtgcagtaatgttgccagtactggaaggaagtgtctgagttttgtctagtgactgacagaaggctatgaaactgtaacagttgtaaggggttgagggaaagccgaggccagatcatgtggatcatgtgcaaattgtaggtaaaatgtaaagctgtgagttctgtggcctcactgaggaagcatttctctgcttttcaggaagtaacttggagttgagtgctctatgatttccaagttgtcagctaacacattgaataactgatgaattatggttctgtggccttcatttctgtgtcacgtggctatactgttcattggcatatgcaggcagtaacccccaaactatgacgcgagaggatggcaggattccaggtctgaagagaaaaaatgattaggctggggaagaatgatttgaggaacctcaaatcagactatggcagcaactactaggtgtagggcttcatgccatccagccttggagttgtcagttttctattaatctttgctaacaataaaatactaatgggtacataatgtagtgatttacagatgatagactctccttatgttttcattttgtctcaacagagtccagcatatttcatccaaattttactgatcagagaattgaggtacagacagaccatgaaggtcatgacagttggaaagtgttggagtagaataaggaagcctgatttttctcatttgtcctacatcgctttattagattgtcttctccagccttacctccccgccttataattcttgattttcatgaaacctattaaagggaaagaaaaggaaaactagaaaatttaatttagatcacttttaaaaatcactttgcatcttggactgttgtcataagttataggattaaatcctaatgattctaatgttgttaggccatcttaatttatatgatccacttacctctcagtcttctctcactggctcactcacctgccctctgtatatgaggggattgagaaaagtctgtttttcattatgtgtagatacacagactggtgtgtatgtagcaggaataaatgttcgcaaaactcagatgtggaagaagtaactctgaatttttgccctatttttgaactgtactccaggccagtgctgtccaaaagaaatataagctatatatgtaatttaaactttttgagtagccactttaaaaagtgaaaataaacaggtgacattaatgttttatttagctaaaatatttcaacatgtaatcaaaaaagacttaatgagacattttacgttagtgaaaagaatgtactaaatcattaaggttggaggatattttacatttacagcacatctgaattcagttgccatattttcatgggttaaagtaaacttgttctcccaaaccaatgaagttatggttaatggaagaatattaaaaactgtttgttttcaatataaataaaattgaagcaaaaataaagcaaaatgaaaatttggcttcctcagttatgctagtcccatttcaaatgttcagtagccacatataactagtggctatcttactggacaacataaccccagatcatgataaaacgttctgatttcccgaatttcttttttttagacaatctgggatgtttcgccttcttaccaaagaaacaaaaaggtgctggtactttttgtttgcttgtttttcagcagttgccattgaaatgtgtttcttttggagttggataggaaaaacctagattcttcctccaaggtgtagtctcaactgtgccccaggcatcactgtttatgatggattaagggtgtggcttttcccagataatgagtccccctcccccaccccccacaggccttaatatctacagctcctgtcaatagactggcctttccttccccgcgaaaagtttgagtcctttaagaatctaggtctaaggttaatttcaacgaaaggtttattttctctttctgcgaggacctatggaactacccagaacatataaagcagtccacaaggctcttcaacagcttcgtaaccgggcactgctagttcagaaactcactgacttctgaatgtccatttcacatttgcaggctgcttctctgagtcctgagctcttgtctcaagatgacttggctcttaattgttgtctgatttattaccggtttgctttgcagtttaggtgctggacaatgattcttagaaatccccacataaggatctacatgcagtggcagtgaatctcaataactgccttttcttgaatctgaacttaatttatatataaagcctactttccggtagatcctgcatatttcatctcagccaatttaggactgagatgccccccctttctctggggttttgtcttaaatttctggaggggacctgattgtcacgcccctccgagtgaagagaccaccaaacaggctttgtgtgagcaacaaggctgtttatttcacctgggtgcaggtgggctgagtctgaaaaaggagtcagccaagggtggtgggattatcattagttcttacaggttttgggataggcggtggagttaggagcgatgttttgcgagcagggggtggatctcacaaagtacattctcaagggtggggagaatgacaaagaaccttcttaagggtgggggagattacaaagtacattgatcagttagggtggggcagaaacaaatcacaatggtggaatgtcatcagttaaggctattttcactcttttgtggatcttcagttgcttcaggccatctggatgtataagggcaggtcacaggggatatgatggcttagctcagagtcctgacactgatacagtgccaggatttgaaggcgggtgtggcttacctgatttcatgtacaattcatcccatagggaccttgttccttggcctcaagttgtaggccctttcatatctctgtacggtcaagaaacatggtggttcccttgtcattcttcatcctccaaaaacccattgagcactgtgtttgctggaggcatgtgggaaattattctactgtaccctatatcctgctgaagtgcctgggtactgggtggctagctcatgtccatttgctaagacacatgctcacgattcttgcctgggtctgacataactttggagtcttgttgcattcctgggctggactctggaatgggacccaattacttctgcacctggatacccccaaccttctctgttgtggtggcggttctttcaccatcccctcctctcaggaacacactcttgtttctactttacattctccatccagtccaggaaaatagtatctaggctcagagacggagaaaatagtgtctatatttcacatttttttccaaaaaaaaaaattataattttccgtgcctggacttgagaatttgaaaactccaaaatcctccaggttcaaccacattgttcccaattacaggattttcttattaaagttgaatagtgttccattgtgtgtatattccacatttttgaatccgttcatctgttgatggttacttaggttgattccatatcttgtctaatgtgaatactgccacaataaacacgggtgtgcagatatctacttgatatactgatgtcatttccttaggtatgtacccagtagtgagattgctggattgtatggtagttctatttttatttttttttgaagaacttcctgctgttttccataatggctgtacctatttatgttcccattaagggtccaaggtttccctcttttccatattctcaccaacactagttatcctttgtctttttgagaatagccattctgacaggtgtggggtgatagcatattgttttaatttgcagttacctgactaatgataagcattttgtcatatacctgttgtccatttgtttcccttaagacatgctcgttgagacatggacacggggaggggaacatgacagaccggagcctgtgggggtgggggcgtagggagcaaggggagggagagcattaggacaaatacctaatgcacacaggacttaaaacctagatgacgggttgatagatgcagcaaaccaccatggcacatgtatacctatgtaagaagcctgcacgttctgcacatgtatcccagaacttaaaaaaaataaaaaataaaaattcagttccttaatcacagttgccactgtgattttactttgtcatattttaaaagcttttttatttcaaaaaaaaagtctgttgaggtcctttgcccatatttaattgggttgttgtattgctattgagtttaaggtttcttatatatttttggatattaatcagagtgaagggacaactcatggagcaggagaaaatatttgtataccatatacctgaaaagggattatttccttggctgtgcagaagctgtttaggttgatgcaacttcatttgtctatttttatttttgttgcctatgctcttgggttcatatccaaaaaatccttgcccagaccaatgtcataagcttttagttgatgtttttttttttttttttttttttttttttttgagacagtcttgctttgtcacccaggctggaatgcaatggtgcggtctaggctcacagcaacctccaccttccgggctccagtgattctcctgcctcagcctcctgagtagctgggactacaggcgctcaccacaacgaccggctaatttttgtatttttagtagagacggggtttcgccatgtttgccaggctggtctcaaacccctgacctcatgatctgcccgcctcaacctcccaaagtactgggattacaggcatgagccacctctcatagtccatgttttcttctagtagttttagtttcaggttttacctgtaagtctttaatccattttgagtcgattcttgtatataacagataagggtccaattttctttttatttatttattttttttgagatggattcttgctctgtcatccaggctggagtgcagtgatgggatctcggctcactgcaagctccgcctcccgggttcacaccattctcctgcctcagcctcccaagtagctgggactacaggctcctgtcagcacgcccggctaattttttgtatttttagtagagacggggtttcaccgtgttagccaggatggtctcgatctcctgacctcgtgatctgcccgcctcagcctcccaaagtgctgggattacaggtgtgagccaccatgcccagctgtaagggtccaattattaatattcccaattgaatggaagaagtaaaaggaaacaaaattaaccatattctcacttaaagtcattgttatcattttggcatatttcattgggttcctttttacccgaaatgagggttttctgctatttatttagatgtgatcgtgctatatttatgacttttcacccttttttactatcacataagtgattttaggttattatagacacactttaaatgttcacataatgaccacttattctaaagttaggcatttagttttttatttttgttgttctaaataacccagtagaccattttgtttccttttagacagcttccagcgcatgaaattattaggtcaaaggatattacctttttttttgagacggagtcttgctctgtcgcccaggctggagtgcagtggcgcgatctcggctcactgcaagcttcgcctcctgggttcacgccattctcctgcctcagcctcccgagtagctgggaccacaggcgcctgccaccacgcctggctaactttttgtatttttagtagagacggggtttcaccgtgttcgccaggatggtctcgatctcctgaccttgtaatcttcccacctcggcctcccaaagtgctgggattacaggcttgagccaccgtgcccagccaggatattaacattttttaaagggtctttatatgtatcgcaaaaatacttagcaaaattattattattattattttttaccagtttacactgcccaccaagaagctataaggacacctaaattgtcacataaaactgtgtatggataaatatctctattttataaaccacttggtataaccaaaatcctgcttttgagatattaaattttgaagctaacattcttagcatgtttttaaaataatactgacttcatgagctaatacccataatgataaaatgattttatattccaggaaagctgccatgtgggattgaatgttttatatatgatacacttttatctacatatgttgttatacagtcattggtacctttttattagatgaatttatttcatattcagtttccactgaattgtattcagcttgactacaaattagtcaagcagaataagaatgtgagttttattgtgactaatatatatttggagtctagatttggagagacaaggggtgagtaaaactgtgtgcctactacctgaaaggaaaggttttttttttttttttttttttccccctcaagggaaacaattacggagactgcccaggcatttaatattttattgaaatattctaaaccctcaaatttcgcttctacattttatgtgatgcatcagaaaaacactattttatttgttttataattctccaatagggaaatttcaacacattgtaagtttctttatttaacaacatcatctagcttttaataactgactttcatacacatttttaaaagcaggctaatcgttatagcttaatatatttttcatgagatttagtgataacatgatcacttataccagtagtttatctcctgaatcattttaaaaagtaatgtgcatgttttctttatatttatatacaattgggaagcttaatatttatgaaaatatgattgacttttttttgtcatttctcttcaaagccttaggctttgcagttatcagtagtgcagttccaagatgcaaagtcataaacttacctttcattctctttagtaggcttaatattttgaatctagccataggaagcagcctgaaacctctaatcgaaatcaaagataacaccacaggggtacaatatctctaatttgtcttggaatgatgcggtagcttcccttgactgctgtgattaaattcattctggtttgttcagttaatgagattagcacatcttaacccataggaaatattgtctttatgggcctatgactctgaacagattagcatcatgatcagaaaaataatttttaataaatgattacgtgtgagtggtgctaggctaggatccctacaaatctggcaagagcatattccttgaccttcagcattatatgactttataagacacagcattttctcaggcatgggtataaatacagttaaatatgtactataaaactaaagaacagcctgaaatttaagaactacaagaatttgtgcttgtcattaagctggagataaagttaacatcctgagaagatgtaaaggcgacagtgatacacttctccttgtttggtaggatcatttccacacttgtctgtacttggaattgtaaggtgatgagtcccttaatgatttcttattgcaagtttgaacctagtgtatttcatggtaatagactaaggggaatgagtatatgaaatgagttccagtgtattgatgaaacttagagttgcgtagagtggagcatagcttagtagaaacttgagcaagttactgtagcacatggtcctggttccaattccagcaacatctgttagttttaggacttggtgcaacttgttcaaattttctgtcagactctccattggtttaaaaaataaaattcaaaatattgacaaatattgccttcctgaattttttggtgaatattaagttagatgatgtatataaagtgcctggcccatagtaagggctcaataaaagtagctgttggtaccgcttttaactaattgttgttaaattgattggttaattatatatttccctgccacttaactgtcactcaacagcttttcctcatttcctgcctacctgattggaaatcattatgttgaatatgtctagaattatcactgggcctgctgtattccctgggtggtatgtttgtataggttgaaccactaaagaaaatcttttcggatgagttactttcctatgtcaccctactatttcctagtgggaactttaagttccttcagtctggggtcaagactagtcttagtataggggacattgggaatattgaggatggcatgtttaagtaacattgtatgtattggtcaagaaaaaacaggcaagggatagagtacatcaaaaccagaaaacctatgtacttacctttccatttctgtctttattagatatgttgagtttatttcaagtgcctctatagaacatctacagaacattaatattaagaatatcatgaaaagggatacatttttaagagcctaaattttggataaaatggaagtcattttcttttttttttttttttttttttttttttgaaacagagtcttgctctgtcacccaggctggagtgcagtggcatgatctcggctcactgcaacctctgcctcccgggttcacgccattctcctgcctcagcctcccaagtagctgggactacaggtgcccgccaccatgcccggctaattttttgtatttttagtagagacggggtttcaccgtgttagccagggtggtctcgaactcctgacctcgtgatccacctggctcggcctcccaaagtgcggggattacaggcgtgagccaccgcgcctggccatggaagccattttctaacaacaaatttaatttgtgaaaagctggtagcatgttaactctagaatgacaattttttaaaaggaaaattccaaagttaaagggaaaaaatattggggtagtgccagctagtatcaggatttatactttaaaaatgcataagaaagaagcaattaccagtgtccaaataagaaatgagagtaatagaaaactcagatttcattgtattataaatttaataaataagttacacaattgccgttcagtgcctgaaattgatttttctttttttgaggtcaaacttcaaccatgtatatgaaatgtaagagcaactttctaagcagaattaccctttctgatttccttgggttccttttggttctttaatctgtatgactaagagtgtggattggctgacattatgagatgcaattaatttacatgcttaagttaggactataccatcctgtttccatccattcttgatcacaagcatattacaaatgctgtgctggattatctttactattaagacatactgcagaaagccctgcaggtaaagaaaacaatctagggcttaccttagaggcaggaagaattgcatgttaagaaagctgcatacactctggctttttgctctttgagtttagctcaatgtcttcctaaactttggtgtgcaggaggtgactacgcagtatttaaaatctaatccatattatgtgtatagtatggatggtatagcaattttccaggtggatttttgacaatattttattttttactattcatgttgactttgaaaaataactacagggctagatttgattcaactgtccatggttagaatttttaaaaaagtttttgactctaatacaactgagttccatctacagaaagaatgcacatatggatacggctgtccagaagatcaaatatccttgtactgaagtatatctatatttagtcattattttataaaagtagtagaaaacaatagtggaatataatatgtggtctttggaagaatgagaaatcatccttacccattaaacacagacccaacacttaatgtatttccattttgatagtgacaagttttgggtttgggatgatgtgtcagccagggtcagttaacagacagaaaccacttgagtgactgtagcagaaaataatgtaacaagaggaattgggatctaggtattgaaaaattgacaaagagaagaggtagcaagtgcacaaagtagctaccgctcctagggctgggaagacaaaaggttagaattactaacacttagaacccttgaggaaggactctacaaagctgagctcaggtctgagtagggggctgctacgtggctggtgctaccctctctgggatagcaggaagggcccaatgggactgaggcccggacctctgccagccaggtggtgctggtatttctgcagcaggggcgatgaagctgattctctaagcttttgaaaaacaaaacacaagctaaattgaatagcttgttactaaaaagtgctgctgcaggcatgaagaagcacgtctagggaactgctaataaggacagtaagtgcatgggaagctagtgtgaatgagtaaatcctttgtccctcctccaggcttgcagtctccctctattgctccctacctttagattctgagagtcagtcagtaaagccagaagtacggtttgcagagtctttgcctcagcgttgcaaagtagggtttagaagggtgtgttggtatggctctgaggaagataaaatctctaaccagcatgagtgctaatatgtctaataagatatatggaaaataattattaagtatttgactgaatttcaaggattaaaaagcaatacttaaggcaacaaaaacatcttatatttccattaaagcataatttttcttacagctccttcacattggcaaaattagtttgccctcttgaatttttcaaagatgtgaattatggcaagtaataattgctgcctactattgaatatctggatgttgtagaactgccattgtatcatatttaacttatttttgagagtgttagatttcctctgatagaagatattttttacttttccaagattaatagtagaaatattgaacatcaaatcattttacagataatactgtcctaacattgcgtaagtatacaattattcatagactcagaaatcataattgtcttcacagaaagaaaccagttcagaatactttaagaactatttggaatgttagatttaaaatattctgtagccaaggtaaagcaagttagctaaaattccttttgtttctattgtttttagaactagcttcaaagagaaagaatttgataaatacttagtgtccaataggctctttcatacagttcaaagatgtagactgacactggcatctacagttcctagctgtacttactctggtattttttgccagctgccttcgtggtttctgcttcatacctgtttgtattcataaataactcaatctaagatttttagctttttaaaaagaattgcatacaatcatcatcagattacaggtttgaaagaaatcttagtttttttctttttcttttttttgagatggagttttgctgtcgttgcccaggctggagtgcgatggcgcaatatcggctcaccgcaacctccgccttctgggttcaagcgattctcctgcctcagcctcctgagtagctgggattacaggcatgcgtcaccacacctggctaattttgtatttgtagtagagatgaggtttctccatgttggtcaggctggtctcgaactcccgacctcaggtggtcttcccacctcggccgtctaaagtgctgggattacaggcgtgagccactgcgcctagcccagaaatcttagtctttttaactcagttttgagattctgccatatacctggcactgtagttaagagatggcatataaatgggaaaaataggtatttcaaaagcaatcaaaagcaattacaagactatatagtatgtcctaccacgggggtatgcatgggagcagaaggaagaagagacgaattttgcttggctagggttgtattggggttgaaattgatatcaactatagactagaaacttaaagggattttcatgccaacaagagtacaacaggccattcaagtccatctcttccaaacattgattaaacatcttttataggcagacaatcagttagttgctaagaagactaagctgaaaaaggcttttttttttttggccctgttggagctttcagcctattggctgattaaaaaaaaaaaaaaatgctgaggagtatgaagtcacaaaccaattgagttcaggaaccagtaagtagtttgacatgaccgtaatggaggttttgggatatgggcaattggcaaaaaattgaaaaggatgcgggaaaggtggactggggatacaatgtggatggatgattccttgctcaattgagatgaatgtgttcaaaaaaaccaggaagtttttttttatgttttgcatattagaaagttacatttggtggctatatgcagaatcgtgtatggggagagtacaggtgtggaggtcactcatgaggctaatgtctattcaaatgggagaagaggaaggtctgaaaggcaatcactattggaatacatgcaagtacatctagcattgttctgtctttctgaagatgtggaaatgaagctctctcagaattaaatgacaacatgccatggctgtttgttagagggaatggaagtagagattgaaggtcttgatttccagctgatcatcctttttatggtaccataccactcacccagcctgttgaactggaaaagattatgaacatcaggcattaacctaccaaagtaaagcaaaacaaaaacgctgaacttctccatatttttaaaaatatgtgacacatatatgtttattggaaattaaaatacagtaaaggctctttaactgtcattcaataaatattttttgaatgaacgacgatcacttgtcaataactggtattaaaaaagacaaatattaatggtgatctttattcaataatttcataaaatgggaacaaagtggtaatttgccagtaggatgaggagggcatagcagaggttgtctaaccttttggcaagggcaaagtcaaactggtgaataagcaacacaagctgtgatgagagtcatgtgccatatgtaaatggtgactctttcttcctccaatgctgtttatcaccacaggcttcccagcggcccaagaacagtctgccgcagtcactggcattaataaatgccatctctacctgaatgcccttcttttcaaatttttaccaaaaggaagatagtagactttcagttttccttctggctgtgagaggcatagggagaataacggtaacagatgcaggaataaaaaggcttgatacacatggatattatgtcatgagggattcaggagtttatattaatatacaaatattagttgttttttttttgtttgttttttgttttttgttttttttttgagacgtagtcttggtctgtcgcctaggctagagtgcagtggtgctgtctcaactcaatgcaacctccgcctcccgggttcaagcaactctcctgcctcagcctccccagtagctgggattacaggtacctgccactgtgcccggctaatttttgtgtttttaatagagatggggtttctccatctcggtcaggctggtctcgaactcctgacctcgtgatccacctgcctcagcctcccaaagtgttgggcttacaggcatgagccattgcacctggccccaatattacgatttatcctgccctacctcaccactcttttcatgattagagatggaaaaatttgatattatttaaaaatcagtaagattctatctaatcaaaccattggcagtataattcacaacttttttagagattttctaaagtaatacagatactgtagtattgtagttttgtagtatagctacaagaaaatcatactgtgctctgaaatgctatcttagtaacatattgtgttaatggattataatggtaatcaaaacctccatagagctacaggtttgaactctaacattctgtcgaagttaaagattaatcagtttaacaccatattatttttattatttttgagacgtagtctcactctgtcgcccaggctggggtgcagtggagcaatctcggctcactgcaagctccgcctcccaggttcatgccattctcctgccttagcctcccgagtagctgggactacaggcgcccgccactacacccggctaatttttgtctttttattagagagagatggggtttcaccgtgttagccaggatggtcttgatctcctgacctcgtgatccgccctcctcggcctcccaaagtgctgggattacaggcgtgagccaccgcgcccggcccattcctagtattttcaaatagaaatctgatgcctttattactgtaattagaggaatgcttatgtttcaggttgggttttggtaaagcccatgtggagaggagaatttgcatgaaagtagtttaattaaggaaatgttctcagggatggcaagtaggtgagcaagagaagtagaataggaatggggaagaaatcatgcaaggagcaatcgcaggcaaagtgccagcctcagtctggttctgcaggaaaacctgggcctaaactatgcttcagcttgttgcaacttgatacagaaggagctgggcttttgtattccagtagtcaccagtcattgccttaagactaccctaaggtgacataaacaccaaggcacttccggatctctgtttttgttggcaaagcagctttactagcctgaagacagtcatctaaagagatgtagatacagaagttttgagaagcaaagaccacaaaagccaaggaggtgggcacgcagaagtgttaatggaatcttagtggatctggataaaacacgattttttggctataacctctaaagggctaactttcagaagattacgtggacccaattaagcacttacctgaataattttgaaacatctctaattgtactatagctagagttaaaagaaaaaatattttctaatataaacaaaaagttcagaattatagcattattaaagaagcttttttcaaatgttagcattcctgcttcttgactttacatttttccggaacaaaatagttttccaaagagtatacttaatgacttgtgcagatgaattctaaatgataaccacagggctcttggacaagggatcatttaaattttgagttcttgtcagtcagacatatcaatccatatacatttccccaaccagggtgtcagaagtgtagtcaagtgagttttgtaatgatacttctttgtttacatctagctgcagaaacctcttaagactgattctgcatcagaataattgctagagggaaaagggaagctgtgattatgaaataacactgttatccactggcacccctttgtgtctatcttagttgaagctttgaggcacttctgtgtctattatttgattttaattggcaatggtattgattataaatcatttgacagaatataatttttatcttaaagtttaaatgtacctagaggctacaaagattcctgcgttcaatgaaaacattaaagtaatagtgtaagtagtttaaatgtgccccatttggcacagattagtgtcacctatggtacaactcagtcaaaaagtgaatgtagctgaaaactgaaactgttcaacagctccaaatttaagaaacacggaacattcactatgtgcaatagacaatgctagttttagtaggggattaaaaaaaaatatctttcagccaggggctcataaagtagtgaggaaacctacaacaacttcaagtcagataatgacaatatgtcattaagggacatgaacaaatgaccgagagaccgcaagatcaggagggactttttttggagttggttataaaggaatggcaaggcacatgggaatcaagaattcattcaaacagagccttgaagaaaggtgttggtggagtggaaggctagaacacaaaaatacaatctacagaataagaaagcactagggggcaactgtggttggagtacttacaagaacggtttaggaaaataactagttgtactacatagactaaattggataactgtcaagatttgaggattataggtgaagaaaccattttagagtttattataactgacattttgtatctagagacaacagggatatcagtattgatgtaattaaaggatgtggcaagaatgaggtgaaaataacttatgtcttagggctgaaaaattgagaggatggtggtatcattggatatggttagaaatagaaataagcaaaactatgatggggaagtgatttgtatttgggatatattgtctttgatgtattgatgggatatccaataatctccggaaaatatgtctggatctgaggagggaaatcagtgtgtgtttgataggtgtagcagtgagaaagtatcataggcaagataccacaactaaagaaaatggtttgggggtaatcaatatggagtttaagccatgggggcagatgatacggcaaaaggatattatacacagttaaaaaggaacccaaaaccaagtcttggagaattcacatttaaatacgtgcagatatagagaagccagcaaagaagtgttaggagaagtcacaggaaactgtaaagtgtctggtcacagaagcagcaagaaaaacagtttttaaggaggtgactacattgaccaaaggcagtgattgaattgaaatttacttggggtctgagaaaagaccattcggttttctggttgctttgactaattttaaagtaacaatttcagtggagtagtagaccataacctataaatgcattgatgtatttatttattcattcactcactaattcacttatccaatagtcattcatttattcttcggtgcttacaaccgggcctggcactggattaaagtgaaattagaagtagataaactggtagagatagccaaaacatatctccctacagaagggaaaagagcagaaaattatcatggaaacactttgcatagagtttctcacagcaggttgaaagtatcctaaggttatagcagtgtaggctggaggaaaaggagaaaatacagactaggcaggacaggcactggggaaattcaggtgtaactaagaagagactgagtgctgggagacagggtgtaatctgttaaatagaaacataggcaatagtaaatcagggaaccagaaagagttcaagagtcgatgaagagggacatgtatcaaggtctcgatcgagagggctgtgattcaaggcagagcctccattccagagggagcttaggatactcttctggttttctattactatgtaacaaaacaccccaagtacagtggcttaaaataacatctcttttatctttttatctgattttgtgaatcaggaattcagccgtgttcagcttattgatttttctactctgtgtggtgtcagttgacatcacttggcagaattcagctagtggatgtgctggtctggagggttcaagacagattcacttaatgcttaatgccattgtgagaatggctgaaaggctcagttcagcagggactgtcaaccagaggacttgtagatgtcttctacagcatggtggtttcagggtagtcagtttttatgcatggcatcttagggctcccagagtgagtattctaagaaacccataaagaggctaaaagttactaataatgatctaatcttggaagacctataacatcatattcgttgcattctacttggcagacaagttgctaagacaaatccgagctttaaggggagaattagatgctgcctcttgatgaaagaagtgtcaaataattttgtggccatttctagtccatcataactgctgtaaatttcctcctcctaccatggtattgagtgatgcatatctcacaggaggagagtgtgtcagtgactctagctgagaagggcagaagaaagaagatccttgcacaaacaagccaggcgagagagaaaactggcagtttttaggaaagaaaagagatgcatcttggcaggaaacaattgatggtagccagagttcaaggctcatgctgaccgttcattcttctacattttctaagctcaatctttgtatcaatagagaatatcagaaaacttccttggggaatcttactttggctctctgtaaaaatgaacttgtcgcaatgttctaccctcaacaatgggtgaacacagatttaagaaaaagacatgaaaagcttatctgttcttttgtgaaagtgccaaacactttctgttaaggttttcattgttgttaaagtgaaaatttggtatgacagctgctgtgagggatagacttaaggccttgcaactcaaattatggtctgcaatctaggagcaccagttgaggttttgttagaaatgtacattttcaggcgctatcctagacctcacacgagtctgcacttgactaacatcttcagaggtttcatgtgcaaacaaatgttgagaaactctgatctaagggatgtttcattattcagatcattgcaaaggacttgttaggttcctgttcttggtcttgtccctgtggacttcagattgaaaatcttacccttagcttaggctaagataaaattcctttccttttatttgatggcaattatacataacatgtcattacttgatttttattcgactttggagaagcaaagggttttggctaatttttagtaactattcttagcttttacaatgttatcattttatgtttgcattttttcctagccttatttagattctagacacagaataggggactgtgagtgctgagagtatccttagagaataaccactgtaacctacttcattttcatataagaaatgaatgctcagaaatgtgccttgatgtactcatggctacttaatcagtggtaaagctgagcctagaattatttcctcaaaattgtagtcctctgtacacttggatcagaattaacaggcaatgcatgtcataacgggctcatccaggtggttctaatatatactaaagtctgagaaacaggcctgagtgtagcttcaatgtctgctctctcactctaatgcctactgcctgccatatctagatgcctgtgtgtatgtgaacgaggagggaagagaattaaatcctagagatgttggtagccaattatctcaaaagcacatatttaggggtcagcttttaaaaggaggaggggggcttattcccctgacatttgagcaaagcaggaaagggtcggtgatgaaatgccatgtgtcctgaggacctacaggcctgggttatatgaccacttcaggaattgcatagcaatcaaaaagggaactaaaagaatcggaggctgggtaaaatcaggactaacaattgataaagcaattatgatcaacagtgagtgagagaaggagatttacctgatggtgaggtggtagccaccactaagattagtttaaataagattagccaccactaagagttttaaaatgaatgcatgaggcactggagtcttccattgcttctcttgccctccttgatgtcttctgacaggagccatagagatctttataaaacacaaactagatcatatctctcctacccaaagcctgtaaaagcatctctattacatttagtttaacatctctactgtggcttaccccttatccttctttgcccactaacttcatttagcatccacttcccctacttccctttgtgcatcttgtgcctgctatctgtaattcttccctttttataaaatctcctttttaagatcataccttgaattgtatctcttcagaaagggcttcctatagcttagccttaaaattctttttcagttgactttatttctaccttagcatgtaaaatgttgtcatctcttatttgttgttcatcttcttgagacagtaagctccagaaatgcagaaactaaatcattattcaatctaacctcatgtgatatctgtcacattgtagataatacttgaattttaaaaaggggacagaagtttcaagaacagtatactgtggtttaagtgagcaattcactgtgtgtgatccatggggtaggatggttcgaggtaggtgagaaagcatgaactggccatgaacatggacgcaaattgatcaaagtcattgcagcttagcaggtcaaaaagctgtgaggtcagagcatcagttaaaatgttcaatggtagttggtcatgatggcattagcaacctttaaatttaaagggacttaagtcacatccagaaatcggggatgacaagcctatagtcatcctctcttgaagtcttctgctgatacaagtaatcattcagtctgttggtctctatccccatgtcaccaccaacgatgactgggatccagtcaagcccttggatatcatgtcctctctcgtgtccttttcataccaatttaatcatgcctggagtgcccagaagcatactttcagtctcgcctgctttgacacctgactcattcatgccttaacctactgtgctagtgttatgatggggagggagggggtgactgagtggatttgacctcccaaaccatattctagcaagcaaggtacatcttaactctggaattcttctaaacctatatagggtttctgaaacttagtctcagagtgggagtggaatgatacagtactttgtcagaagctcataacaacgactgtgtcttaccataatccattacaatactgttcttgttccagttgaacagctggaagttgaaaaacatttcctttggaatgagtcaaactgtatcttacacaatcttcccagctcttatttacgagatagataatgtcattggtgctcaatatactaaggatttttcaatgcagggctctaatcttatcaatagattccagggaattactgagaaacacattatttgatccttgatgtctctttccttgtatttttatagtagcacgcttgaggaagtacacatatatagcttccaagaatgagggaaggcatcagttaatatgttaaaatagaaacctcccacttgatcttaagtatggggagggcgggggaaggagacaagccttaagcctgtttaccattgcaggtaaacaaacatgaagatcaaattctaagtaaggagagtttgttatggaatagctgagactgagggcataaagacaaccattcaaattattctagggtttcagaagacactgaagaaagaatagggagatgaactgttggtgaagcagagaggaaaaatagaccaagattaagagaaaaaaaacacgggaaaagattgcaggttggaggagggtgggtctatccaaggctgaggtcgaagcttacggcaaggatgcaggggaagaatgttttgttaatggtaaatagattgcaaaaattctgtagtttgcctgttcattctgatgatgggttttgtggttttttttttttttttttttttttttttttgctgtacagaagccttttagttctatctcagttgttaatttttagttttgttgcaattgactgatgtttttgtcaggaaatcaaaatctttgcctgtgcatatatcctgaatggtattgcttagattttcttacagggtttttatagttagtgggttttgtgtttaagtctttaatccatcttgagttaatttttgtataaggtgtaaggaaggtgtccagtttcagttttctgaatatggctagccagtcttcccagcaccatttattaaatagggaatcctttccccattgcttgtttttgtcaggtttgtcaaacatcagttggttgggtattagatgtgtgatcttatttccaagatgttggttctgttccattggtctatgtgtctgtttttctaccagtaccatgatgttttgggtagtatagtctgaagtcaggtagcattaggcttctagctttgttatttttgcttaggattgtcttggctatatgggctcctttttggttctgtatgaattttaaaacagttttctttttttctaattctgtgaataatgtcaatggtagataaatgggaatagcattgaatctataaattatacagtatggccattttcacagtattgattctatccatgagcatggaatgttcttccatttgtttgtgtcctcttagttccttgagcagtggtttgtagctctccttgaagaggtggtgcacttagcctgttagctgtattcctacttactttattctctttgtagccattgtaaatgggagttcatacatgatttggctctctgtctattgttgtaggaatgcttgtgatttttacacattgatttttgtatcctgagactttgctgaatttgcttgccagcttaaggagattttggggtgagacgatggagttttctagatacacagaagagacagtttgacttcctctcttcctatttatccttgatttctttctcttgcctgattgccctggccagaaattccaatacagtgttgaataggaatggtaagagagggcatccttgtcttgtgctggttttcaagggtttgtcataccaaaacctacagccagtttttgcccatctagtatgatattggctgtaggtttgtcataaatagctcttatttagagacatgttccatcaatacctaatctactgaaggtttttaacatgaaaggatgttgaattttatcaagacttttctgcgtctattcattcctttgcattcttttttctctaatcttgtctgctggtgttatttcagcaagataatcttcaagctctgaaattcattcttctgcttggtctatttggttattgatacttgcggtagcattgtgaagttcttgtgttttttcagctcccttgggtcatttatgttactctctagactgataattcttgttaacagctcctgtaatgttttatcatggctcttaacttctttgcattgggttagaccatgctcctttagctcagtaaagttcgttattactcatcttctgaagcctacttctgtcaattcagccgtctcagcctctgtccacttctgtgcccttgctggagaggagttgcaatcacttgcaggagaagaggcactctggctttttgagttttcagtgtttttgttttttgattctcatcttcatgagtttgtctagtttcaatcttggaggctgctgacctttggatggggttttaattgggattttttttgttgatgctgttgttgttgctttctgtttgcttttttaacaggtccctcttctatagggctgctgcagtttgttgggggttcgctccagaccccattcacctgggtcccttctgcacttggaaatgtcacctaaggaggctgcagaacagcaaagatggctgcctgctccttcctctagtatctctgtccctgagggtcactgaccagatgccagcaggaaccttcctgtataaggtgtctagcgactgctgttgggggtgggtctcacccagtcagggtgcacgggatccaggacccacttaaggaagcactctggctgccccttggtcgagggggtttgctgtcctgggggaatcccacttgtctgggcttcccggattctttagagccagcagggtaaagactaagtccgctgatctgcggagaccatggccacccctccccctaggggctcaggtccaggggaatcggagttctttccctaaacccctggctggagttactggaattcctgcaagcaggccctgcccagtgaggagggatgggtcagagtccggcctaatgaggcaatctggccattatttgccatagctggtgtgctgtactgcagggaattcctcctgggttcaaactgtccagtctccctcaaacctgaaggggaaaaatggtggactggagctgcagtgatggctgctgccctccctacaggagctcagtcctctcagtaagccggtagccaccgtgatggctgctgcccctccccacagcagctcagttctcttaggtggcagttctcttagatgccgcccctccccgggagagctcagtcatttgctgtaacaggcagctgcagtgatgatggccgcccccgcccccggaaactgagcagtcttaaggagtcgtctccatccgagtggcctgcgagaatctgcacagctgtgttttgagacccaaggccctgttggcatgggctcgcaagtgggatctcctgatctgcgggttgcacagatctgtggaaaaagaaagatttcccaggcagggtaggacaatcactcactacctcccttggctgggagtgggagcttcccttgtcgcgtttggctcccaggtgggccatggcaccaccctgcttttccttgcgctctcatgccaactgcctagtcagtcccagtgagagaacctggacacctctgttgctggtgcaggattcactcacggttttggttcttctcagtgggagcctctgactgcagctgttcctagttggtcatcttggcctctctccatatttttccatttttgatgtaactttaagtttttgcttaaattcccatattggatattacagtctaaaatcaagagaaggttaatgtggaccgagccattatttaaatttaaggttcaaagaggtaggtcattcagccaggtgagtgagcaccaatcttttaaaaagttggttaactatttgatagtttccacttttcaagctgataatgatattttaaaccaaggtcatttcaatttccttttggttcaatatttttggaaagttgctacctctttgaaataaaaatattttgtacaggattgtttacaattagcaaatgtttgctgataaagatgaatcactgaattaggtaccttttgtagttatgtaataaagctcttggtaaaaacttctatttaagcagttataactaatttttcctattgaaatgtcaggtacctattaagattttctcatagggcaattttaaattttttctttgagctttgtaagaaaaaaattgtcaactctactttcctttggctcttattcaactttattttaaaatgcatttttctagaaacactaactaaaggtgacagttttagttcacagggaactatttttgatttactatttttgttttggaaatgtctgaataaaccactggaaattatagcttataatgaagaaaacaagataaacacactttttatctaaagtgacagtaaaaatctagcaaatgggagaaaaataaagtcaacttttttttttttttaacttctccaattgaacgtcaaatgaacatattgggcaaggaatacaaccttagttgcatttacaatacagtggctacaacagaagagttaaacactaagtcttacgaaaggtagctttagaaatatttgaaagttggccgggtacggtggttcaggcctataatcccagcactttgggaggccgaggtgggcggatcacgaggtcaggagtttgagactggcctggccaatgtggtgaaaccctgtttctactaaaaaaatacaaaaatcagctgggcgtggtggcatgcgcctgtaatcccagctacttggaaggctgaggcaggagaatcgcttgacactgggagacggaggttgcagtgagctgagaccacaccactgcgctgcaggctgggcgaaagagtgaaactctgtccccccccccccacccccccacccccccccaaaaaaaagtgtgtgtatgtatatattaaggttgacactgtatttaaaaaatttctatgaaactgacaaaactattgcttcgttaattcttttttgcaagattgcattggaggaactgcatggaatataatgactgtgttcttttctaatagcacatgagtcagatctctagaaactgacttttgcccatattcaatttcagcagtaaaataatttctagcttgatatttctcataaaaactcctagggctcttttaaaaatattttataaatatctttataatgtggcttaatttttcagacatcttctgtgtagaaacaaatattcatatgtatgtacacatattagctattgctgtgtaataagccaccttgaaactcagtaggttaaaacaaccaacatactatttcaaatacatatgttagccaggaagttcttcaccttactgctaggattactcgtgtgtctctagttagctgggggttggctaaggggctttgctgatctcagctcagctctgcgaaatgtctggctgtctgctagtctgggaaaacttcatctgggacaactagggcaacttgactcggttccacttgtctcatcctcctgctgtctagctctgatgtgctcttacggtaaatgcagaggcatgaacaagagagcaaaagtgttcaagcccttttgaggtctacatttgggagaggaaatgccagcacttcaattgcactctgttggtcaaaatgagtcaaatgccaacccagatttaagaagcagggaaatagataccaacttttcatgagaagaacagcaatgctacattgcaaagggtatggattcaggaaaggatgaaatactaggcccaattttgtagttaacttaccatttacagcagttgctcctggacagtatggcttccttgccaaatatttttgcatgcaaataattggtaaacagtgccaatattggtttttcctaaacaatactatgttaaagtgtcagtcaaaatatgaattaaaaaatgcaaaacatggtaagagcttctcaaaattagttatgtttgaaagggtgaaaagaaaagacaagcagacatttgcctaagcagctttgggtggttaatcaagtcggtacactcggatggggtgtcttgtacctctctagtctcatgttccatccgtccacttacgttccaagaagtggcttatagttccttgaacagtgcgtctatttcatctgatccttagcatgtgaagtttcctctgcttgactttatcttccctttacacttctacctgttgataacctgttcaaccttgtatattctattcagggattttcactctgttgttctctccagtgaagatatcttttatttgtgccagcaccatacttacgacaaaaaaatcactattaataggattataacaccatgctataattatattcgcttaaatgtatatttccttcctaggctattacaaaagctgtgaaaacagtggcagtatgtttttatcttttatcttcccatttttcttaggacagtatgatgcataatactggttacatttagttgaatgactatccccctcgtctgacacataaggaaaataagccaagtgctatgtaatttatcagtgttcacacaactggcaaaatttaaattatagaactgtaataaataaaggcctatttgcttccagatactatattatttaacttacaactacaccgaatctcacatggaagactttcaagtaaggaactggcacttttcagtggatcttaagaaatggctacactaaatgccctagttaaactttttcttctgtttactactacctcatttaatccttatcaacttcaaggattatatttcttatattttgatttatatagccttaagtttttgttgaatgatatttcttctttagttaatataaaaagccacatttttcaaatacattagagtgaattatacattcgaacaatttgcagtgtgctctaaaatagtatttagtaattgagtctgctgagcacactggagtcctgaggagttaatgaaacccccgatgtcaaatgatataacaataggaatttgggactttgaagaattttcctaatgtatatatgtagaattatcactgttactatctttccattacaaatgggacctacaattaggagcaattttattggcaggctatataactgtatctgaccttttggaaatgatagaagaaagaaaagatatattaaactatctttgtagaaaagatgacgtaaaggctcaagtaaaactcacctaacccttgcccctgaatgtgatgatagtcaagcccagcttaaacagcagttgcaaagtaaagaatggtgtagagatctgtagatacactgcctaagtccaaattagtatctagcacttacttgctgtgtgaccttattcaagttacttatattgtgtctgtttcatcagttgtaaaatgggggtgactgtgaacattaaaacaacccacaaaaagtacacagaagtagcgctgacataaaccagtcgatgtgtgtaactcgcatctttctgatacatgaggtagagtcatataaaaattgtaatatttgacaatatttgacttcagaattggaaattgcataaagttggaccactaaaaggaaataaagcatagcagtgacagacgttctcctttaaatattttatcctctgtgacttttgacagaagatcttctttaaatattgtatcctatgtgacatttatcttttctgtgtttccaatttctttgatttggaacttcctgtagacagacccttacaggcatggaagaagaaagaatgaataaaccaaggatgacttcccagtaggtggaggatgggaataattaggaagaagctgtgtcttgtcacctatattgtccatacacaactgcaccgtagggtaattgagaaattataagaatggtaataaatacgttttacattcattaattaaagtcatctttggatgccctttgtccataatgtttcctctactagatctgaagcctaaatatcacttttcttctctgcaatttccctggaactgagtactcatagatgtttgtctagtgagccattccattatgtcatggtatatgtgtgtatttgtgtgtgtgtgtgtgtgtgtgtgtgtgtgtgtgtgtataaacacaatcttttttttttttttttgagacggagtctcactctgccacccaggctggagtgcagtggtgcaatcttggctcactgcaacctctgcctcccagattctctcccaccttagcctcccaagtagctgggacttcaggcgcgtgccaccatgcccagctaacttttgtatttttagtaaaggtggagtttcgccacgttggccaggctggtctcaaactcctggcttcaagtgatctgcccttctcggcctcccaaagtactggggttacaggcatgagccactgcgcctagcctatagatttcttttttgaagaatcagtgttatttgcatgctttgaaacaaagtgcttcatcttgccaaccttgtaccataccgtttctgtcagaaaagcaaccattgggatagattgtaattagccttcatttccatcactggctatctcaaatgcaaatcatgtatctatgtgaatcaaaagaaaaactggatttaggcctggtgcagtggctcatgcctgtaaatctcagcactttgggaggctgaggcaggtggatcacgaggtcaggaggtcgagaccagcctggctaacaaggtgaaaccccgtctctactaaaaatataaaaaaattagccaagcgtagtggctcgcgcctgtaatcccagctactagggacgcggaggcaggagaatcgcttgaacctgggaggcggaggttgcagtgagccaagatcacgccactacactccagccaaggtgacagagtctcaacaacaacaaaaaactgggtttaactttcagaatgttcaattttataggggatatttaaaggtggtgtaattagtataatcatggattgtaatcattccacaaattttaaaataactttgtgaattacattaatacataaaaatataagataaagcatttaccataattttattaatatttcctttagaatacctggtaaaatgaatgagtactgacctaacttaaagataaaacaattgagacctagctttagaagttagttttattacaaaacatgttaaggatagacctgatcagacaatgaatcatgctgactttttgttaagcatacttctgggttcataacatcccacttacatataacaacttgatttccattaacgatggtgtggtttcctatttaaagttcgaatgcacatctgtttgaatcatttctagtgtacttaatagagtaacatacatattgggttctagttaagatgctttataaaatgccaaataacattttatatctggagagattataaaaacttgtattttgtagctttgctcttgaacacttgctagctgcaaggaataacttggctttttcttgatgatcttcatagccagattttcgtgctttttttggtagagagaagtctctacaagtatttgacgctaaggaataatgaataaatacctactgattttatctgctaaggtccacaaaacattccagtattttgatatcactattaaagaagacgacggtgttccagtgatacatatgattccttacaatgacatcaccagagatagaaatatgaggcatgggaagtaacacgtaggccttcatttattttctgatatggacatccctggcattgatctccttggctcaaaggaaatttgcttccatgtctagggtggtgaatgtctttggcttatttctttggccctactctccacttttgtcttccttgggaggctgatgtctgtggactacatcaacaggctcctttgccctctggctactagttggatttggccaatgagagccttggtaagagagggagagaggaaagaaattccatcacccaatatcaaagctcctgtcagataatcttctcttctcagttctctctctatgtagtaactagaaaccactctccttcttttcattcttaggagtctaagagtagtagtgacacttctctattactagttccagtggtttcattataccttccctcatttttataaacagtcccttattaaactcttctcagattaccaaagtcctgctatggccatataaatttcaaaggagagtgtcattctccacctccaggtgataacatttaacaggagggaatgtaatttatttaatgtttttattgagcattttctatgctaggtaccataccagacatcttacatttattaacccttttaattctcatattttgaagttggtcccttctgttactttgaggccaacattacaaggaaagttatagacgatatggattatttggcttagaaagtttggaataaacgtgtgatagctaacacttacagaatatatcttacaaagtgccatactaagttcacttaaatctttgcaatatcaccacaacataggtaatgatacatgctctttctatagatgaaaagagtaaggcacggagaagttacttgcccaagatcacactgcagagctgggagttgaacccaaggcattctgggtgtacagtcaacattcttattcatggcatcataccattcccccgtgttttccaaagcatattttatcagtgtgacttttttctaaattccctctgcataaatctaatgtatttcagtcactagtattctaactcaaaatacaaaaccagcatttttctatctttaggtgactcctttcaagagaaaactaacctatgatgccacaagtcgtcatagtggccattcttgaggggagcttccacatagggggtgtgaggaagctgctagggtgttgatcatattctgtttcttaaatctcgatgctggtaatataaatatgttcggtttgtgacaattcattgagctgtacacttaagacgtgtactttcctctatgtatattattccgcaacagaatactgctttattatacaataccttttccaactcatatttaagaaaacaaaaaaaaaatcaactcggaaagcttcctatttacatgaaaatgggttgccttatttttctgggagctggtcagcagcgttcttcagtaagttttgaatccccagttttgcaattctttgtggtatttgcgatatttttggtgtttccaatgtctagggatttgtaattgcagaagtatcttgactttcttagcgacagttatgtccatggcttgtcctttttgtaatcagaaggtcatgctaaattatccctgtgttctttactttctactgaaacgtattgatccctttggattttcaggttaaaagaccaatacaactctgaagaatcagaaaccacttaaacaccttcacaaatgcatttcctttctcaaatttttttactttgatttgttccactttgatttggttcactttatttatgccacttgtcaacctacctatctgtgtttctttttgaacactgtttgtgcttccgtatttctttatttcatactaaaaaggatttggaaggaatactgtctcgtttttaggtcctttcgtgttgtggtttgggttaacaaagacaatatatatgcagatacattaaactgagtaatatcagatatccactcagttcacttgataagggaaatcttagtcataaaatgaactgaagacagagagctacagggtcgcctggcccaaggaggaattcatgttttgtgtgcttcacaaaatagttctcatacacttgaaaaggaagccattaaaggttgaattttaaagaaaaaatattgttcttaggatataaaatgccacctgcaacaaagacatggtgtatgttgaagatgaaaggggagaacaacaaaagaatacttaaaaatagtcaaaagaacaagaaaagggaggaaaaagcaagtttctaagtgcatcctctgtaccatctgcattcaccagttttagtaattgtatagggaataatgccttcccctattgacttgcactcccacagggatgccaaactaatagaaaacattttacatgtattctgcactttctaatataatatttttatattatcgaaaagactttaacttgtgtgtgtgtgtgtgtgtgtgtgtgtgtgtgtgtgtgtgtgtgtgtgtgagatcttgcttcgtcacaaaggccggagtgcagtggcacgatctcggctcactgcaacctccaccttcctagttctagcgattctcctgcctcagcctctcgagtagttgggatcacaggtgtgtgccaccacgcccagctaattcttgtatttttagtagagacatggtttgaccatgttggccaggctggtctcgaactcctgaccttaagtgagccacctgcctcagcgtcccaaagtgctaggattacaggtgtgagccactgcacctggccgagttaaacgtttttacacctagaatttggtcaaagaaagagatgcagacaaatagtgttaaaatgaaacataaaaatcaatctatatttattgagtgcatacgatttgccaaatctgtataacgttcctatgtgttgcagttgaacctcacgggagtgctctggagtaataatttgagccccattctaatagtgaataaattgtgcctcagaaaggctgtcacttgcccaagataacacagctagtgagtgagtgagagacctgagttcagaagttagctatttctgcttctgaaacttgggttacttttgctatagtatctataattctatagagtaagttgcaggcaggaaaattagaaccatccaagagaaatagtatgttagattttacctggggtattcatactacagggagaataaaactgagcaccgaaaggtctataaagttacaggctaaatgtagcacatttcactaaaaaaaaaaccacatcagaccgtgggaacgggggtgggggagatttttactcaaaagtacttaaaattacttttacataagtccaggtgtgatggctcatgcctgtaatcccagtactttgggaagctgagggaggcggatcacaaggtcaagagatggagacaagcctgaccaacatagtgaaaccccgtctctactaaaaatacaaaactgagctggacgtgatgacacatgcctgtagtcccagctacttgggaggctgaggcaggagaatcacttgaacctgggaggcggaggttgcagtgagccaagattgcgccactgcactccagcctggcaacagagcgagactctgtctcaaaaaataaatgataaataaatagttttacgttgaaacaagcatatattaaaagaagaaggcaaaatctctaggaatttttagcataaagtatatgctttcaaagaaatttaaaacctgcaggcactgtgtaatttatactgccagactccagggtaaattccttcaatttcatttcctggaaggatgctctggtagaatattctgagaagcactctattagagaatatggtgaatatgactaatagaaattggatttcaattgtgatactttaatatatcattgactctgtgagtttcgaaaataatacgatagcaggaactgtttctctatcacctcactgctttctctctctcggtgccccagctaggtgtacatggaatcccctacctgacctataatcctttactccctctccattttggttacctccagttttaaaagaagacttataaaagaccttggtctatgtatttaagtttggcccacaaagcaagattctgtctgcgtttttgacctttgcctagactttgtctccaaacccaaacgtagtccttgtgtcttggatgctatatgatcctgatggctttgggattcatgttttattctgtactccaagacttctctcacctttcccagtctctgctcctctttttgaataaacagcagtttatcacgcacatacttcttggtctgacagacttcaactttctaccctggattttttcttttcataaaaacaagtatctctgtcagttaacagttaactatattttcttcaacaatggacacattgcagtgcataagattattttttgatgagtttaaaagtcatgctttgctcagataagtgtgaaattttgctcctggccaaaggagggaaaaaaacacatcattttaatggcattgtataccttcattcaatttgaaaaacaaattattacactcaaaataccaaattattccaggttagatatgaagttcttggcagcactattagaaagtgtaaatttattttcttattactagagagctttccttaaagtttcattaaaatggcactgttttaagatttatgtgtatattatgtatagtaaagttgctttgttttagattaaatttatggatacatagtatatttagggggtaaatagatatattgatacaggcatgcgaagcataatcatatcagggtaagtgaagtatctgtcacctcaagaatgtatcctttctttgtgccacaaacattccacttcaaatttttttttttttttgagacgcagtcttgctctgtcacccagggtggagtgcagtgatgctatctgggctcattgcaagctccgcctcccgggttcacgccgttctcctgcctcagcctcccaagtagctgggactgcaggtgcccgccaccaagcccacctaattttttgtatttttagtagagacggggtttcactgtgttagccaggatggtctcgatctcctgacctcatgatccgcctgcctcggcctcccaaagtgttgggattacaggcgtgagccaccgtgcctggcccaaattcttaaatgtacagtaaattgttgactgtaatcaccctcttgtgttgccaaatagatcttactcattctaactagatttttgtacccactaaacattcccactcctcctgtccccaactacccatactacactctggtaaacatcattctactctctgtctccatgagttcaattgctttaatttttagttactgcatatgagtgagcccatgcaaagtttgtttttgtgcctggcttatttcacttaatacaatgtattccagttccatccacgttgttgcaaatgacagcgtctcatttttttttatgactgagtagtactccactacgtatatatgtaccacattttctttatccattcatttgttaatggatacttggattgcttccaaatcttggctattgtgaatagggttgcaataaacatgagggtgcagatatttctttgacaaactgatttcctttcttttgggtatatacccggcagtaggattgctggattatatggtagttctgttttcagtttttttgaagaacctcaaacagttcttcacagtggttctactactttacatccccaacaacgatgtaccaaggttcccttttccacacagccgcatcagcattgatgttgcctgtctgttggatataagccattttaactggggtgagatgatacctcattgtagttttgatttacatttctctgatcaatgatagtgacaaccttttcatattcctctttgacatttgtgtcatctcttgagaaatctctattcaaatttttgcccttctttcaatcagatgattatatatatttttttctatggagttgtttgagccccttatagattttggttattccttgtcaggtgggtagttggccagtattctctcctactctgtgtgttgtgtcttcactttgttgattgtattccttgctgtgtagaagctttttaacttgatgtctcatttgtgcatgtttgctttgattgcttgtgcttggtagggtattgctcaagaaatatttgcctagaccagtgtcttggagattttatcccaatgatttcttgtagtagtttcatagtttgaggccttagatttaagtctttgttccacttagattgatacttttgtatatggcgagagataagggtctaatttcattcttttgcatatccatatccagttttctcagcaccatttattgaaaagatggtcttttcttcagtgtatgttcttggcacctttgttaaaaatgagtttactttaggtctgtggagttgtgtctgggctctattctgttccattggtctatgtgtctgtttttatgccattagcatgcatttttggttagtatagctctgtagtataatttgaagtcaggtaatgggattcctagttttgtaaacaaggatcatttgattcttccttttcaatctggatgccctttgtttctttctttgatctagctaggacttgtagtaatatgttaaacaacagtagtgaaagtgggcatccttgttacagatcttagagaaaagtcttgtagtttttccccattcagtatgaaattagctgtgggtttctcatatgtggcttttactgtgttaaggtatgctgcttctatacccagttttgagagtttttatcatgaaggcatgttgaatttttatcaaatgctttttcagcatctattgaaatgatatggtttttgtccttcattctgttcatacgatctatcacattgattttttgcatatggtgacccatcttggcatccctaggacaaataccacttggttataacgaatgacctttttaatgttgtgttgaatttggtttgctagtattttgttgaggatttttgtatcagtatttgtcagagataatagcctgcagttttgttttctggatatctgtctggttttcgtgtcaggctaatattggcctcacagaatgagttcagaagtacttcctcctcctctttttcacaatagtttgagtattaggtgtttcaatgtttggtaacattcagcagtgaagccatcaggtctcgggcttttcttcactgggagactttttacatctttgatctcattacttgttgttggtctgttcgggttttgcatgtcttcatgacacaatctaattttgagtttggtttgctattctagttctttaagatgtattgtttctcttttttttttttttttgatacaagtgcttattgctgtaaactttgctagtactgatttatctgtagcccacaagttttagtatgctgtgtttacagttttgtttcaagaaattttataacttccttatgaatttcttcattgacccactgatcattcaagagaatatagattaattcccttgtgttttgtataattttcaaaattcctcattactgatttctcagttcattcaactgtggtcagataagatactttatatttcaattttttgaatttaaggcttgttttgtggcctaacatatggcccatccttgagaatcctccatgtggtgatgagaggaatgtacactctgcagctgttggttgaaatgttctgtaaatatttattaggtacatttagtctgtagtacagattaagttcaatgtttcctagttgactttttgcctgatgacgtccaaggctgaaagtggggtattgaggtttccagctctctttaggtctaataatgttgctttatatatctgggtgctccggtgttcggtacgtatatatttacaattggtatatcttattgctgaaatgattcctttattatatgttgatctttgtctcttcttacagtttgtcttgaaatatattttgtttgatgtaagaatagctactcctgttcttttttggttgctatcgacatggaatatctttttacatcccttaattttaagtctggctttgtaggtgaagcgtgtttcttgtaggcaacagattgagtcttggtgtttgttgttgttgttgttgtttgtttttttttttttttttctgtcactgtgttttgattggagagtttatttcatttatgttcagttttattattaagaacttattcctaccattttgttttctggttgttttgtggctttctcttccatcctgtcttcctttttagtgaaggcgatttttctctagtggcatgcttttatttcttgctttttaaattttgtgaatcttagtatatcttcttatttgaggctaccatgaggtttacaaacactataacccattatttcaaacagacaacactggttgcataaacaagaaagcaaagagaaaactaattaaaaactcaaacttcgtctcttttaatctttttgttgtttgtttatatctcattatactgtctatgtcttaaagttattagagttatttgttaactgaaagcttcctttttttactcttcttattcaagatatgagtagttcatacatcacaattacagtattacaatagtttgtgtttgtctgtacttactgagttttgtgccttcagatggtttttctggctagttaaggtcctcttctttccagttgataaattctctttagcatttcttgtagaacaggtctggtgttgatgaaatcccacagcttctgtcttggaaggtctttatctttcttgttggaaggagattttcactggatgcactatcctagcataaagggtcttttccttcagcactttaaatatggcatgacatgtcttagcctgtaagttttctgctgagaagcctgttactagttgttgttaagctttttggaatgtatcttttctcttgctgcttttaggatcctgtctttatccttgacttttgatgcttgccatctaggagccaaggcctgaagttgcatctttatgaatctatctggtgctctcttctattgtggcagagctggcacccaagccacaatacaaagtttgtcccattcttcctttcccatttcataagcagaggaatttttccccatggctaccactgcctcaggctcatggtgagtactgcctggctaccactgatgttcactcaaggcccaagagctttttagttaactaggagtaaacgctgcgaggcctgggtctctccgttctgtgcagtgggttctcctcaggccccaggtgagtccagaaatgccatccaggagccaaggcctgcaatcagagaacccaggagcttgcttgatggtctacctgactgtggttgagctagtacccaagctgcaagacaaagtccactctattgcctctcctttccaaaagcacaaggagtatatccccatggccaccacacttgggaatgcattgggccacacccaaagacagcatggctctgagtcttacccaagacttggtgaatactgcctggctactactgctgcttattcaggacccagggactctttagtcagcaggtgacgaattctaccaggactggattcttctcttcaaggtagcaagttcccttctggccctgggtgtatttaagaatgtcactcaggagccagggcctggaatggggggtctcaggactctgcctgatgccttatcctactgtggttgagcttgtgtccaagttgcaagacaatgtcatctttactgtccctatcctctcctcaagtggaagaagcagtctctctcaaagctgtcagctgcactgttaggggttagaggatggggtggtacaagcactggtgtcttactgggttgtgtgcccaccaagtcccctgacttcgagtccagcacgacaccaagacttgcccaggaattgcagtttttgtagcctagactccctttgaagtttatttaggaccccaaagtgcttgagctcacactggtgagactagctggaactcagcttctaactgctgagatgggtgatacctccctggatagggctggtctaaatgtgccctctatgtgcgcttgatgaattctgccctgtgttgcttcccactgtgacagggcagcactgggttccaatgcaacgtttcacaatcctgcgccctccctcctgcaagcacacagatcgtctacatgagacatggcctctgccaggggatgggggaggggtggtgttggcaattcgtaactgtctttcctaccatcttcagtgcctctttccttgatatgatattaaaatcaagtactgtgattgctcacttgatttttggtttttatgtaggtgcttgcttgtgtggctatctgttcagtttggtgtttctatagcagcggtagcgggaaagatgattgctggaaggttccatgtatttgaccgtcttgttctgcctccctcctagtaaagctattctttaaaaattctagcatgttagggttttgtgttatgttctttttcccatggaatttgaaaatggatctatttgagtagaatttcaaaagaataactcataatttttgtctaagtatatatgtggctggattcacaaagctgggcacacagggactggttggttgccgcaggtatcattgttccctgcttgaagtacccgggcatttacaggtcttgtcattgacatggctacctggttgtaggaatagtctaaatcctatgtttttaatcgtggaagtttaagggatgtcttttgcctggaaaccagggattttcttgacttgtgtgaaattcaaagtttatatgtgatccaaggagtgtatgtaaagagcacagtcacccaaaggctaatgttagacccatcacctgacgttttttggaaagtatttgttgatcccaaggcttgtgagagctcccactgttacatgttctttagtcctttctaatgcttctatgtaatagtaccttttaggaatattttctttgctggactctaagttctatagggtctgggcctatgtctgatgtactagcatatgattcagtacctagctcaggtttattcatgctcaatatgtctttgactgattaaattagggatttccagataggtgatgaaaaagctgggaattacctcatgaggggattgtagggttttaagcagaaaacgatttggtgaagtatgacaaaagaaagacaaatgttagaaagataatcaaatagtaggttataaaaggacaaggaagcaacataagattgaaagaacaagaacccagaattagacagatctgagccataattttggctttaccccattctagtttcatgacaaagagccacatactcatcttacatgagatacttagaggttaagtatgttactgctaatctcagaaatgccacaacggttatgaaatccactcatttaatagtgtgtctcatgagtatttacgttaaaaatgttaaatattatttattgactattatttttccttagtataattcctgagcaaagaactgagtaaaatagatgaaaagctctcacagggttgtttcaaacctaattaaacccgatattcctaaaatttgagttatccagtatgagaataggtcatagcatgcaaaatgtgtatgcacagcaagcatgttttgagtgataaggatgtcgaaccactctgactggtatattccaagaatggttaaactttatgtacccacccaggtagattgtggtcttttgcttctttgtgtatttacttttccctttacccgtaactgccttgatcatgcctgtattttttctctccttcatagaatctatattcatttcagtgaattaattagatcatttagggtataaatctcttactcttgctattcaaactaattcaaatagacttgacctatgataaaatttttaaattttttttgtcatttgaactttccttttttcatccgtcatcttcggcagattaattatgcacactaattatccttaaatatagctttagttttcaaaaggggataatcgtgaaaatgtatcattggaagtgtgctttgttaaattgagtgtattttttttaatttcagtttgggaagcagcatattgagaacctcttcagtgacctacaggatgggaggcgcctcctagacctcctcgaaggcctgacagggcaaaaactggtatgtgacttatttttaagaaagttaactttaaacttagtagaatttcagaccagaaactgacaacatagttttatgacatctagtagaatgactaggtactgattgaaacagcaatacctattccttagtaaagcaacctcgtatgattttcatttggcatactctaccgcctgcagaaaaagtaaaaatttcagtaatacaatttatattaatagatattattcagttttactacttggtatctatcttatcaaatatcttaatgaaggcttttatacataatgacttgagaaattatctttgtacttttgtgtatttttgaagttattttacaaggaacctgtatgagtttatacatgtgggatagcaaaataaggtacaggcattatagtgtaatacgtgatagcatatgtgatgaaaatatcacttcctcttgaactattatcttgtctaacttcagagcattcctgtgaagatacatgattgatatacatgattacagatcagtgaagtcatgttgatcaaggtcttacactggggggggaaagaactcaaattgaaatcccctgactgaaataatcgtcttagattgctattctaaaaagtagagtttaagcccccagtctatagtcataaataactgttctacctatcaaattctgctaaatcatagccttcgtctcttatctttgcccttcattacaactccccagcacatgcacatacacacacagacacacacagattttgtcatattatacaaactgaagctgtcgttcaaagtcagttagcaaaaatcctatctaccccagcctgcctcctgtaacacttaacgctaagccactcttttctcggtatatattgtcagatatctctgggtttttgcctgtattattttacttgcctgtatttctttttgtacttctgtctaccccaactgtctgccagaaaccttgatttcacctcagtaaagcttttcccaaattacctttgctaatttttccctcccaaattccacagaaggcccatttttgtcttgtttttagtgtatgtatgactgacatccctcctcaattaaattctgaagtcctatacagaagagacatacctatgctttcattttttatcttcagctatgtgagattaatactaaaacggatccatttttttcaagaagtctgaacttgtactaatagaagaacaacttgatgacatattgaaataataactttagtcaagggggaaaatcagatttaataccttatagctgaactgtttgctgggcgccaatttgaggtcatcatgtaaacttggtcttaatttcactagttagagatagatttgtgtgtaattcatctcctatgactgtgaacaatttacatatatatggatacgtagcatatgtacagaaatcagtgtgtctgtgtatctcgtttctcctgtattctgaagtcagtcctactttgttaccgaatacagaagtcccagtgtcttccaaatgttcgtgaaaaatctttcaaagattatggcttactcatcttgtcctggccctctgttaggaggctgttgtctcttcacttccaggtatctgcgtgatcacttctcctgtgttgcaatcctctggtcatttccctgactgagtcaatccatctatcacccaaagcaatttagtcagggttaacaaatttcatacataatgtttaagataatgaatttcagatcctttcgtaattcataagcatgatttgggtgtttatactcagatatgagataagcctttctctaaacttatgatgttggcacactacccatttgatataaagaaaaaaccactaatttcggcaaaattaaaaaatccacatgatttgcatttatgcatatacatacatagacgctaagacaaaatgaacctaattagtaatagcattaaagaaaaaaatatcaaacaaaatatccatgagattggccagtataaggtaagctagtggtagggaaaaatcaccaaacatttacacatggcagtgtagattacataatttcagatactgctactaacagaatccattcaccattgtttgtcctaatcacagatctgtcagccctggtctgaggattttgcctttctcataaagcagaatcacctctaacaaatgctcccgatcccagaactccaattcgctatgccttgtcttgaattctaatagtttctgtagagatatatcttctactcctaatgggaggcatgtatactatagaacagaaattttagtattctactcagaagcatctgcatttggattattggctcaggacatccccagggttaaaaggaaggtacttgccttacaatcataaaataagaaatactccccaaggagactctaataggggcagattttaagttcccacttcaggatcagaaactgcagctttttaaaagagtagactatgtttggttctaatacatatgcacatgtgtacatttaatgtttgaatatgatacaaaggaaaattttgctaaatcttgtgactatataattacataattgaaaggaaatatgtggctttggtctaactactaggcagagaactgatttgagtaattattttcaaaactttaaagtcctataattaccattaaacttgtatactgtcaatctatatatacacaagaagattggttatttgctgtttttctttcatgtattttttttttattttgatggaatcttactctgtcgcccaggctggagtcagcgacatgatcttggctcactgcaacctctgcctcctgggttcaagcaattttcctgcctcggcctcccaagtagctgagactacaggcatgttccatcatgcctggctaagttttgtatttttagtagacatggggtttcaccatgttggccaggctggtcttgagctcctgatctcaatgagccacctgcctcagcctccccaaatgtctggctgttgcttttttttttttttttttttttttaaatctaaagtcttatttttttcctctttttggtggaaagtgggagaaatatcagaatgtaaaccaacatcattctgacattcttggaggaaaatctaagaggtaaaaatggagattctggttcataaggttagccttaatgttttgtgaaatcaaaggaacaagatgtcaatactgtgttataaaggatatcaggcaagttaccttggagagtaagatggctttagcttaatttgggttgttcagcaggcagtgcaaatgataaggagttctagggtgaggaactacttgagaaagaccaggagctttgctggaaagtataggagttaaatgcaagacacagaaatatagatatttgtttggtgcatgcacaaggtagttagagaagaaggaaataaatttgcaagactggggctctacagacacagacaaaagtttgggtcctggctccaccaattattagttatatggtaatctatatattagatattttaacctgaggttcacttctgtacaatagggatgaaactaactgccttgcaaggcggggattaaaggtagtgcattcaaagtacttggcacatactacgaagtcaataatatttatgttggaccaactatgtgacaagcaccaatcttagtgctttatgcatatcgacacactgaattctgccagaaaccatatgtacaatggtttgagcaatatgaacaataagtagtgccctggacaaggtctggatcctgtgagacagcatgcttcatgtttgagtgagggctttgacctcaaatgcagagaagaaagtatgtcgaattctcttgtaaatcagagcagttgttattgagagcacatgttgtaacttgtgtatgcctcttgctaatattttcattaagtccatttttaacagatgagaaaactggtatacagggagattaaattttttatgtaggccagacagcacaaaaacagcagagctgacaattgaacccaggcagtcagctttgtagctcttgcccttaactgttacctataatcacccaaatgtttaggtgagaactttgcaagtggtttgcattggcagtgggcttacttcaggaacgtcattgttgatggtatgaaggaaggatgaaaaaaatggtgagtgagtggagaagggaaagaggttagatttctctgggcaatagctaataagggcttgtagtaaggtaaaagaaatgaaaatgagagtaaataaaacaggttatcataatggtagaatttctaaaactctacaacttaataaatgagttaatttgtatattacaatgaactatgcagatgttggtttaaaaattacaggataagatacaacttttgggattgagaataaaattagggaaccaaagtgattgaggtttagagcttcagtgacaaggacaattaaggtaatcttcacagaaaaggtttcctttaaccctatttggcattatataattttgctagagtcaaatctcctttagatttttctaaaaagtttgggaattgtttttctatcttactagaaaatgtttttatgcatgctgatgtttctgtcattggtggtcatgcagtaatccccaactgggctatagaatgaagaaacaatcataccaaaataggctttgtaaagaaaaagtgttgccattcttagagtggttggtttatgctaaaaacgtaccaggccaaggacaattagcgcaaagtatttagattcattatattaatgcctcacaggctctgttcgtttacaatattcaagcttaatagtgaaattataaatggtttcatttctagtagattgtcggtctctctgctggtcagtgaacactcttttgttttgttctcagccaaaagaaaaaggatccacaagagttcatgccctgaacaatgtcaacaaggcactgcgggttttgcagaacaataatgtaagtagtaccctggacaaggtctggatgctgtgacacagcatgcttcatgtttgagtgagggctttggccccaaatgcagagaaagtatttcaaattctcttgtaaatcagaccagttcttactgagagcacatgttgtaattcgtgtatgcctgattgtggctaatataattcaggaagcaaatgcatgctgccacagagggaagggaaaagacatagacctgacctgataggctgctccctgttttcagattttacttcatgaagctgtgtttggtggacaaagtcctgcagtcaactcggtttcttttcttactttgcttttctttttcttttttcttttcttttcttttcttttctttttttttttttttgagatggagtctcgctcttctgtcccaggctggagtgcagtggcgtgatctcggctcactgcaaactctgccttccaggtttaagctattctcctgtctcagcctcccgagtagctgggattacaggcacatgccactatggccagctaatttttgtatttttagtagagacagggtttcaccatgttggccaaggctagtctcgaactcctgacctcaggtgatccacctgcctcagcctcccgaagtgctgagattacaggcgtgagccaccgtgcccggtgaactctgtttcttacggcagtgttttgtgcaacaaacggatttttctataccaaatatttatgtactaaatgtgttcaaacctgataatgatgtttgtttaaatcaagccaacacttattaaacgctgtctccaagcatataaattatacagaaacatcactatttttacttggggtatgaatggcagatttgtttttttggtttagatttaactggattaaaatacgtgtgttgcattagaagaagtaaacagtcacagctaaaccaagtaggcaggtcagaggaattctaatctcctctgaaccacttggtgactcttcccctgtgtcatggcattggaggcagccttcctttcttattaacatcctaaaatctgtctaatcgaccaatacatttcaccaggcacttagtagctccctaattacattacctctctctttcaaagataaactcaagtacattgagtacgttgatcacttactcttaaaataaccataagcagggatagattaataataacatgtactcccccaaatgttgctcagcttatctggcagggagatgacattacataagatatggaaatggaaactgtgcagcaattaattggctgattttatgaattcagggtcattgtcacctttaacctatgaaagttattttacagagatgtttgtcttaggaagaaattaactagatttttcactccgcagccagaataatctatgagctgattttcttgtttattagtccgatggactctttggaaatatcagtgtcattgacattatgagaattgttaacaatattaaagttacacaaagaaaatgtctttgaaatatcaaaatatcatattctgtttcaaaatgtagcagtgaagaaaagagcggaacacagaattattagatttaatttatttgtagcttgactgtccccagcaagaaaatgtcatttaaaaaaacaaactttgggatatcctgtaaaactcaatcctgcataaagaaaatgcggtacaggtcgggcgcggtgctcatgcctgtaatcccagcactgtgggaggccgaggctggcagatcaccagaggtcaggagttcgagaccagcctggccaccatggcgaaaccccgtctctactaaaaaatacaaaaattagctgagtatgctggtgcatgcctgtaatcccagctactcgggaggctgaggtaggagaattgcttgaacccagaggctgaggttgcagtgagtggagatcgtgccactgcactccagcctgggaggcagagcgagattccatatcaaaaaaaaaaataataataatttggtacatatacagcatgaaatacaatactatgcagccacagaaaagaattagatcatgtcctttgcagcaacatggatgagtctggaggtcattatcctaagtaaactaacacagaaacagaaaaccgaataacacatattctcaataagtacgagctaaacactgaatgcacacgaacacaagggaacaaagagccagcagcagctagtgctggggaactttgagactcctacgtgataaatcatgaaagggtgtatggggggggtcttacttgcaagtatgttttgggaggttttttgggcacacatgctctggttgtacatgctagcacacataccacatctcattggcatctaaaatctccacccaggggtgtgtgggtttttttgtttgtttgtttgtttacactattacaatgagcaaaagaatagggcaagtttttggaggagtgtgtgcatgcttgtcagtggggaaaatccctagcgtggttatctctggcgagggcctgagaagtcccctttggggctagaggagcccaaccacaaggctagacataatcagtgtggacagtgtgtgtattcattgtccgtttcgctgattgtcaacaggcagcactgactcagtgaaacagcatcttcaggacttcttttctcaatggggctcccttgcctgctcatttctggctatctgcctactccaagggaaccagaaaaatcctggcaataaaacatatagaaggaaatttatatgactttgggataggcaagtatttatgatacctgaatccaaagcatgtttcaaaaagagaaaagttaacttggacttcatcaaaattgagttattgctatattctggatatgagccctttgttttgagttgcaaatgtattttccttttctgtggattacctttttactcacttcaatggttaatattaataaaaacaagttctccacttggatatagtttattctttaaaactttatatttttatgacctgttgaagaaatactggcctacccaaagccattatgatactatattaggttattatctatagaaccattatcgttttaccattttgtttttggatctgttttacctgaaattgattattgcatatggtgtgaggaataggttaagactcagtatttattttatttgaagtctaattaacacaccatttattaaaaataatgcttcctcattgcttcacagtactaagtgtgtcattaaaaatttgtccgtacatatgtgggtctgtttttgcacttcaattctcttgcattgttctctctctctctacacacacaaatatcatgtaatgtggagtaatgtagttttataatacagcctagtatctggtgaactaggttctcccactttgttcgagattttattggttattggccctttctatttttgtatttgttttgtaatcttttccatttacatgtacattcattttaagtatgattaacattgagttaaatctatagagaataactgacacatttacatatggagtatcccagtcttctgtttttcttgattttttttttaaattttaggttttctagaatgagaaactgaaattgaacaggaacacaaaaggtgttcacaaattcaagaatcatatttaagaaatgtttaacctcagcagtaacttgaggaaatttaaattagagctgtaatgagataccagtacaaaattaccaaaatgactgaactagactactaatgccaaatgttgatgaggacatggatcaactggaaatctcacaattaacttctggaaatataattcaggcaactaattaaagagttgggcatgatctactaaatgtgaaaatgcacatttcttaccacccagcaattctattgtagacatacaagttacagaaatacatttcccagtttgccaaaaacacatatatatgtgagaatgttcatagcagtttcatttgtgatagcccaaactggaagtgactatgatacattctcatgatgggatattacagagcaatgaaaatgaccaaatgatagctacacacaatatacaagatgaagtcgttaaaatgtatttgagtgaaataaatcagacaaattatacctactatgatttctttcaattaaatttcaaaaacgggcaaaatgtttccatgggtttaaaattgaagagagtggttaacttttggaaggagtaagtcagtaaaacgcataagagaatcttctgcggtgctcactgttccatgttttgacctgatagctgttacacatgtgtatttactgtaagaaaacgcatcaagttgtacacttatgtatatttttctatatgcatattccacttcaattaaaagaggaacttatgaagggaacttaaaacctccgaaactccacgggccatatatagaaatctgatcatagaccccatgttttctaatgaaattattaaatgaatataagtgaatataaaattagaatatgatgtcatatgaatctcttcagggaaggccacatttcttacagaaaatatagaacctcctaatgttttagtagggaaaaggccccaaaataatggcttaaatttgagaaggagttgttcaaaagcagatattaacaatgctttcatctgagctagagctttaatggggagctgcataagatgctggcctatgcgttagaggacaaaacctcaagacattctcatgcagaaaccaaacttggaacaaaggaacctttaccttagcctgtggctgaacaataacacatggattttcaaaagtaaatctaggctgggcgcggtggctcatgcctgtaataccagcactttgggtggtccaggcgggtggatcatgatgtcaagaaattgagaccatcctggccaacatggtgaaaccccatctctactaaaaacacaaaaattagctgagcgtggtggtgtgcatctgtagtcccagctactcatgaggctgaggcaggagaatcacgtgaacctgggagcagaggttgcagtgagtggagatcgtgccactgcactccagcctggccacagagtgaaaaaaaaaaaatgcattatcttataattctccattttgtcataagtataaacaaaaatggaaaacatccataagtacaactttagtttgcttattaggaagaataaatcaaaatgctcaagcaggattttttttctaaagttgagcttgggtgtgttctatatcaataagcctgtgcaggatataaataatcacattgaagaagtcctatccaaatttccttttaaaattcacaggtatataagttgattgattggtgtcagagcaaacacaaccctttgtgtgtcagagattacagccacatggtaggcaatatgaagcatatatacttaggaacagttaagtgaataaaaaagagatacatagaataagaggtctgagaagaccttttggttcagttcctatatgagcagagacctggagaaagggagtgagccttggaattgtctataggaaggtgggttaggcacggtaataaagaccttaaggtgaaaaagcatttggaatgaggcctcagcaagtggagtagagtgagtttagagataaaggaaacatagcagagataggggagcagagaggtagtaaggtgggggtgagaagaagaaagcatggtgagccattgttggcatttggactcaggtctaaatgagatgacaatgactaaaaaaacactactagaaattaaatgggtcataagtcaggttattttaaaaatcagtaatagttccaagtctttgctattgtgaatagtgccacaatgaacagatgtgtgcatgtgtcttcatagtagaatgatttataatcctttggatatatacccagtaacaggattgctgggtcaaatggtatttctagttccagatccttgaggaatcaccacactgtcttccacaatggttgaactaatttacattcccaccaacagtgtaaaagcattcctatttctccatattctctccagcatcttttgctgactttttaatgattgccattctaactgttgttaaatggtatctcattgtggttttgatttgcatttttctaatgacaagtgataagcattttttcgtatgtatgttggccaaatgtccatcagtgatagactggattaagaaaatgtggtacatatacaccatggaatactatgcagccataaaaaaagaatgagttcatgtcctttgcagggacatggatgaagctggaaaccatcattctcagcaaactaacacaagaacagaaaaccaaacaccgcatgttctgactcataagtggtagctgaacaatgagaacatatggacattaggaggggaacgtcacacaccatggcctgtcagagggtggggggctaggggagggatagaattaggagaaatacctaatgtaggtgacgggtctatgggtacagcaaaccactatcgcaggtgtataactatgtaacaaacctgcacatgtaccccagaacttaaagaataataaaaaatataaaacaggaaaaatcagacaaaatgaaaaatcagtgatagaatactaacaaacttagagtgtcattttattcaagaaagttacagtcaataacgaaaacgtatcgcacagtagaaatgctgctaaatccatgaagaaaaattgatggaaatatatttttagagccattaattcaccactgtcaagtttatgacatatttaacagcaaaagattgagagtacaaataactgtaggtttaatagtgattttctgtatctcaacactaaagcatagtagatacttctataaaatatgagcattatcaataaatctccctatgaagttggatgtgcaagaagagcaatagtttaaaaatttcagttacattaactaaattcaagtctgaactctcaacaaggcattcagaaaatcgtatgtctgtcattattgggaatgctctcccctgagcctatggaatggccagagctcagtagatccacatggtgtctttcatagggcaaaagcattttcattttcagttcattgaggcaaccaagtgatacattcactatacaattttaaggtatcttgtgaagtcaagtgtattaactgtcctgatattaaacacgtggcatacagaaaaagttgaagagagtgtaatcaggggaatatttatagaaacgtggggaggattaaaggaagaaactatggtgaagaatgcagggattcacatgagttaataacctttactacatctaaacctaagcagtcaaggggagagggctattaatttgataaaatccctcatgttgggagagcgccactggacacaactgtgaactgagcccctaggtatctaaagaatgctgttagtttcaaatcattgcctggtgaagttgagagaagtgataccttagtctctccatagaatcctccagtgttttgccagtgccgctccttagtttagtctaaccagaagtccaaggttaagagattccaggtgatgtagtcatcacatacaaagaagaggtgaagaagtttggtgggttagtgaagtaggagtggaaaacggtataatcggcattccaggtatctagttctgttttgtttctgtgcgaaatgaggacttgagaatctgcatgccgagaactctgatgttggctagggcccagtcttgttggatgcatcaggaagccagtcacctttgaggccataccacttctatttgatgacagagagtagacgtggtttctggctaatttggggactaaggactccttcctattcttctggagacaaccagagccagaaaagaaagacacgctgagagtcacttcggatatctgctcttcgtcgtaaacttgttaaaggcttaggaaaatagtaaaaaaaatttcctgccacatacacaaattataaacgggcaatatatttgaatgcagtgaaaatgtcattaaatacacacaaactttcaaaattcatgttatttaataacagtagaaactaataatatacttataaattaagtttgattaaggtttgttaaaccaagagtataaaactacatttgtgaaggaaaaagcattccatatgaaaacccatgagaaatggctcaggctgtactgagagtttgaatttttgtctttgattttgatcttcattaaaaagataaattgaatcaagctttcaaataaaaatgttacaaaaatgctttaaggaaagcaggaactaaagataaagaaatagaagaaacactagataaaatatacagctagttccttataatatgaaatagattaatatcttatgaatgtgatccagacaaggagggagaaaaacaaatgtatgcagtttaaaaatggaagggaaatattaagtatgagatatagaaaccaaaaacgggttttacacagaaatacatatatgtttattataaaaaatgaagttgaggccgagcgtggtggctcacacctgtaatcccagcactttgggaggctggggcgggcagatcacctgaggtcaggagttcgagaccatcctggccaacatggcaaaaccccgtctctactaaaaaaaaaaaaattagacgggtgtggtggctggcgcctgtaattccagctactggggaggctgaggcatgagaatcacttgaacccatgaggcggaggttgcactgagaggtgatcataccactgcactctagtctgggggatcgagcaagacttgtctccaaaaaaaaaaatttttttttgaataccagtgataagtttgtccacacaccaagaaattgataattgctaatagaaaatcatatgaacagcctcctaattctataaacctatgaaaagaaaccctggtttaaaaaaatcactcaaaatttagccctctgatttttaaaggaatattagaagtgtcttttcaaaatgatactttttggtaatttctggatcattaagtcaaggtcattttgtcttctctcttttccttagggtctcctccattttagcctgtccctctgccataaatcactagttctagcatattctgtagttctaaactagctcctcagtttaaccctgttcctcagtttctttcctttccctgtcctggcgtttaacctgttatcctcacttgaatgccactcagcttatatctgtagagctcagacactacgtctgtgttccaatttgcattctttgtggtggctgttttagcatgaagttatccctgctgtcaataatgtattttggaaagccacttattgagaagaaagtacttctaagtgcagtgataactttattgcggtatttgctgagagcaaagctcatttgtaatagttggttgtgattttaaaaagcgaacaaaatacaaaatcctgagaaatgggagactatgctactaagtggttattcttgtctctacatcagctctaggtaaaaatgtatccacagcttctttttatttacaagtttttgaaggtaaagcaaatcccagctaggatgaaacatctcttatacagccattctattatttctttgccctgtcccacttttgtttgtaagtagtgcctttcattaggcattttaaattcagttctacacttaactctattctctcaaagatatttaatgggtaatttaaactttccttggatataactaagttctaatcagtgagtattctctattagatatttgcacttttaataattttgtgtctagtttaatgattaattttttgtctggtaaaggaacttagaaattacaaatttgatagagatttaactgtggtgctttaaactaccccccgctccccaagatgtattatgatctgtcttcctttctccaagcttgtgtcctcgtcttccctcttatgatttccttgcttacattttatgaattccgatcccttttataaagattcatacaaaaggtatagtgttgaaatataccctaggaacattaccaagacttcgctgacttaatataatttaatattaactgacacagttgtagatctaataattatgttcattgtaccagctcatcaattgtctatcacaaggtggtaagtttttaccaagtaacttcaaatctacaatgtgggatactacaaagcaaatagtcattgctatacattaaatcacaaatccaaggtgagtatttaaaaagcctagggtggaaattcagatgacagctatgttcaaatattcacttaaccccatcattgaaaatagtcactgaattagattgaatggttgtcagatgtcactgatctgaaaaatgatatactgttcacatgctggcatataatgttagataaagaggattctaaaatgttctttaaaactagtattttatgtgtcctttaagtattcagaaacttaaatagccatataatacatattttggagcatgtcagaatatatttgactataaactacttctatttattactcataaaatctagtatttaagtacaaattccaaatttaatttgttagacaagtatttcttacacaaaattgtcagtccacacaataggcctgtaaaatatttgcactttatatgtattaattctcaagtttgcagaagaggtagatcttgttaactctgtaacttatcaactatagggtctttgccaaatgattccgtgactttgactcactttatcatctgcgaaatgcattaatagtaaatgttcacttctttcaaaatacttgttatggaagatacaaatatacaaacataatctcgtattcattaaactcacattcagttgcaaggtaatataactactcttaaattgcagcatgttctcatttaaaataattttctgggtgagttgtttattcttcccatcccccttagtatacctcttgctttaagggaaattagtattgacacatttcttgtatattcaacttcaaattgagatagccagttacctattatgttcacatatggaggtctgctgggataataattatataactataaatagtactgtttaaaaatatttcttataatgtcactcaagtatcttttaagatttttattgtagctattgcttttttttttttttttttacttgaaattagtatacgtgacttgagcttaaaaagttggggctatatgggttgatttttgtcgttaaagttacatcctatattgccagataaaagatacgtaattacaaaaattcaaattaaataatatactgaaagtatatatatctttcatactaaattgtgaaagtattgaggacagtgtccatttactcaggcaatgccctctaatatatattctatataaggaattttgttgagtttagttaaaagagctactttcccaaaaagtttagtttgcattttattaatacgttcaaccagattacctgtatcaaaacttctattttgataaatttgttttaatgtctttcatgccattaaatgttcatattttcttaggattatgagacacttgtattaactgcctcaattctttattgtcaaagaggcagtatataaacaaatgaaaacatgactccattaaaaataattctcctgcaatgtatcagagtgatcataaacatatctgaaatatagaggaaatttaacatttcacttgtccataagcaatttgttgaaagtctattttttaaatttattcttaacattctatgcgtggcatatagtgagtggtcaaaaatagttaaagaatgactaaatatgtaaaacttaatcattgaaggtagagatagtatctttgtagtgagtacccagaattaaatcttgtaatatagttgaggtcaaaatgtgcttcaaaaattatctaatgtaaatttctatatctgaatcaaaaataattcttgaaatacggagataaggaagggaataaaaagctgtcattggaaatccaggtccacagtggcaatatggcccaccgtttaggttgtatatatcgacgtatttatgatttaataagaaaaagattcaatacatgcatctctcaatggaagaaaataggtatgatttatgcccataagtcttgaaattttaaacagtgtaaatcttaaatgtggtgtaaaagcacatgctgcagggcaatgaaactactttgcctttcctgtattttttatctttttaaaatgcattatatttagaaggattgtatgaatacttgagaagtttctcttgaatatggagaagtctttagcttggctacatgatggcagacatcttataaaagacatttaacatgtttaaaaagcaaattctgtttatctagaatgttggaaggaacttctcggtttatatatattttatgagaacgaaatgaaatgaaaagaaatgaaagaaccaaatagatggtggaagtacatgcttgaggtttcagtgtcaggaaggatatttacataataattttcaatgcatgggatttcccttttagttattgtttaagattctgtttaaggaaatcaactcaaacttttaaggatatttcagggttcctttcagaatctttttgtgaaattattttataatagtttgtaccatttcatatctagttaaaatcaccaagactgagtgaaaaggtagcttacccttatccccctcccttagctaattttaaaaatgcttgtattttacactgcatatgagggaacaaaagtgactccttcttaggacaaatatcaaactctgaaatgatctgggagaaccaattcctttgaaacaaatgtgagaaacgacctgctttagtctaatttcaattggctgaatgacgcaggacgtgttttcattagagcctgtagctctgaaatgtccttgtcactggttgtctaaaaaggcaagaagaggcagacaccatatattataaagatgatggttcccctgtgaatgagatataactttctgcaacttccaagttaaaaccgcaaatgcttaaatgatacacaaaactctaaacatccatctctctctgcatctaacaaaaataaaattgtatgaaaaaattcattaaagctttgtcagaactttgtcacctgtctttttctctctctcatacacaaaccacacatcacacacacacacacacacacacacacacacacacacacacacacacacgtaaatatcttacaggaatgtaactcttagttttattcatcattttcccttctctctctccttctgctctgccctaagaacttccattttcattatttgacttggttattgaaattattttcaagttacatgcccctcattctgacgtcttatttactattttctgtttgatgaaccctagtctgctattcttctttctgtaaagcaaatcaaaaataacactaacttgttcctgtcaataatctttcagaaaaccatcatatttcaggtttactttcatcttaagtttttcttaagtattcttaaatcttgaatatatcaatataataagtataaatccttttactgtaaaccatcatgggatatctaatcttagcttgaataaaatattgacgatggtagaaattacatccatgttcctgaaggaaagtgggataaaagaaaacagcgaggttttttgcctgtctcgaacaagcaaatgacgagaattgttcctcatagcccagtcatttaggaggtagagtacctggaagtaaatgctccctgaaatgattatatattaatcttagaattactaaatatatattgttatacaaaattatgtattgtaagtactagtctggcgatagaagagggacccccttaagttcttgtcctatgcctttaaaatagacagcaggagactactccatactaaagaataatttaatgtattaggttttctatgtgcaattcttacagactgcttattgtaacttgaggtgtttctaaagagttcacattttaatattctactggagtcacaataagtttccattatgtcaaagcaaaccatggaggttttctatcctccaaaattacatttgaataaagcaacttccgaagataacagtgtaaaactctgagacagcatcccatgttactttatgagtaaaatcttaggcctgttgacaggaactacaaaagccaattgtgctgcgtagtttaacttatttctgcaaaaactcaaggcatgttattacattttcacacagaatatcaattttcacacctattttggtatcagatgttttcattgtgcaaaacaggaaagcagaactttgggtaaccacagtgaccctactatttaatttccaaccatagagtgcttgtcacaacactgatacacacagtaggctcgtacattaacatacatgtcatattaatgttttctgttttgcttagtagacagatgtaatcattcacttcacacagattttaaaaggttttaatatttttaccattcagttatttagcaattagactgataattcttgaaagacataattctggaatgtgtattagaaaaaaaaacataaaagagaagttactgtatggcagggtgatgattatttaagaggaaatagtactgaattcagaaaaatgttatgacttacagctaatagtaagaaatacagcattataagagcaacaagcttatgagaattcatggccaaaacagaccagaccgtcaatgtgaggcattgaagagtaatataaatgccatgaacaataccctttcaggcatgacaaatacctccctcctctagagtcttcatggttatcaattagcatttcttacactccttggtagtttgaagaagacatgtacaagagacaaaacacaaccaaaataaataataatccttgtctgtatcatggtgtgaaatgtttattaacttggagagagagcctcttaaagctttttgtggagaattcactagatgtaattaatgaaatatcttctatccagacatagttttaaatcagaccttgtggaagcttcatttatctttgatactctgtttccctcttggtaaaatgcacataaatgtaaaatgttcatgaactcttggtaaaatttatatagctcatacatactctaatgatgtaggcatagtgaaatctgtattcagagagaactgtatagccataagatttttaaaagatggaaataaaagaagtatgcatcttaagaaattgtaaaaatagaaacaaaaataaaaattgtattcaacgtagaaaattgaataagaataatccattcaaaagtgagctcttgaaaagattaacaaaataggtaaacctatcccagtcataacaaagaaaacttagaataaaaactagacgagataaatgagaaaagacgcatgacagcagatacagaagaaatgaagtggaaactaaaagcaattttataacaattttgcaaaattctggaaaacttgattttctcgtacaatacaaatcactaaaattgagataagaataagtggaaaattagactgattacttcagaaaacatttagtaggttattaaaggtgtactgttgaagagtgtagtaggattctttacaaatgaatttaacgtaacccttaaagaataatttatatactttaagctattccaaagcatatgaaaagaaaaaaactccacaattccttttgtgatgtcaggttaacctttgtacttaacagtcaaaaagcaaagatcataaatctgtaagacagttttacttttgaatgaaatacaaaattttgttgaattataagaaatataatcacattttgcaagtggtaagcattctacaaatgttatctcttatttaccaagagctcttaaaattcaagaaggaaaagaaaactaccatatagaaattaatgagcaaaacatattaacagacaattcacacatggaattgtaataggtcagtgatacaaaaatatattcaaatgcacaaggaatcatggaaataaaagttaacaaagtgatgtatttgatcatacaaacaaaactaaaagaatcaaaaacaaaacaaaaatttcctggtgagagaagagcctattcttatacattctggttaaaatatgtaattctaaattgtttctaggaaggcaggtggaaacacctactaaaattacatatatatgtgtatatatgtgtgtgtatgtatatatgtatatagatgtatacatatgtatatatgtgtatagatgtatacatatgtatatatgtgtatagatgtatagatatatatgtgtatatgtgtagatacacatatacttgtatagatatgtctatatctccctgaaatgatgcgtatatatatatgtatagatgtatctactagagcagagtgtgtgtgtgtgtgtgtgtgtatacacacactctgatccagtatatacatcctgtgaattgttataataacagtagaagcatcagtatctgaaaatgtatgcataagatattggccaggtgtggtgactgctggtgggaatgttaatcaattctgccattgtggaaagcagtgtggtgattcctcaaagaagttaaaacagaaataccattcaacccagcaacctcattatttggtatatacccaaaggaatataaattgttctacgataaagacacatgcacatatatgtttattgcagcactattcacagtagcaaagatggggaatcaacataaatgtccatcaacagtagactgattaagaaaatatgctacatatacaccatggaatacaacccagacaaaaataagattgtagcaacatggatgcagctggagccgttatccttagcaaactagtgcatgaacagaaaaccaaatatcacatgttctcacttataagtgggagttaggctgggcgcagtggcttatacctgtaacctagtactttgggaggccgaggcgagcgggatcacctgaggtcgggagttcgagaccagcctgaccaacatggagaaaccccgtctctactaaaaatacaaaattagccaggcgtggtggcgcatgcctgtaatcccagctacttgggaggctgaggcaggagaatcgcttgaaactcgggaggcggaggttgtggtgagccgagatcgtgccactgcactccagtctgggcaacaagagcgaaactccacctcaaaaaaaaaaaaaaaaaggggagttaataacaagaacacatggatataaagtggggaacaacagacactggagcctactcaagagtaaaaggtgggaggagggagaggatcagaaaaactacctatcaggcaccatacttattacctgggcgatgaaataatgtgtacattaaacccccatgacacgcaatttacctatgtaacaaacctgcacatgtactcctgaacctaatataaaagttaaaaaagagtagctgtctgccactgaatacaattctgtccctgaatataatatctccaattcccaatcagttaattaccccctagtgatctgaatgctttctggcatgctttctccacctgatacttttcttcattccaatctattttttctttacagatttaatcaatactgagtacatgaatatatcttatgtcttttgcttatcttttcacaatgttacttcctttttcttaccccttgggcttccgtgagacacagttgcctacctaattgtttttcctgtggatatagataaattttattggaaaaaaaccatgaacatttatttaggtattatctgtggctgctgctgtgtgtgtgtgtgtgtggggggggggtgcgatgtgtgttccaatgacttattttttattgtggtaaaatacaaatgatgtaaaatttaccatataactattttttattttttaattagcaaaaaaaattgtatataccatgtagcatatgattttttaaaatatctagatgttgtggaatgcttcaagctaataaacatatacattaacttatatgtttatcatttggggttgaggacacttaaaatctattctcttagcaattttcaaaatacaatattgttattaaccaaagtcagcatgttgtacagtagatctcttgaatttattcctattaaatgtaatttagtatcatttgaccaacatctgcctaaccctcctcctccaagctctatcccctgctaaccaacattttactctcaattctatgagctcaacattttaaaatttcatatacaagtgacatgatgtaatgtttgtctttctgtgcctggcttatgtcatttgacgtaacgtactctagattcattaatttcattgcaaatgagaggattctctgctttttaagtccgagtagtattccagtgtgtgtgtgtgtaggtctgtatacctgcattttctttattctttcatctactgatggacacttaagttgatttcctatcttcgctattttgagtagcactacaatatacattgaagtgcagttatttctttgacatattgatttgtttcctttggaatatatacccagcagtagaattcctgaattatatggtagttttatttgtaattttttgagaaacctccatactgtttttcatgactacaataatttacatttccaccaacactgtgcaaagattcctttttctccacatctttgccacaacttaccttttgtctttttgataatagccattctgtgtgatgtaatatttcattgtagttttaatttgcatttctctgatgattagtgatgttcaacattatttcatttatgtgctggccgttggtttgtcttcttttgagaaatgtctattcaggttcattgccctagatagggtttgaggtatcattttttctatttttttagtgtataattcagtggctttaagtatatttctgttgttgggtagtcatcaccgctatccatctctagaatgatttcatcatcccaagttgaattcatactgattaaacgattactctccattttcacctcccctagcctttaataacttccattttttctctatgaatttggctattttaggtacctcatataagtagaatcatacaatatttgtcattttatgtcttgcttatttcacttagcatatgtttccaaggttcatttatgttgtagtttgtatcagaatttcattcctttttaaggctgaaaatattccgttgtatgtacataccacattttgtttatccatttatctgtagatggacatttgggtgttctcacattttggctattgtgaataatgttactatgataattggtctaccaatatcttaatctctgtttttaattattttggttataaacatagaggtagaattgctagagcctaatggtagatacttttttattatgtgaccttctgttgtgaactttttgacactgggggggtagtaccttactttcctttatcaggtctgagcccagtacctgaatatagtggaaattggaccttatgagaccttttatgaggacaaggaaatggaggaactatcttcctgcttacacagtgacaagtcttatgacagtggataaggggttactggaatctaagttcctattacttgatctaagtctccccagagtcaggtccatggcaacccaaaacgtatctaccagcagtgcttcccgcagtatgagtgagtatgtttcctaaaaatagcatattctctgcttaactgcttgagtctttagtgctatatcatctgattgtcactatcactagaattaagtttcatgaaagcagaaggtttttacttttacatgctcttattacttcattgcctggcagatagccaaaaggtacttgttgagttagtgaatcaatgaatcaatagataaattcatagtggcttttccttatggaggaatttctctcctctactgccatatgaggaatccccagatgatgatgcagatgatgatgctttcttattcttgaatgatcaatctccccttcgatgtagtaacatcttataaaactaaaatacgatatcatgaccaagatgtcaacattcataaaaccaccaatagtattcagattttcccagctttactcatatttatgtgtatgtgtgcatgcatatgtgtgtatttagttctatgcaacattattacgtgtgtaggtttgtaaatccaccatcagagtcaatatgcagaacagttccaccattacaagggtccctcatattgcccttttataagaacattcagctaccccacatcttactcccattcctgacctctgccaactgctattctgttctctatttctgtaactttgtcttttcaagactctcatagatacggattcatacagtatgctaccctttcagaatgactttttccccacttagcataatgcccatgaaattcatccaatttgctgcatgtatcaatagtttgttcttttcattgatgagtgttattccatggtgtggctgtactatggtttgtttatctacccctgagggcatctgggttcccagtttggggctattacaaataaacgtagtatgaacacttaggtgcaggtttttgtgtacacatgtgttttcatttccttgagataaatgctcaagagcccaattaccagattgtataataagtacatgttcagttttgtgagaaactgccagactgttttccaaagtggctatatcatttgagtttccactagcaggggttgagtcatccagtttctccacaccctcaccagcattttatggcactattttttaattttaaccattatgataaatgtgcagtgatacattattgtggttacaatttgcattcctctattggctaaaaacattgaacatcttttcatatgcttgcttttcagatgcttgtgtttaactttactccaccttaaacatttgaggagtgtgaaggacaggagacacagagatttgccttgattaaggcaaataaaaccctgccagattttcatttccaaacacagtcctagacagagataagagagctggcagtttgctccattgtttattagagacctaacattcattctaaaacagaggcgttttactaaaatgcagtcagccttaattataatggcactccttggagctaggtggaagtactggtgaatttttctgagttgtaattccatactagaaagcatatcttaattttaaacatactttatgacattttatttggagatactccagttgacctctttaatctgcagtaatctattcatgtgctgaaagtaaatatatttggggtgcttgtttgttatggaaagtgattttacacatgcattttgtttaatttttagattattttcaaaaagcttcaatgctaagtctctgaaaatagctaaatgcaattaccttcacgtttttattattattattattgcaactaggcatttggtctcttaccttcaaatgttttacccctttctttaacaggttgatttagtgaatattggaagtactgacatcgtagatggaaatcataaactgactcttggtttgatttggaatataatcctccactggcaggtaagaatcctgatgaatggtttccttttgggtaacattaatcttgttttttaatttttacccttgacgtgtgaaacaaatgtgtatttctaacaataacaaaccctgctccatagtgctgctttttaaattgacactaccatgtcgtctgaaatgttaaggatcatcacggtataaaataggttctggtacatttacaggaatatttttcaaaattttatttcattgagtaagtataaggtaaaaatacaaagtcccaatcataggtgagtaatttttttcacaaatgtatgttctataacttgtctataagttaatttagtatgttttattttaatcactaccaaaggaatgaggctttctcagtcttgggtattcttaacataaattattgccaataaaagattagtagaatatgggtatctctatcaataaatgtgtgtaatacatacaaactccataatgtgatttggaaattatttttaagtcacctgagcatagggtcttccgactgtctatttgacctctgcaaaatgggttgaaggatttgtggaaaagatacagacacacacccgtgtgtgtgtgtgtgtagtatatatgcgtatatatataatgtgtctatatatacacacatatatacaatatgcatgtgtgtatatacacacactcatatccacacattatatatgtatatatatacacactcatatccacacattatatatgtatatataagaccaacatgaacttatatccactaatattatccactcattgtatacatatacataatagtataatcataatatgtatacataatcatacatgaacttatatccactaatattttccactcattgtatatatatacgtaatagtaactcgttatacacatatgtataaatatgtatgtgtatatatatataccaacatgaacttgaatttaaacttccacggttaccatcttagtggcatttggtatattgccacccctgttctgggccatggtcccttcactatcaaaagagtaaaaataaaaataaatgtgtatgtatttcttatcacgattaagtgggagaatatctgcaaggcactcagtgtagtataccacttttatttgaggtgtatcatatgacttgtattgattgcttaaagttttccactcatttaaaaaatttggaggctgagaaatgactgctgtttttactggtcgggattacttttttataaatcagcgtttttgaaatgtaattgttagaccatcaatgtactcattctaagtgtaaaattcaatttgcatcaatctggtttagttctggttcttggtagcctctcaaactattttgagggatgaataactcccccccaccacgttcattaaaatttgcaggatatttacagagttatatagccatcatagcgatctaattttggcacttttccaccaccttaaaaagaagtttcttctccatttacagtcatttttcactcccaccccagccctaggcaattgtcaatctatttctgtccatatgtatttgcctttttggatattttatatcaatataatacatgttcttttgtgtctggcttcttgcaatgagggtaatagttcagatccagccctattgtagcagatatcatggcttcattcggtaaacttgaatttttttattttttatttttatttttttttatttttattttgagacagagtcttgctctgtcgcccaggctggagtgcagtggcgcgatctcggctcactgcaagctccgcctcccggattcacgccattctcctgcctcagcctcccgagtagctgggactacaggcgcccccccaccacgcccggctaatttttttttgtatttttagtagagacggggtttcaccgtgttagccaggatggtctcgatctcctgacctcgtgatcctcctgcctcggcctcccaaagtgctgggattgcaggcatgagccactgcgcccggcttgaattttaacttgaattgtagattgctcttgctcagagtcaaatagtgagtagacacaaagagtacctattaaattcagcagccatgttgctctcctaattggcccccatatatttttattccaaattctctgaacaggcttaatgctacttcacaacagtaagcggggagaggggaagagaaagagcgggaattaatatgtgctggcaacaaagaatagctcataggagccttaagtgagcccaagttggccgattttcagcccgttccatatagtgatggtgtcaaatagaaccagcaagcaacataccgcatctctccccaaactgcttttcatatgttgctcagtacttctcaaaatatcttgaggaaggaacacttttcccctaatccattgtatgtaagatagaataaaaccaaagcgttacaaaaataagatgcccaacacccatgcttcctcctttattattaaatacattagacataaatggtactctgtaaaatcgctacataagtttcttgatgcactctgaattgttgactttatcttatggcatagtaacaaataattcctagagtgaatccagtttgcagatcccgctttgcgtaagacagatgtaagttttgacaaagccagcagaagaactcaagcatgcacagagctccaaaaggcactctgaactgtatttattgtttatactacttcttatatgatcttaccatttttaaaaatatcctgaagccctttccaactccatctgaactagtccaagataagctttcaagactattatgtctgataatttcttcacttgcttgcaagttgttcatttattattatttttttattttttatttttgagacagagtctcgctctgtcacccaggctggagtgcagtggcgcgatctctgctcactgcaagctccgcctcctgggttcatgccattctcttgcctcagcctcccaagtagctgggactacaggcgcccgccaccacgcccggctaattttttgtattttgttcagtagagatggggtttcaccgtgttagccaggatggtctcgatctcctgaccttgtgatccgcccgtctcggcctcccaaagtgtttggattacaggcgtgagccaccgcacccagcccatttttcattattagcatgtggaggcgcttttgcaatgaggaatatcagaaggaatgctttttaaatctttctttgtctgagacctctcttatagcctgttgtttttcatttatgcccttgaatcaccatatccttgagactgcaagactgtagactcttcccagcctctgcttacttatctcatctctcttatatcacactgccctgttctaaaactattaagcacactttgaaaaattatcttgctcagtgttcatcataatccagtgaatctaaaaatgtgtttttcttttttttttttttttttacaccaacattacatattttcttcctattaaatggtagaagcccttgaatttcagcaaagattaaaggacattttggtcaacttaatgtacattctagatctatcagataacgagcggcatttacagatagaaccatgttggcccctttttctaatgcaacatactatgttattaatagtgccatggaggacttctcattgaacttgtgaaaactcaggaatgcaaactctgttttcctattactgtttttctactgtccatctcaaataaaattgctagcctaaaacagtaacgcatattttgtaacataggcaggtttgaacaaaattgcaaagcatataacatgtgtttggcatctttttcttccttcttaagtgcaattctttttttttcggagtgctaaacttggctctggcaaccagctggttgtaataacaaatcttgctaacagtggtgagctatcagaagtcaggtccatacttttactggacaattcaagggatgtacttaatggcaacgctaattcactttagaatgttcatattattgatacaatttgcaattacaggagaatgatgacgttcgcactgctgaaagccatccctgtaaattcctgcctaccaagtcacttctgtgcaagacagttcttgctctgctcttctgcagagcttcacagaaactatccttaccatataagattattcctaccctcttcatttctattcctctgctgcaacttcttttaatcacagtctgggttctggggagtagacttcggagttgagtttggcaggcagcatgtttattaagccatgccctggaaaaaaaaaaaaaaaaaaaaacacctgtagaagggcagaggtgacaggagtggaaagaggaagaactagagctgtgacgtagaccctatgacacgcttattcaaaccccatagacaacttgcagctaggatgacccctcagagttgtctcaaatggggttaaaatggctgagtgtttatactctgccccttcatcagtcaatagtagtgggttgccctagagagggtgtgacattggctggcaggactctgcaactcaggtggtacctgagagaactaacaactagaagctgcctgaccacagctggagcaacaagcccttccttgaaggtcaatcttggtggtgcacctccatgtccatcatgccttcttggcccagttaactcctagtcatttttaaaaatcactgctcaaagacatttcaacttttttccttttaaaaattgatttatagttgtatgcgcgcacacacacaaatacatctgtttaaattgagcctcctttagagacagtgagacctgaggacgggacagttttctgtttacaggctcacctttggggaccagctcaatgattttttgataactgccttttatgtaggaaaaggagacatgattatcatacattgccctttattatttttttttgtctgagcaacatttgcacctaagtagaagcaataacagcgaggctgaggctgataagctgaattagtgacataatgatgctataaaggagttttggattgaatactttgttgtcctttaacgttatgcacatagagggcagactggccaagcatttcacaaatgaatcacattcatcattggaggattgcttgattattgcaaatccattaccaccattaagccactatctgctgattccaaccgtaatttagcacaggacacaaaatacacctcctgcagtcactgtacataaaggttgagcaatttataattttagaatatgagacaaattacgtaattatttgacctgtattcactgagtaactgactaaataagtaggtcaagaaggaattaggaaaacttggataatccactcctaaataataggcttagttatcaagggattgtgacagatacatgcaaagatttcatatctccgaatcgttactgtgtttacaaagcatcatctcaaatcttttaaaagtatgttaaaatgagatttagtagtatatcctaaaatttgcatttactttttaataaaaagatgactaacattggagatgttaaaatatgcatttaccccaaaggcatttgttaacttctatatggatgaaaaaataaaattgtcatatttagaatgcacaataaatattcatcatctgatcaaatgttgatagtatatgaaccttaaccttcccagaaggaaagtgcttagtggtacagactgatcacttttacatagatgtcttcttccagcatctcataaggggcttatatttaaaaagcagtctttaataaataataattctttaataaaagatgtagacagttttttctatgaagcgtcactgcattcatgaaacttagaaaaaatgcttagaatggatttctgcatcagatgactcagaagaattaaacttgataatctgttgaataacatctgcacatgcacgaagcctatgagacaatcaaatacatggaaaccaagtaatgaaaatagaaccaaggctacatatgtacacctcttagggataaatatttccttcctttgttgttttttttctttattttaggtaggcaaacatttctgtcttcttttcagttcagccaataaatatagcttgcgttaaatgatggtatgaaatcaggggttttatctgaccatattttgtactttgatcttacactaaccttgcatgtaagatacacagaaatgaggcctagaagaggttaagcaacttgtccaattaccacaattaatagcaaaggcaaaatttgaacatatactttaaaaaacaattatctatagtattcctcctatccaaaaagcgcttttatatcttaagtccttggttaacaataagtctaatgttttatacactgtcttctctagcttgttcattgaaagctagaaggtgagcaattctataaacagtaaatgttgggtctaatatggcagaatccaggagtaatagtgaacacattcagtaaatggtatggcatagataccaatgaatcagaatagactcctagcctttgagaatagacttaacttctggtagaatctattatgtctcattactaattggccctaaaatttctatttatcactgaagatcaaggacattcatatttaagtttgcatggttcttgctcaaggaatgcattttcttatgaaaatttatttccacatgtaggtcaaaaatgtaatgaaaaatatcatggctggattgcaacaaaccaacagtgaaaagattctcctgagctgggtccgacaatcaactcgtaattatccacaggttaatgtaatcaacttcaccaccagctggtctgatggcctggctttgaatgctctcatccatagtcataggtaagaagattactgagacattaaataacttgtaaaagtggtgatttagactctgatgacatatttttccccagtatggttccagatcatgtcctactttacaacatgttatgtacattgaccacattgatctaacgttccattggaatgaactaattaagaatattttccagtgttctatgggatacatataattcagttgttgaaacattaacattagcggagcgtgaaagtggttatagtggagggggagagtatcaatatgtttgacactgggaatcccagtaaatccaggttgtattctaactttgccgagaatggtgttggtctttttatacagataatgtgtttgtataagcctaaactatacaggtaaaaatgatactagatctcatgtgagtagttgtagttaaattaattaccatcatcagatacgtagtgtggagaaagaaacatctgtcttatcagatacacactttgatatcaaacaccataaagccctgtatactttgttctagttcagggtcataagatgctcagagcatttttagtaaccaagacaaagagcagaacacaattaattatatgacacaatgttttgaataccaacagaaacaattgcactggaacagcaaatcaattgctataaagcaagagagagatcttttgtggattttaataaaaagaattcactgtaatacagtgaaccaaagtccttaactatattccattcaacattatatttcttaagatgaaaaagattttttttgcttttcttgtgtaaagttcagtaaatgaattaataacagttcaagaaaaagcaaagcagtgtaggaaatacatatgtatatgtacacatacacttagagatacaatatatactatatgccatatatactacaccatttatactctatatatgtatatatatgtgtgtgtgtgtgtgtatatatatatatatatatatatatatgcttgtgtgtgtgtatttgagagagagggactacagtcactttattttggtcttcctgttacccgtttcatttacccaacccagggctaaatgcattgcctaattaactgtttaaaatgtcactggactgcatcttgcctaattttcagtgcaagttatgttttctcactttgatttttttttttttttgaccactctaccattttcctatgccaatcctgcttctagaaaagctaagaatattaattttctctaaggtaaagctcagtccaagagcaaacacatttcaaataagcatctttgtcaggtgtcttgctccagctggatttaattaaccccatcccgactgggtttccaggtgaattactcagcaacctgatttagaacagaggcagacatgcattcaaatgtcacgttaagcagcgttaacacattgtttctcgtatgacagaagaaaatgtttccacagcctcaatacagttagatgagaagggatagagacattctgtctgtgttttaagtcaatgctcatttatgcagccacatgcttaacactaagggcccgaaaatattgattttgctgttcatgtacacatttgcagatgaataaaaatatcaaggatcaggttatgtggtccttgttggctctctaacgtttttcccttcaagtggaagacttcaatcctgcaagcatgttcccactctatatttgttaatattctatttaatgatttctgaatacatttgtaggtaatacagtaaacatacccaaattgccctgttttatctgtccctgacccactctttctctgtcaaaatatcctcatttatatactctctcctgtcatattggatgaatcatcagtaactctctttatgtattacatggttacttttcaagaggttcttcacagttgtttaatgttctttcatgaatcatctcccccttctttttgtatttggcagatgttcatattctttatctaaagaaaaaaatggttgaactctctgttccatagcgattgtcgttggcacaattaggaatgtcatgaggtgccctcatttcaataattgagtggttcaactatacagaacaaagacatgtagttaatatagagcataaggattgactaagtgtcatggcagttaaaagttgtgtgataaaacgcaaagtccactacaatacccttcaaaggaagccagatttctactttttgtgttaaaacccaatgataattgcttagaaatatgtacaaaagatgcagataaaattacaataactataaagttacaattgtcttcctaaatccttattttagtgtattaccacagcaaattagaagcaaatgaacactagaatcaggagcaaagggaaaacagaaacacaatgtgtcttcatgaccccaatcttaacttaccttatttcaattcttagatgcagtcactgtcagctacttgtactttggttcctgctggttataataatatgtgtgataatgtttctacttgttgacaaactaatttctaacagtataggtatttactccatagtatgaaaaccagccatattatgtttcatccccaggtatttcctaattttattacttataatcattttatagttgtaatttttgcttttattacattaaatggtatgagtatacctcattttaaatttttaccaagtttagaaaggaacttttgaccaatatgaaaaacgagaaaatcatcacacattcttactctcgcctcttctccacctcccatttcggattacattctgtttgcatcagtagtatttgtaacatttatatcagttctgtaaagataggtgtttttggcttgagtctgtaaattgaaaatacatcactcttcttatataaatgtaattaacattacagcaaaataatagaaacgaatgtttttaaacaattattattttgtagacaccgttctaggtaaaatattcaatcaagttccatgacgtagatgctgtcattttacccatctcacaaatagataaattgagtcatagagaggttacgtaatttacctaaaactgtttggctaacatgtggtagagctaggatttaaatttacactatcctaatcatggtgttgatttaattaaaaatctggtgatccttggttgcaagtcaataaattatggtccaggttaacattaaatgctgtgtgggtttccttcatagttggttagttttacaatttttatgcatttgaaagtcatagatatttaaaatgttaattaattttaatagtataaaagaattcaattcatttttaatgctagacgtgacctcaaaggccttttggttcaatgctttttgaatgagaatgccaaagctcaaataaattatatgacttagataagatatccacacactcagttggttagttagtggccaaggaaatggggaaggtaagacaagggaatacagcacgaatgcataagcaatgctcttttttctcatcatactcaatttaaccttgtatactatgccatagatgagaaaactagtttctcatatgttcccacctatgtcctttttttactcccattgcctacagaaaaaaatgaagataaggcagagtgcgcatagtgaacttaaaagtcccctaaatattctacaatttttaaatttttttatatatttttcataacaaaggcattatccaatttgtaaataagctagtttccataagcttgttagctgttaggggtattggaaaatatggagggattcgatttcctaataattgtaaaaattctggtgtattaactagagtagaagcaattaagaagaaaccaataaacctatacctttatttatgtatttttttgagacggagtctcgctctgttgcacaggctagagcgcagtgggccaaccttggctcactgcaacctccacttcccaggttcaagcgattctactgcctcagcctcctgagtagctgggactataggcacgagccaccatgccctgctaatttttgtatttttagtagtgtcggggttttaccatgttgtccaggctggtctcgaaatcctggcctcaggtgattgacccgtctcggcctcccaaagtgctgggagtataggcgggagccactgcgcctggccaattttgaattacagttttagaaaaataacagctaaactacctttgtaactttttttttgtttttttcgttattttgtttttttgtttttgcatagcatgagctcttaaacaggagtccattaatagattcaaatattctaaaactgtatgtagactctgttcacagatatggagagtttttttgtaggagtagaagtttcatagctctcaacagattctcaaaggtgtctgtgattcagaataggtgaagaaccacttgactaatgacttccagtgctgttgggataaattataatacgttaacagccaacaccttatgcaaactcagccagtttctttcttttaaacctatctcccaccacttgatacttagaatcttccaatggagccaggcctgtgaggtcttgattatctgagcatgttttgcttttttccttccctaagaactttaattctctaacgctcacacaacttagaattctattatcaatacattttttttaatgcaagtcgaaacgtctatttaatctgtctttcagcctcagaaaactttcttgaccgcttcagattttacaaaacattttcttattgtctgtgttttttcacatttagagtttaattaattcatatggcttcttcatttttcttgctcattaaatttaaaatccttataagacaagaactgcctcttacactcctttgcattttctctattatcaagtaacatggtatgtaagtttcatgtgctcatccattctctcgtgtagttgataaatatttgttgagcctttattttgtgtcaggctaggtttccagcagtgaacaaaataggcaataaaagattgtacattctagtggaagagaaagatacacagagaaatttaattaaattatataatacgttaaatagtaagtgttaatgagaatagtataaagcagataaggagaaagaaaataagtatatgtgagtttgatttgaggcatgcagttttctttcatttatctatttaggagactggttcttcctcagtcacccaggctggagtgcagtggtacaatcatggctcactatagccacccaggctcaagtgattctccaacctcagcctcctgagtagctgggaccacaggggcatgccagcacacttggctattttttttttttttttttaataagttgtagagaccaggtctcactatgtggttcaggttggtctctaactcctggcctcaagcaaatccttcagcctcagcctcccaaagtgcttggtttacaggtgtgagccaaggtgcctggccagcatgcaattttagatagggcttgggcagggaagaacttatcagtgatgtgattttcgagtaaagacccaatggaagtaaaggagtgagccatgtttatgtcttcgaaaagcgaattccaaatccaagtgcaggaaactatggatcctgtttatggaatatgaggaaagagacaagaaataaaatcagagagttaatagggacctggaccctgttggacttcgtagatcacatgaaatacgtaatttgtacttcccctaaagcagagatttgagaagacggatatgatgaaacatgttaacagatcactctggcaactctgctatgcactaattaacgcaggcaagagtgagagaagagttatgaggctattgtgataattcatgcaagataaaatggattttggactagagtgatggcagtgaggatagtcagaagcagtcaaattctgaatacattttgaattaaatgttgtgtgagagtaaaatagtcattaaggatgactccaagggtttttatctgagcaactgcaattttaaacacattgttcattattgaggaagggagaacagcaagaaaagtaggtaggtttgggggagtatgatgaggataaacatcagaagctcagttcaggacacttgaagcttgtgattactaaatggagataatgagtgtttagaagaatctataatttgaagtttagggaagaggtctgggttagacatataaaactgggcattaccagtaaatggctggtattgaaatccacgagactggatgagatagataaatttttgttgcttggataagctagcgtagattatttgtcatcttcaggattttcttttttccccacatctttattgctgtataattgacaaataaacgttgtatgtatttaaggtatacatcctcagcattcttttttgatacagggtctcactctgttgcccaggctagagtacagtggcacgattatggttcactgaaccctcaacctccctgggctcaggtgatcctcccacctcagccttctgagtagttggaactgtaggcatgtgacaccacacccagctagtttttctttctttctttctttctttctttttttttttttttttttttttttttggtagaaacaaggtttcaccaaattgtctaggctggtcttgaacttctgggctcaaaggatctgcccacctccgtctcccaaattgttgagattacaggcatgagccaccacacccaatgagatcttccattaaaattattacttgtttaaatagaaatattttaaagggtaaatgaattacactcaagacttaaggactatgggcattggttgtcaatgaaaattaagcatggaagtaaatctcatggaacattctagattgatttatatttgtctttgtgtatgtgtgtatgtgtatgtgttttaggccagacctatttgactggaatagtgtggtttgccagcagtcagccacacaacgactggaacatgcattcaacatcgccagatatcaattaggcatagagaaactactcgatcctgaaggttggtaaatttctggactaccactgcttttagtatggtagagtttaatgttttcatctgagacttgtcatttctacacaaaatacaaaactacatatcttaagttttccaatactgtagatatatttaaaatgttcagccttcttgcactatattatgaattgtcttatttaattctagttctcaaaataccagtatctaaaattgcagtgaagacttttaggaaaaaagcctttaaaatgtgtatgccctatggatggagcatactgcatttggagtgcattgactccaaataattataaaaagttaatgttttgcttatgctaccaagagatttgatagagtaatcagctataattaattagctactcttgccaatttcattcatatactctataaaaggcaacatggtttactatttaaatcaggaaatctattcctgccactacttctgttgtaatttttcactctggggagatcctctgttggatggttactcattttctgcttctttagttgataggcagaagtgtatttatatttttattacattacacttcaataactttgactcttatctctggtgctacatagtcataccttccagacgtagagattacagagataataacactgtgacctctactcttcttctagcctatgaagtacactttttgccatgccaattttgaaatggtagcctctgttctcaattctcaaggctttactacactctaaaatcaggagttggaaaagtgaaatcggtgggattgaagatgatatttgggtagaagctgttctacaatagaagctgataattaaatgcttttgggaatattaaatcgatttcatcaattccaaaacaggagatctttcaatatggatggtaggtcccatcaagaaaactcaaaaatgacccagaagacagccttttgccagtgaatttattatcaaccagaatctagtactcagttttgcagacgcagaagcctgattgcctcagatcatctagcagatccacattggggtgggaggagttaactttaagtttaaaaagtgatatataaataaaaatggaaattcagtaatcttaaatgagatataacaagcagcagaatattcacatacaattgacaaatatattgctcttgataagcacatgtacttgggaaagcaaattacaacaaaaatgttagtttgtgaagttgggatcagattaagttgacttgaaatgtttcttctcctttggataatgcatggctgaacactgaatactgtaacccctttttattgcttctatacacgatagtatccctcctacccctgtttttagctctaagggagaaactattaatcctacgtccttagtttgcagtataggggaggattactttactattgactcgtagtacacatttgtatgttttctcttagttcagtgaggtagaaagggcagacataatgaaaatacggacttcaacctctgaggataaagagctatactgtatgaatttgaaagataaggctgttaatatgtttgttttttattgaatcacatatggtcagttcccattattggggtgtatgctctagttattcttgtgtgtgtcctatcctttcataaaacagtaagagaagatttaaaaatagatatttttcttattaagtgacaaaatggcttttgacctctagtgctcctttgaacttacagaataggagtgcctaaatgggcatccacatcataatcagaaaataggtaaatatatacacctatgtatatatccacaaaaaatttaaatgaataaaaacaattttaaaaagtaggttgacgagcctgtaatcagaaaaaggcaggtacatgaatagtgtattttatagctaaaagagcctggtatacctaactccatatgctctcctaagtgggaagtatatgtagaaaggtacattgtatatcctataagatcaccattttactgtctcaaacttcaacaatttaaaatcaacaaaatgtaatatgaaatacaggctgattaatgaagatccagccactgcttatggtctcgttttcccaataaaatctcatatctgtaaagcctttctatatatagactcttccaattgaaagagcatcttatcgcttaaacaggtttcctgtttatttgcgtagaggtgtttgtagtattctctgatggtagtttgtatttctgtgggatcagtggtgatatcccctttatcattttttattgtgtctatttgattcttctctatttttctttattagtctatctagcagtctattttgttaatctcttcaaaaaaaaacacctcctggatttgttgatgtttttttttttttttttttttttttttaaatgtttccgtctccttcagttctgctctgatcttagttatttcttgtcttctgctagcttttgatttgcttgctctggcttctctagttctttcagttgtgatgttagggtgttgattttagatctttcccgctttctcctgtgggcatttagtgctgtaaatttccctctcaacactgctttagctgtgtcccagagattctggcacattgtatctttgttctcattggtttcaaagaacttctttatttctgtcagaattctgttatttacccagtagttattcagaagcagattgttagtttccatgtagttgtatggttttgagtgagtttcttaatcctgagttctaatttgtttgcactgtggtctgagaggttggttgttatgattttcattcttttgcatttgctgaggagtgttttacttctaattatgtgatcaattttagaataagtatgatgtggtgctgagaagaatgtatattctgttgatttggggtggagagttctgtagatgtctgtgaggtccacttggtccagagctgagttcaagtactgaacatccttgttaattttctgtctcgttgatctaatgttggcagtggggtgttaaagtctcccactattattgtttgggagtctgtctctatgtaggtctctaagaacttgctttatgaatctgggtgctcctgtattgggtgcatatatatttaggatagttaggacttcttattgcattgatccctttaccattatgtaatgcccttctttgtctttttttgttttttttaaatctttgttagtttaaagtctattttatcagagaatagaattgcaacccctgcttttattttttttgctttccatttgcttggtaaatattcctctatccttttattttgagcctatgtgtgtctttgcacgtgagattgctctcctgactacagcacaccatttggtcttgactcttcatccaatttgccagtctgtgtcttttaattggggcatttagcccatttacatttaaggttaatattgttatgtgtaaatttgatcctgtcattatgatgctagctggttattttgcttgttagttgatgcagtttcttcatggtgtcgatggtgtttacaatttggtatgcttctgcagtggctggtactggtttgtccttgccatatttagtgcttcctgaaggagctcttgtaagacaggcctggtggtgacaaaatctctcagcatttgctcgtctttaaagcattctatttctccttcgcttatgaagcttagtttgactggctatgaaattctgagttaaaaattattttaagaatgttgaatattggcccctactctcttctggcttgtagggtttctgcagaaagatctgctgttagtctgatgggcttccctttgtgggtaagccgacctttctctttgactgtcctgaacattttttccttcatttcaaccttggtgaatctgacaattatgtgtcttggggttgctctttttgaggagtatttttgtggatgttctctgtatttcctaaatttgaatggtgggctgtcttgctagtttgggaaagttcgccgggataatatcctgaagaatgttttcccaggtatactaatcaaacttaggttttgtcttttcacatagtcccatatttcgtggaggctttgttcattccttttcattcttttttctctaatcttgtcttcacactttatttcattaagttgatcttcaatctctgatatcttttcttctgctggatcgattgagctattgatacttgtgtatgcttcatgaagttgttgtgctgtgtttttcagttccatcaggtcatttattgttttgcctaaactggttattgtagttagcaactcctctaaccttttttcaaggttcttagcttccttccattgggttagaacatgctcctttagcttggaggagtttattacccaccttctgaagcctacttatgtcaattcgtcatactcattctccatccagttttgttctcttgtttggtgaggagttgtgatcctttggaggagaagaggtgttctgggttttggaattttcaccctttttgtgctggtttttcctcatctttgtggatttatctacctttgatctttgacattggtgaccttcagatggggtttctgagtggatgtcctttttgttgatgctattcctttctgttttagttttccttcaaacaggcccctctgctgcaggtttgctggagtttactggaggtccactctagaccctatttgcctgggtatcaccagcagagactgcagaacagcaaagattgctgcctgttccatcctctggaagcttcgtcccagaggggcacccaccagttgccagccagagctctcctgtatgatgtgtctgtcgacccctgctgggaggcatctcctaggcaggaggcacgggggtcagggccccacttgagaaggcaatctgtcccttagcagagctccagtgctgtgctgggagatctgctgctctcttcagagccggcaggcaagaacgtttagtctgctgatgctgcacccacagctgccccttccctcacgtgctctgtctcagggagatgggagttttatctgtaagccgctgactggggctgctgcctttctttcagagatgccctgcccagagaggaagaatctagagaggcagtctggctacagtggctttgctgagctacagtgggctctgcccagtttgaacttcccagcgactttgtttacactgtgagggaaaaccgcctactcaagcctcagtaatggcggacgcccctccctccaccaagctggagcctcaggtccacttcagactgctgtgctggcagcgagaattacaagccagtggatctcagcttgctgggctccgtgggcgttggatctgctgaacttgaccacttggctccctggtttcagccccctttccaggggagtgaacggttctgtctcgctggcgttccaggcaccactgggtattagactcccacacaataatagtgggagacttgaacacaccccactgtcaatattagacagatcaacgagacagaaaattaaaaaggatattcagtacttgagctcagctctggaccaagcagacctaatagacatctacagaactctccaccccaaatcaacagaatatacattcttctcagcaccacattgcacttattctaaaattgacgacataattggaagtaaaatactcctcagcaaatgcaaaagaatgaaaatcataacagcctctcagatcacagtgcaatctaattagaatgcgggattaagaaactcaaaagtgcacaactacatggaagctgaacaaacctgctcctgggtgactactgggtaaataatgaaattaaggcagaaataaataagttctttgaaaccaatgagaacaaacacacaatgtagcagaatctgtgggacacagctaaagaagtgtttagaagagggaaatttatagcactaaatgcccacaggagaaagtgggaaagatctataatcgacatcctaacatcacaattaaatgaactagagcagcaagagcaaacaaattcaaaagctatcagaagacaaataactaagagcagaactgaaggagatagagacacgaaaaacccttaaaaaaaaaaaactcaattcaggagctgtttttttgaaaagattaacaaaatagatggctagccagactaaaaaagaagaaaagagagaagaatcaaatagacacagtaaaaaatgataaaggggatatcaccactgatcccacagaaatacaaactaccatcagagaatactataaacatctccacgcaaataaactagaaaatctagaagaaatggaaaaattcctgtacatatacactcttccaagattaaaccaggaagaagtcaaatccctgaatagaacaataacaagttctgaaattgaggcagtaattaatagcctacaaaccaaaaaaagcccaggaccagacagattcacagccgaattctaccagaggtacaaagaggagctagtaccattccttctgaaactattccaaacaatagaaaaataaggactcctccctaactcattttatgaggccaacatcatcctgataccaaaacctggcagagacacaataaaaaaaatttcaggtcaatatccctgatgaacatcaatgtgaaaggctcaataaaatactggcaaaccgaatccagcagcacatcaaaaaggttatccaccatgatcaagttggcttcatccctgggatgcaagattagtttaacatacagaaaccaacaaacgtaatccatcacataaacagaaccaatgacaaaaaccacatgattatctcaatagatgcagaaaaggcctttgataaaattcactacccttcatgctaaaaattttcaataaactaggtattgatggaatgtgtctcaaaataagagctatttatgacatacccacagccaatatcatactgaatgggcaaaagctggaagcactccctttaaaaactggcacaagacaaaaattccctctctcatcactcctattcaacatagtattggaagttctggccagcacaatcaggcaggagaaagaaagggtattcaaattctctgtttgcagatgacatgattgtatatttagaaaaccccatcatctcagccgaaaatctccttaagctgataggcagtgtcaacaaagtctcaggatacaaaatcgatgtggaaaaataacaagcattcctatacaccgataataaacagccaaatcatgagtgaactcccatttacaattgctacaaggagaatagaattcctagcaatccaacttataagggatgtgaaggacctcttcaaggagaactacaaaccactgctcaaggaagtaagagaggacgcaaacaaatgaaaaaacattccatgcttatggataggaagaatcaatatcatgaaaatggccatactgcccgaagtaatttatagattcaatgttacctcattaagctacaattcactttcttcacagaattagaaaaaaactactttaaatttcatgtggaactaaaaaagagcctgcattgccaaaaccatcctaagcaaaaataacaaagctggaggcatcatgctaccttacttgaaactacactacaaggctacagtaaccaaaacagcatgatactggtaccagaacagatacatagacgaatggaacagaacagaggcctcagaaataacaccacacatctacaaccatctgatctttgacaaacctgccaaaaacaagcaatggggaaagcattccctatttaataaatgatgatgggaaaactggctagccatatgcagaagactgaaactggaccccttccttaccccttatacaaaaattaactcaagatggattaaagacttaaatgtaatacctaaaaccataaaaaccctagaagaaaacctaggcaatacctttcaggacataggcatgggcaaagacttcatgactgaaacaccaaaagcaatggcaagaaaagccaaaattgacaaatgagatcttactaaatagctcctgcacagcaaaagaaaactatcatcagagtgaacaggcagcctataggatgggagaaaatttttgcaatctatctatctgacaaagggctaatatccagaatctacaagaaacaaatttacaggaaaataaccccatcaaaaagtaggcaaagggtatgaacagacccttctcaaagaagacatttatgtggccaacaagtatgtgaaaaaaaagttcatcatcactggtcattagagaaatgaaaatcaaaaccacaatgagataccatctcatgctagttagaatggtgatcatcaaaaagtcaggaaacaacagatgctggagagaatatggagaaataggaatgattttacactgttgggagtgtaaattagttcaaacattgtggaagacagtgtggtgattgctcaaggatctagagccagaaataccatttgaccaagcaatcccatcactgggtatatacccaaaggattataaattattctgtgcttatttcagcactattcacaatagcaaagacttgaaaccaacccaaatgcccatcaatgatagactggataaagaaaatttggcacatatacaccatggaatactatgcagcaacaaaaaaggatgagtttcatgtcctttgcagggatgtggatgaagctggaaaacatcattctcagcaaactaacataggaacagaaaatcaaactcggcatgttctcactcataaatcggagttgaacaaccagaagacatggatgcagtggagcatcacacactggggccttttggggtgtgtggggctaggggagtgatagcattaggggaaatacctaacatagatgacggattggtacagcaaaccaccatggcatgtgtatacctatgtaacaaacctgcacgttctgcacatgtatcccaaaacttaaagtataataataaaaagtttcttaaagtttacttatggctgcaaataagatgaggattcagcataagtcatatatttttaaaatatgtcaattcttgccattgtgttagggaaaccaccaagtacacatttatacatttttgctcagcatttttcaggagataatctcaatgatgattcaaagaaaaaaataataactcataagaatttttatttactgactgcttagtcacaaaagacagaacaccatctcttgaagtctcagacttagaacactctcttcgatagatttaccagcaaaattcgtgattcatgcctgtatagtaattgcttttgtgatgttcatatttttatttaaccagatattggttctgtagcttatgcatgatgttggctactctccaaagaaatttcattttaaattagttatgccccttaggagaataatgaaacatttggggagaattttattattgggggattgaagctatatttggtttaagaaatacctgccaaataatgctttgacaattttaaacataagctttgttgatagaattgctttataaaattaggaagtcattgaaaccttgtaggatttcatatatagaatttgatatgctttggccttaactggtgttttgaggcctgaggtttagttttaagtggaattgccttttaaaatgagtagcagtaggcattagcataagcgatttcaggagctgtttctagtgtgtttagatgctaacatatgcaaaaataagtacatctagggtaaacttaataaattatgtatgtttatgctcatagataataggtatatctctttaaaaatatccttttgtgaatcagacaattctcttcccgttatgatttctctgtaagacagtacattctacatgcgttggtcgtgggtttcatatacattgtttctctgagtttcaaacagattggtttgtttgccagtccaaaaaaaaaaaaaaaatcctccctatattaagagagtgctttgtcagctttcccctgtgaataacaaagtgaggatgttctctttaaaggaataaaacaaaaaatcagggataaaagattgcgcctgttctagatgtcttttgaatattagtgtagaaagccatttccatttaggatatgaaatatgatatggaaatgttcttacttatttaccagggtaactttagaacaaaaatgaataatgacagtcaaatttgaccaaaaaaggaaggacactaggactcgagagaaatttttgtatcctcaaaatgacatttacaaacccgttagggtttggttttaatcccctttattttgacttcctgagaatggtgacacggattctattttctgcttggctaatccctgcatcactcttgagttgtttttatagccttcttttccaagaattagctctgcctgttggaaagttttactcctggagtgaatgctttcagacttggctttgtatgcatgcaggattttaacctacaaaaataatcatggaaagatacatagaatttgctataaaagagaagaatatttttaaggcctcttatgttgggtttgatatcaattggctgaacaagggctgttttaacttttttccgcctctgctgtaatcatcacattttgataccataatggcaagaaatgtttataagtttacacaggttaaaattgagagggttaattctcaggaggattagagttaatttaaataaataaatatttttgtgaacataaacactaattttatatcatttagattgatttttgtctagaactcattatagagtaccttgttttcagaaaatctaatgcgattgcaatattataggtgttccttctctatatacggtatttcaactagaaatccttactgtaaatatttcagacaatttagagtcaaactctgcagttgaaaatatatttaagaaaatatttaagaaaatatttcactggcacttacatgaatgaaaaatggccattgcctttttgatgacaaagtaatatataccaaataggtatgatacagatgattatattaacattcagatattattgtagcaatttcctcttccctgatgggaaatcttgaaattgctcttcatgacaaaaattaagacgtaaatgttatttcccagtggcctaaaagttagaagaggcatgagagtattccagtgtgttctcttgatgttatgtgttgtacatctttctcagttcagataccataaaaaaactgagtattttctgggcagttggaaccagtcactaataaatgaaagcaatttttgttctccttatccatttcagttgtttggatgacaaataattgcatgtaactgtcccaaattcacctacttagacaacagagacttgaaaaacattaaatatgatatttgtgtgtgcgggagcctggcttgaatttaccctttataacaaattttggtattttctactaatctttcacattcttctatgatttgtcaccattttaactttatggaaaatggtcaatttataatttctatctcccctaggggctgatttgttaaagtatgctttagttaagtaagagtttcttactcagttggggaatttaaataatgaagtataatcatgcgattgaagatgtgcattatggattaggttctatgccaaatttgttcagaaacatttaaatataattcttacctagataactgagaatctcttttcaattagcttaccaggattattttcacaactttttttttttaattacaggtgaaataacaatatccttggcctatacagtgacattaagtgatttttgaatgattgacaagacattaataaattaataatgagaaatgcagccatgaggttctaatgctaaataatatgtaatagacactttgtggatggttttcctagtcatatcatcacaatgagttcatgagactaaagaaatatattaaaaacatctattggtatttgttaattttatttcagctatgaaggaatacatgagatattaggtttgattcagaaaagtgttctatagttgatatctgtgtttcttgtcacagaattttgccttggcaaaaacattttgaccattctaatgatggtaaatgagaataaaatggcataagtagtttaaaattttctatgtggttttaagtcagtgataatatttgaatgtaatgtatattttgctgatagttggaaaacttacttcactgtcttcaaaatggagttaactgtgttttatacataattataagtgatatcacagggctgggtgtgatggctgacacctgtaatcccagcacattgggaggccaaggcaggagaattgctttaggccaggagttcaaggctgcggtgagctatgattgtgccactactctcaagcctaggcaaaagaactgaggccctgtccccccatcccacaaaaacaaacaaaaaaagacatcacagaacctgcaaatgaatatccaaaaaccttaaagctgggcactggaaaaatagatattaggttggtacatatgttttccaattaaataatttctatatataaaatgcatgtgacattttacagctggaacatgaaatataagatgaaaatatactattttacaacaatatttgggtaaaataatgatgaactaaagtctttgttgatgtcatttaaatcttataagagggaaatttaattgtcatacaataggatttattccttgcagagggaaacctgaagatttatagttgtcttgtcattttattttaaagcaataagctatcctcttagatttattctctttttagaacttttatttttattgatgcataacgttttacatatatgtacatacatgtgatattttgttaaacgcactgaatgtgtaatggtcaagtcagtgtatttggggtattcattactttgagtatttatcatttttatgttctgtgaacattttgagttctctcatctactttgaaatgtacatcatattgttgctaactctagtcacccctttctgctgttgaacattagaatatataccttccaactatatatttgtacccattaaataacccctttttatattcccttcctacccttcctagcctctggtatcttattatactctctatttccatgagaacaactttttttacacctatatatgagtaagaaaatgtaaaatctatttatctttgcctcgattgtctcacttaataacctgcagtttcattcatgttggtgcagaaaatgtaattcttttttatggatgaagagtattccactgtatatatgtaccacattttctttatccatttgttcactaatggacacttaagttgctattataaatagtgcctcaataagcatgcaagtacaggtatgccatgcatatacttttcctgatagttagaaaagtatatgattgctttccctttacatatatacttattagtggcattgctgacacatactctatttctatgtttagttttttgagaaatcttctccatactgttttcaatagtggctatactgacttatattctgaactacaacaatgtattaagagttcccttttcgttgcacctcgtcaacatctgttgttttcttgtctttttaataatagccattctaactggggcaagatgatggctcatcatgacttgatttgcatttccctaatgattagtgatgttgagcattttttcatatacccgttggtcatttgtcttcttttgagaaatacttattattgtcctttgtccatttttaatgtgattatttttttactgttaaattgtttgggatcctcgtatttcctagatattagtctcttgtctgaatagtttacaaatcttttctcccattcagcaggttgtctcttcactctgttgaatccttcctttgttttacagaagctctttcattttctacagtcccaattatctatttatgtttttgttgcctgcgcttttgaggtcataaccataaaatctttgcctagaccaaggtcctgtctgttttccctatgtttgcttcatgtagtttcagttttaggtcttacctttaaatccttaatccatcttgagctgaattttctaatatggtgagagacagggatccagtttcatacttctgcatctgacaatccaattctcagcaccatttgaagaaggtgtccttccccctaatgcatgttcttggtgcttttgtcaaaaacaagttgtatgtaaatacatggatttaattctgagttctctaatctattccattgttctatatgtctgtttttattctaacaccttgctgttttgtcaagtagtgtgattcataagtctttgttctttttgctcaggattgctttggctattcaggctctctgctggtctttgatcgtacaaattttatgatcactttttattccatttctgtattctgatagggactgcattattcaatgtagaatgctttgagtagaaagatcatgttaataacattaattcttctgaccgataaacatgggatgactttccatttgttggtgtactcttcaatttgttttgtcagtgttctgtattttatacggacctttccctcctgggctaaacttactcctaggtattatttccagccgttgtaaataggtttgccttcttgatttctttctcagccagttcattattggtatatagaaatgctactgaattgtgtatgttgatttttgtatcctgcaactttactaaatttatttatcagatctgagagctttctggtgagggtttagctttttctagctataagttattaacaaagagcagtacttggacaacgatttcttctattaggacgccttgtatttctttctcttgattgctctggctaggacctccagtactatgttgaatgagtggtgaaagtgggcatccttgtcttgttcttttttttgtttttggttttttgtttttgagatggagtcttgctctgttgcccaggctggagtacagtggcccaatcttggctcattgcaagctcagcctccagggttcatgccgttctcttgcctcagcctcccgagcagctgggaccacaggcatctgccaccatgcccggctaattttttgtatttttagtagagatggggtttcaccgtgttagccaggatgatctcgatctcctgatctattgatccacccacctctgcctcccaaagtgctgggattacaggcgtgagccaccacgcctgaccattccagttttatagggagaaatttttcagcttttccccattcagtttgatactacttgtagatttgtcatatatggtctttattttgttaattttttttgtatgcctagtttgttggagtttttatctcgaagggatgttaaattttatgaaatgttcttttgtgtctattgaaaggatcatgttttctgtttttcattctgtttgatgtaatatgtcatatttattgatttgtgtatgatgtatccttgtatcattgggataaattccacttgataatattacattttttatgttctattggattgctagcattttgtagagaatttctacatcagtgttcatcagggatgttgtcctgtattttttgttgcataattgtctgggtttggcatcagggtaatgctggcttcatagaatgagatagggggaattccttcctcttcaatttttcttggaacacttacaggagaattggtaaagtttggtagaattcagcagtaaagacatctggtcctggactgtcttcgttgggaaattttttaagattactgattcaagatcattactaattatagatctgttcagattttctatttcttcttgatccacggttggttgtatgtgtccgggaatttatacattcctctagatttttagtttattatttaatagttgttcagtatagtctctgaactttttatttctatggtatcagttgtaatgtctccgtcttcatttatgattttgagtcttttttttttcttggttagtctagcaagtgctttattttcatctttttaaaaatcaaacttctcatttcattgatactttgtattttttgctctctattttcttgagttttgctcaatttttaggattttcatccttctactaattctgggtttggtttgtttttttttctttgactagctccttgaagtactttgttagattgtttgaaatatttcaacatttttgatgtgagcatttttgctatatacatcccccttagcactgcttttgccatatcccgtaggtgttattatattttgatattcatttgtttcaataattttttgaaaacatttcctcaattttcttccttgacccaatggtcattcaggagtatgttgttcaatttccatgtttttgtacaggttccaaagtttctctttttgttatttccttgtgttttaagaagatattagatatgattttgattttttataaatttgttaagacatattctgtcataacatatggtctgtcctggagaatgttctgtgtgcttatgagaaaaaaatgtgtatgactgttgaaggaattgtcctataagtgtctgttaggactatttggtctaaggagcagtttcaagccaatgtttctttgttaattttttgtctaagtgatctaatgctgagagtggggtgttgaagtcctcagatattactgtatttgcatctagctctccctttagatctaatacttgctttatatatctgggagctctcgtgttgggtgtatgtatgtttagaatttttatatactcttgctaaacttatccctttatcattatataatgaccttattgtttgtttttactgtttttgactgaaagtctgttttatgtaagcatagctgctgcttctcccctttggcttcggtttgcataaaatatacttttccatccctttacttcaaatctatatgtgtctttacaggtgaaatgagtttattttaggcagaatatttttgggttatatattttttaatccattcagccagtttatgtcttttatgtggaatgtttaatcaatttacattcaacattattactgatatgtgagggcttatttctttcattttattgatttatggttgttttgaatattttttcttcatttttttccctcattatcattatagtgtgatggtattctttagtggtaacatttgagtaacttttcttgattttttttgtgtgtttgcactactagttgtttttatatttttatgtgttttcatgatggtagttgtcattctttcacttccaggtataggactcccttaaacctttcttgtaaggccagtatcatggtgataaatttccacagctttcactcgtctaggaactattttatttctccttgatttatgaaggctaccttggctgggtagagtatccttggctggtggttgttttctttcagcaagtttaatataacatctcattcttctctggcctgtaaggtttcttctgagaaattcactgttaatctgatggaggtttctttataagtgacaaggtgcttttctcttgctgtttttagaattctctttttgtctttggcttttgagagtttggctataatgtgtcatggacaagacatttttgaattgtatccctttttgagatctttcagcatcctgtatctggatgtctaaatctcttgctagacttgggaagatttcatctattattttgttaaatagggtttctaaacctttagtttctcctttaccttctaggacataaaaaatgcaagcatttcatggctttatggtgttgtatatgtcacataggctttgctcatttttttaaaattttttgttattttttgtttgagtaggttattttaaaagacctgttttcatgttctgagattcttctgttttatctagtctcctcttgagtctttgcctttgattctgaatgtatatagtagtatacttcctgtatgatttctttggatgtaaacagtatgaatggtgtctgtaacttcctcagtagcttagggtgcagttgttagcagaagctgtggtgaagttttgccggtgactgggacaccaagtggtccagtcttcaggccccagtggtggcatcagttggttgagcgtgcctgtcctcaggcctcagagctgtgtacattggcattgatgttagtgtgtccaggcaggctaaccctttggcttataggtggcttgcttggttgtcaggaaaagcataggtgggctgggtgggtacacaggttcccagcccaggggcagcaagcatggtgcgggtaatggcaatagtgggaggggggcaaccctctggaatgcaagcaatccatgatggtgttggtggtggatgcaacagattgggcaagccagttcctaggcctgcagatggtgcatgtaggttgacgccagctttggtggtagtggaagcttgagtgggcccaaattcaggccccaggaagactagtcagatgccaatggtggtaaactggggtgggagagccccaggtctctatacaaatttttatgtactgggggatttggaagagcagagctgggaagacctgtcctcaggactcctggtggtgcatgcaaccactggttattgtagtcgaggggcaaggtgctccccaggtcccttgtgcaatgctcaggtggaaggcagtgttggctacactgtggccctgctactggagagggtaaggttgctttccttgggagcagccataagcagttgcctgggtagcctgtgcgtcgcttgtgtctcaactccacagcagttcacagtgacagcatttgcaggcagtggaattagtcttcagtgtgcatgaagttgagtggccacccctctgttgggcaggggagggtttgctgccagtggttcctgccttggccccagcagttgcagccatgggtgggaaatatcactgagactccaggaatgtggagatagggaagatttttagtcctaggtcaggacatagactggtgggggctgggctctcaaaaccaggccatgttgcagctgcttaggactctagagtttgtggaacccagcatgggcttcttccgtgaagcaatgcctttgcacagtatctagacagctgtgtgttggtttgggggcccacacgggttgaagggctctcaattggctaggattgtaggaatcttgtacaagaatgtgtacctttgtgcatctctaattctctccccatgttagggagcctctccagactcctagccaatctcagctggatagagtgcctcatttccttctttttccttttagtggttttcattgcttctctgttgaatttcagtgttttctcttagttaatgtattcaaagtatgattatctacttggtactttggttcctctccatggaagaggtgagtaacagatccatcaattcagccattttgaagccccagattttttgtcttatggcaatcgtgtggagttagtggatcatatgatatccagttgaaaagtgagaaaactgttacaactattaaattattaggaattttatatattattacaatttaataaggtggttgaaaccagtgtttttacttttaggaaatatcctgtaatatcattcttgtgagatgttaatattgctgaataaacttttgcttcaaatcaaagcacatttttcccctgcaaagatttttctaatttatcatcagtgatataaactcaaatttgcaagttccttttggtagaagagtgcaaatgtttaagtagggcagtcatgttctagataatttccatactttatcttatgtcttgtacacaacaattccaggtaagtttatccttcttttataaatggaaaaactgaggcttagagagctttattaaaatcaagatcacacagccaatagataactgagctataatcaaatccagggtttatctcttcttaaagtccgtgttatttctcacaagactgtccaataaaatcggttggggaagctttatggcaacactgggattgaaactagtattttatttcactgaggacgggctgtgacatcagcaatttttagaagctcagtaagtgagagtatcctgcagctaagatagaaacaactacaatggaacaattgtttctgtgagatatgcccttttataggataagatccagaatctgttgtcccagcatttgtttagacttctagcattttcttccttaaaaaatgactaagcctgctgttcacatcttcaattactggagtactgcttattgctaacagttctgttaatgagaaattgttcatccacagacaaagtaaaaatagactagctgtcacataagactggccatcaaaacattctctttaggattaagaaacttgccttatctcctgtctgcacagttgtctctcttcattccttcttctatttattgcttcacggacatgtttgtgatagaatggtactctgactcaaacagtttccagcaagggttgcccaggtgagaggagctgtttgcagaggtgatccctgactctttgttctttaatttatttcttcttttgcctgcctctctcatcttgttactaattgacatcactgtgttctgctatctgaggtttgttgatgccttttgcagccaataaaaatgtctttcattggcagagctgataaagaactagaagaatttttaataataactaagggctaataagggaaaacaattaaaatgatggtaaaataatagttttcaaattagaagtctgatcccataaatccacttgaaataagcaaatggcttaattttatgatctctgatattaatgccataaataggttgaatttatttaccatttatccagggttagttttgctaaacagtttgtattttagccagatatgcaacttttactgacaggacataatgaactttggagcctgcactgttagtgtagttgtaaggagataaaattggcaattatactcacagatggaatagaatttaatctatgacatttacttagctgtacagaaggatacaaggcaggagatacactgtcatagaatctttgtatcattggatggcccagaagcaaccaacatacagatttccacatgcctctcacccaaatgtgctccatatagctgctaggacaacggccaaaatcagtgtggtttacttgacatgaagaaattgcagcattaatttcccaccaatatttaataccattgttgtcacataggacaaaagactatatattgcctctctgccccactccccagttaatttaatagtagtcctacctagcaaacaagagtgacaagaaattctactattatcttaactcttaatcctaagaaaataagtttctatgttcattttcctaggcagcatcagattaacctagggttgatttaactttttctacacagagccaactagttttgggttaaaatctgatttttgcctttattagttttaggccactggaaaattattgaggctcagtattgctcacgtgtaaagtaaaaatatttacctcccactgctacttcaaggagtaagtaaaacctgtatgtatttggcccgtaatatgagcccagaaacagtagctaaagttatgtcaaataactggaatgttgtaaaaattaaatggtccctttatactcctgtagggaaaactgatctttccagttattttgcctgcctctagaataaatgctgactctccccaaattaaatacaggagtcctcccttattcattacagtttctgctacccatggtcaaccgtggtccttaaattgatgagtacagtacaattagatgatggtggggagggtgggcagggagaggtgagagtccacattcacgtaacttttattactgcatattgctataattgttctattagttattaatctttttctgtgcctaatttataagttaaattttatcataggtatgtatatgtatgggaaaaacagtatatatagggcctatttgtggtttcagacatctgctgtaggtcttggaacatatcccccgtggaaaagggggatctactgtcatttcccatttgaaatcttgctggtcttcctgtgaccttcccactcattctggttttctggtctgaggaatactgctggctcacagctggtgtactgggtggtaatctttgatatccttgagctccagagtctaatctagttttcataaaagatttatactatatcttaaattcctcagagtggttctctctctctttctctctctctctctctctctctctcacacacacacacacacacacacacacacacacacttgacagagagattgattcacagttgtcatggatacatggtagatttctagcaagtctcctgaaggctggttcatgatagtaccttataattgtcatagtatttgtaagacattagttagcacacttgcaaaagtataactaggttttctcttgtagtcattacgtcatatgacatcgtaaaagtggttgaattggttcccagactctcagaaaaactcaacttctgaagctgggagtaatacatacatagtaatattgatgtaatctggtgtgatatttattaaacattaagtgctgggcacattgcttgatattgtataatttcgttttatttctgcaaaaactctaggaggtagagactattattttggtcatttgcaactgaagagtttatgtaaattgcccacatcactcagctagtgagttggagttaagattccctacttgtaactactacagaatataatcttatggcagaatattcctctcttcttccatgaatattttctttgcattaactaaaaggttactcattttattacagggctaattgggtttgtttttaattggatgcacatccatcagttgattccaaatgttttgaaaataaatggaaaagttttataaactagagccagaataagagggatactgaattctttttactatgatgtttccttgagagaatcattaaataattaaagtagaaggatgtttacaaatcttgcaagtatgacattctatccaagccacactaaagttatcaaagggagacactcaccagttatgaaaatattcccctctactctttctcagttaactctaaaattagatggcaaaggcatcaaaacatctcactatctcaaatatttcctcagtgaggtcgtgatgtgaacatctcttatctagattgaaatcccaccttgagtcatatgtggattaaaaaaaaaagctattatctgagaaagtctaaataaaaagatacattttacctaggctttaatatctaagtttttctgtatagaatcagttgggcaagtgagtctcttggaaaagtgatttgaaaactgtttttattaataattggaatacacacacacacacacacacacacacacacacacactcttattcctcctcaagaggcaagagtacatggtgaagcccttaataaattcacctcactgtagttaaacagcagactatgatattgttgtagttgttaatcaaagggactctgaaaagagacagccagaagtggggaaaaaactagtatagaaaaataacgattgggcatttgagtatttggaaaaaacctggtgaagtaactaggttttaaaagactgaagagaaagacaaatttcacccattgcaaaatataacaacgatataaaaatgagacataagctcctggataaaaataaataatgtatttttttctctctattatatctcgaattttgctttcaccaacaaactgcatgtgaaatacgaaaaaagttaaaaaatatggaatattaagggactataagatgagaaatttttaaattgttataacctaagtaaaactgctaaagctagttgtagcgagatctgtcttacataaattttccattaaatgataatatctttgcattcatcataaacagaaatgtacattttaagcaaaatcattataatagaaatgataatactccttacctagccttcttcacgttaatcttaacatagactagtgaagaacatagcaaaggtagtgcttgaaggaatgttcttattgaaagaaatctttcctcagattgatcaagaggcattgaataatcataataattcaaactttaatcttgcagatggaatgaaaatgtttaaaattagaattattgtcagagcttaaatattgttacttacacaagccaaatacattaatattatgagcactattgttttagctaatgtgtcttttactctgcagagtacatatagactagtctaaaaggttttttttttttaatgcttttatagagcacgagcatttgtgcaggtggctgagtagactaagattttttccaatgggttgatttgaccacatcattaataaagtagaaattctggagcccctactttttattcttagtctgacattgtaaattctttcagatgctacataagcattttaaagttatgtgccccaggcttactttgttcagtagaaatgcatgttaattcatcaaatgtctattgataactttacataaggaatagtgctatatactccaagtgtgtcaggaagtaaaagatatacagtctgccaaggtattgaaaattgcatataggccaacaaacaatatataggtaactgttatataagacagaatgtgaactaattcagagaatattttttaaagtacagagcatgtttttcattctaataaatgtacaaatatttatgtcaaatgaaaatgtggctgcatcataattcttatatgggattttaaatataccaaaatccacggatccatacagtagttcttactctgcttccctaattttattagttggacataaatgcataaatcgataagatgattttggagcgggaacctaactttttctatagttccttggaagttaattgatttcttaagtgataaagtccaccactattttgagtaaggtttagttaatgatttctgtttaacatgtgtgatttctaataaaaagttctggatttattttctcttgttgaaagttgttcattagaactgacacctgagctaacataagcaaaagtcattgtaagtccacacgtttgcacagatgggtgtccccccaccatccttaggtttgagcaatggatttttacaagtgaaactcagtgcaattaatcacctccaacatgagaaaatgctctttaaactattttaagtcaacatttacaagagaaattggcctataatacacctcgggttcttaacctttttgagagctatagaaacgctgcttctctataaaggtaacatatattgccaataaaatacataagggaggacatctacttataaaactcagaaaacgatttaataggaacagttgttttattagccttctgctctttaatggctgagatcatcctggggctatttaaaaatgatttaatttgtcctctaaacacacagatgagttccaggtgtgtatttcccccccccacccccgctccatgaatcaaccatgtctgcactgacattaatagcttggatcgggaaatctctgtaataataaatctatcttttaagttggtcatttaagcagctttaagtatgaaaaaagtgaagtattagaactatttcaatccatgatgccttatagattatactttaagaatacgactgtgcctcactatctgagaactggttctaggaactccagatactaaaatctgtggatgcttaagttccttatataaatgatgtcatatttgcatataacctatgcacatcctcctgtttacattaaattatctctagattacttataatacctaatacaatataaatagtacgtaaatagttgttacattttattctttgtgtttaatttctaggttcagggttacacatgcatttttgttatatagataaattatgtgttacaggggctctgagtacagattactttgtcacccaggtaataagcatagtacccaacagggagatttctatcctgttaatttttattgtatttcctgaatatttttttatttgggaaacaatttattttttttggaaatttttgtgggtacatactaggggtgtgtgtgtatatatatggtatatatgtgtatatatatgtgtgtatatatataccatatatgtgtatatatatgtgtgtatatatataccatatatgtgtacatatatgtgtgtatatatggtgtatatataccatatatgtgtatatacgtatatacacatatgtgtatatacgtatacacgtatatacacatatgtgtatatgtatacatatatggtatatatgtgtgtatatgccatatatctatatatatggtatatatatatacatatatgtatatacatatggtgtgtgtgtatatatacaccatatatgtatatgtgtgtgtatatatacaccatatatgtatatgtgtgtgtatatatataaacacaccatatatgtatatatacgtgtgtgtgtatatatacacacaccatataggtatatatatgtgtgtgtgtatgtgtgtgtgtatataatttttgtgggtacatggggtgtttgtgtatatatgatatatatgtgtatatgtatatatatacgtgtgtgtgtatatatatatggtacgtgagatgttttgatagaggcatacaatatggaataagcacgtcatgagaatagcatgtcacctcaagcatttatcctttgagttataaactaattacactcttgaagttattttcaaatgcacaattattgactatattcaccctattgtatcaaatcagaggttatttgaatttgcagatacagaacccgcagatacggagggcccactgtatatcactaaatcattcatacctctccacctgtacaaccaccaccatagttcaagttattctcatctttttctgtgactgcaggaagaacttgacaatgactggccctattttctttctggatttaacttaattctcttttacacacaatcatctagcatgatatttacatagtttaaggccttagcacttgctgttccaactccctgggatgttgttcttccactctgcatttcacagctgaaccccagaaagattatgtcctttgttgatttaacccttctcagaatagcatgtgtctctgttactgcatacatattgaaactattcttagttttttgttttgttttgtgcttatgttatcacatactatacacaccaagtctgtaggctgtttttttgatattctagtgatttttaatgataatatttaatacatatatgagaaaagaacctttttaatgttaagggagagcatgatctgtgaaattatctgtctttaatttatctttggaaatgaacatttttcaaagttttcattagattgtattcaaaattggtttttattctaaaaaattaccatgttactatttcatatttaaatgcaactaggattagacaagcaacaataataatttttttcttacctgggagcctacatgaatactgagtgtattaagatatcaactgagatatcttgctatcttagtttgaggagaataccatatatttggggaaatagagagaaagtggagtgaacatgtaatttatgtctcttaaaggtgactcaaatgttctttatctgtatcttaaaatctttagtgagcattcttccttatgtttaggctagttttctctctgagataggtaaagtaagctactttgccttagtatgcggatgtatgtgtgtgcacgtactcatgtgcccatcttgtcaatacatggagagatggaataagacgaatgtagtatgtctggggtagaaatttggttgcaggagagaggctgacacattcacaagcagcagcaagggaagagggattactggagtagaggcaagggagaatttatttacttaattacataatacttatttagaatctacagtgttcccggtatattgagttatatatgagaatgcaagaaaatgacatcactagtttaaagatacaatgtcttctgtttttcaaatgtttcgttgattttgttttattcaatactgtttagtacaatattaacagagtaaacaacagtatgagtccttctcatgtttcactttgattgtatcattgatatttaatccaacgtaaaattcctaaccttcaaaaaataattctcacttaatgttccagtggagtttgttcccaccatagtactgctggcctatcacaatgctgtaggtagttgtagacttgttcagtcctgttattggtggtgacttcctcatgtgctgggacctttattattcacagctgaattcccagagcataagagtgccttttttttttttttttttctttttttgagacagaggctcgctccgtcgcccaggctggagtgcagtggcgcgatctcggctcactgcaagctccgcctcccgggttcacgctattctcctgcctcagcctcccgagtagctgggactacaggcgcctgccaccatgcccggctaatttttttattttttatttttttttattttttttttatttttagtagagacggggtttcactgtgttagccaggatggtctcgatctcctgacctcgtgatctgcccgcctcggcctctgaaagtgcgagtgcctgttttttaatgtacaacaaatgtttcttgaagacacggcttttacattagcatattacatgaaagtgtgagggtcattaatatgtgtgaagaccagttaggattttaaagttctgatcagatacgttatcaagctgatagattaaattaactgattaatccaaggaattaacattaacaagcaatgaaatggtcagtatccaagtattgaagttgtatttgggttttacctaatattttccttgatcttactggctactttgttgtctaagctgaagaaaggccttcctgattacctttatttaaataaaataacagtggtgaaggtaatttcaaaaaatattaactatgctaaaacatatacctgtggtttgatatacaagaagctgcagaaggttctcagaaatatgtaaaacaatttattcccaaggtaattgataattgtatgcattcttacagaataagctgttataaaatttcaaactttatctaaaactcaatagcacgtctcataaaatgaactaaatagttctgtcgggcataagaatgtcggcttctagtatagaattccatgtatggtacaaaagttgtagagagattgtgtaattgctacattcatcgtataattttagaaaaatcctcttggtaatttatatggtaaaaattgactgttacaattagaaacataaggcatattttgtctcaatggattttattgagtatgctaaagcaatacacactacatatcgggtaagtgtgtgtactatgaggggagaagtatatggatacacagatcatgatttctatgtaaaatttatatcaggcttgtatgggagaagatacatgacaagttaaaatataaaatgaccacataattaaagtataatttaaattgggattattataatttaaatattttcccaagaatatcttgaatagtaatctttaaaatttttctttttttgatttttttattatacttttagggtacatgtgcataacgtgcaggtttgttacatatgtatacatgtgccatgttggtgtgctgcacccattagctcgtcatttaacattaggtatatctcctaatgctatccctcccccatacccccaccccaccccaccccaccccaccacaggccgtatgcagccataaaaaaggatgagttcatgtcctttgtagggacatggatgaagctggaaaccatcattctcagcaaactatcgcaaggataaaaaaccaaacaccgcatgttctcactcataggtgggaattgaacaatgagaacacatggacacaggaagggggaacatctgtaaaatctaaaaataatttagtttcaaaagataactttaaaaatgtctaaatgctagtggtaaaaattaaatatgtagatgatttattaaacattttaaaaacctcatgaaaaagggaatgtgcgacaaaagactaatttgcagctatcaaaaaataggaacagaaaaaatgtgctagcatattaatataaatattaggtgtcattgtgtgtccgagcaacattgttatcagttcccatctagtaatgactctctgtgtgtgtgcagtaaaatcaataataaaggggatgaataggacgactttcatttgaaactaaatctcttggaattgtgtgagctactgtgccacctatcagtggaatgatgaaataattcatacatgaacaattagcttaaataatcagcttaatttagtcaaatttattacaggcaccagtttacaaaaataattggtgcccaagatatttaatacttgggaataccagaattagagtatatcggagacaaagtgaaatctggatactcaatatgatacgacttttttgtttaaacctgcatatttaaactctcctttggtagttggatgctggctccccaaggatactcatgtcgaaatccctagaacctgtgagtatagtacatgatacatgacacaggggaattaaggttgttaattagctgatcttaaaatagggagggagattaacctggattacctgagtgcacactatgtagtcaccggaatgcttaaaaatgaaagaggcacaagagtaggcctgagtgatataatttgagaaagactatacctactgttgttcgctttgaagaatggaggaagaccaggggttaaggaatattggaggtctataaaagctagaaaagggaaagaaacatgatctcttctagaatttccagaaaggaacaaagccctgctgttgcttgagtttagtctaataagactcatgtcagatgtctaacctactcagctgtaagataaaacatttgtcttgttttaagccattaagattttgggaatatgttacaacagtaattgaatactactgcactctctgtagttttttttctgttcagtttcttagctctggtctgttgtacttggctgttcagctttggggcctgacaaactgccctcaatggtagaagtccagcagtgctcatttctatagggttcgggacttgaatcacaaaaggcacgaagggaaaaactttttccctcaccctagacgaaagtccatattttttttttttttttttgcgaggatctgacattttaaaagatgtttagcagtagaaatccctactgttttcagggaatattatcctctacgcttcttacctggcacagtcatgggacaattacatcaacacacaatactttgtcctatatattctgtattatttttaattaacagcatcaactgacaaatctatgttgaaccatatgaagcccaggtctcacctacagtctcttttccagtaatattcagacatatatcagttttttagaattcttgctgggattgcttcttgtatggttaaatgaatgtgctcatgtgcatgggtatataattatgtgcatgcacacatggacgtgcgcacactgctggacatccaaaattgagcagcgatgtgcacagggcataagaatgtatacttgatacttaaaaggatttctaaaatttttacacagtaactgttgccatccttaagatagctctttccttaagtatgcaaaaacagttgggctgtttcaaatgcttatggaagcatctgaaatttccttgcagaagaatgtctttgttttaaatttacatgtctaaataccaattggaaaggtaaagatttgctcaatagaaaggagtaatctgttaaaagtttaaaaaataccgatttcttttggaaaactgcgaagtcctgaattcagaggtcttattcttgtttattctaatcaccccatctgaaggaagcataactttccccaatgactgaaataataacagtaagaatgagaatacatggaaaatgatattaaattcttaccataaacaatcttaaaatttttgctttgaggttaagttttctgagaaattccatacttgcttaaaatatgtttttacaaagtaataactgccattattatttacaacacattaagtactatcctagttatttcaattgcatcctcccattaatttcctagcttggtaggattccccccccaaccagaaaccaaacttaaaaactaggaacttccagtccagtctgtatccctagatgtaagattctgacctggataaattgataatgctgcgaaacaaagtgacctagaaatccagctaatcttatcagtgctcgtttttaattgagaaaatctaattactcagataattgtggagcgtgttgcatactcttaattactgtaaaaacaaaaaaaaaagacaaatttatgctgctatataggcctcacgccctataaaactggatatacttttttatgacccatttagcttcattcattttatcagtgcatagaatgcagtatgttttccttatttcatactattttgttttactttttgtaaccataaaacatcagctttcatgcacaagcatatttttggttggatgagtttgtttaattaattaagcatttgagaacatcagtggtttagttttgaggtgtcacaaatagaaaaacttagggaaaatttctcattgtattggaaacaatttattctgcattaataagttgatataatttggctctgtgtcccctacccaagtctcatctcaaattgtaatccccacgtgtagagggagggtcctggtgggaggtgattggatcagggaggcggttgtccccatgctcttcttgtgatagtgtgtgaatgctcatgtgatctgatggtttaaaagtatttgacagccttccccccgaccccactgccctgtgaagaaggtacttgcttccccttcaccttccaccatgattgtaagtttcctgggggcctccccacccatgtagaactgtgagtctattaatcctcttttacttataaattacccaaccacaggtactctttataacagtgtgaaaacagactaaaacagaaaattggtgcccagatagtggggcattgctataaatatagcaattatagaagtgactttggaactgggtaactggcagaggttggaacaatttggggggggggtcagaagaagacagaaagatgagggagagtttggaatttcccagagacttgttgaatggctttgaccacaatgttgatagtgatacggacaatgaagtccaggctgagatagtctcagatggagatgaggaacttgttgggaactggagtaaaagtgactcttgctatgctttagcaaagagattggtggcattttgccccttccctagacatctgtggaactttgaacttgagagatgatttagggtatctggcagaaatctgtaagcagcaaggcattcaagatgtgacttgactttttctgaaaacatacggttatatgcgttcacagagagattatctgaaatgggaacttttctttaaaaggaaagcagagcataaaagtttggaaaatttgcagcctgtccatgcggcagaaaagaaaaacccattttctagggagtaagtcaagcctgctgcagaaatttgcataagtaaagagaagcagaatgttagtagccaagacaatggggaaaacgtcttcagggtatgtcagagacctttgtgccagccccttccatcacaggcccagaggcctagaagggaaaaatggtttggtgggccaggcccaaggccccactgctctgtgcagccttgggacctggcttcctgtgtcctagctgcttcagctccagccttggctaaaaggggccaaggtacatcttgcaccattgcttcagagggtgcaagccccaagccttggcagcttccatgtggtgttctgcctacggctgtgcagaaggcaagaaatgaggtttgggaacctctgcctagatgtctagaggatgtatggaaacacctggatgttcaggtagaagtctgctgcaggggcggagtcctcatggagaacctctactagggcaatgcaggggggaaatgtggggttggagcccttccccccaccacagagtcctcactggggcactgcctagtggagccatgagaagaggcccaccatctagaccccagaatggtagatccactgacaacttgcaccatgcacttagaaaagctgcaggcactgtgaaagccatgggggctgtgctctgcagagccacaggcgtggagctgtccaaggtcatgggagcccaccccttgcatcagcctgccctggatatgagacatggagtcaaggcagatttgggagctttaagatttaacgattgcctggctgcatttcaaacttgcgtgggacctgtgtctactttgctttgaccagtttcccccatttagaatggaaacatttacccaatacttatacctgcattgtaccttggaagtaactagcttgcttttggttttacaggcttgtaggcagagagaacttgccttgtctcagatgaaactttggacttggaattttgacttaatgccgaaatgagttaagactttgcgagactgttgggaaggcatgactgtgttttgaaatgtgatgacatgaggcttgggaggggccgggagcagaatgatatggtttggctatgtgtacccacccaaattttgtctcaaattgtaatccccacgtgtcaagggagggaactggtgggatattggatcatttgggggatgggggatgggtggttcccctatgctgcactcatgatagttctcacaagttctgatggtttaagtgtctggctgttccctgccccctcctgccacctagtgaagagagtgcttgcttcccctttgcctttcaccatgattttaactttcctgaggcttccccagccatgcggaactgtgaatcaattaaacctctttctttctaaattacccagtctcaggtattccttatggcagtgtgaaaatggactaatacataagtatactaagtgatagaactacctagaaagaataaatccagattaacttaagatgctcttggaatcagtgtttcagtgtaattgactgtggacttaaacagctttaatggagaagttgcatcttacgaattgtttctttccctccggtcttagtcccattacttgaaagaaggggtacttggtaaatgttgattacgttattaaaaatattttaacttatttttagtaaaattgaataactctcttatattacaatcgtggaacccttgccctttagcaggccatttctcctaaggaatttcagacatccctaatcttaacatctttatataatgtacatactgttgtgcgagtgtatctttctaggggcccatttatcttaaaccgactttcctatgttcctatcatttaatgtgtttttccattggtaatgatatatttcttctgttccaggatgggccagatatcagatatcacacattgcaagtgtaaactaaagcccagagcagaaattcaaatggaattaaagtataaataaaaatataggtcagacagaatatggataggttgtaggaatagatcagatgccagatgtagattttaaaaaacatgttcagaaaatatagtattgaaaactaagaaagagcactccagaggagctttaaaaaaggagagcgagagaaagaaaaataatagaaaataaaactggaggacattgttaagtgaaatcaaccaggcacagagacacaaatattgcaagttctcactcatatgtgggagctaaagtaaattgaactcatggagatagagagtgggatgatggttaccagatgctgagaagggtaagtggggaggacaggataaggagggagtggtaaataggtaaaaaaaaaaaaaaaaataaaaagtatatagttagatagaaggaatcagatctagtgtttggtagcaccctagagtgattatagttaccaataatttatatttcaaaataatagttaaattggaatttagctaacataaatgataaatgcttgaggtgatggatgccctaatttccctgatttatcattacatgttgtattcatgtatcaaaatatcccatgcaccccaaatgtacaactattatgtagtcataataactaaaataattaacgaaaatgaacctcatctaataattggacatttctctcgctagctataaataccaggctttcagtcagctctacttttagtttatgaatgaataccatagaaacacctgtaatgtcctccagtcaaaggtgttgatcacccaaagctgagcttgttaaatttacagggaaagggtaagcaccaccttcagggaatagtcatagcctctcagaagaggagcatgacggaaggatacttaagagttttacacgctgagctggatggttctaagtatgctctcgacagattggtcagaattagcttaccagatgagttgctgtgacagtctgtggtgttatcttggaacacatgagtttgcccgagtttctgtaaatctacttgagcttaaacaatttgatatgtttattttccccaaacgattttatgttagccatcacgggtaattatgcttggcataagggactcttgcttgatataggggggagtctgttgtatccgagttcttagatcatcctatattacatcctatattaactctttaggatacagggattgattagggagtgatatattagttcacttacatagggagaaatgatcaactcagaatatttttgtccctttaaaacgtctacctctatgtaagagtaaagagcataggctcttgagctgcactgtctttgaatcctagctctgctacctaccagatgtgtgaccttaaaaactttacacaagcaattagttcgtcagtttcctcatttgtgcaatgtggttaataataaatgggttaatgtatgttaaatacttcatatagtacagagtaaagactagttattgtaactcatgctattgctgatttttaaatgatgtttattttaattcaattgctgttcccccttgtaaacgtagaaagaaaaggttaggaaagggagatgtagaattctactaacaatgacttatattagtagttgggccaataggccctccaaaggagattcatcttgtgggatgtaagtgcatatagtagaatatgtcatgaattaataacggcattcaaaaatgaagcaaagacctgtttaaatgacctcagggagaaatcagaaacttttacagcagtatctgctttaggaaatagctagtgatttaccatttcaaattatgaatggccaaccaatgccctcatcagttaggcattgacagcccattcttctagttctatcttcttctgtaccggtttcaggtgtttccttctattactccttgaattggctatggcatagtcagagtatcaaaatcactggcttagttaggacctcctagtgctctatataaatatattggtatttttatctttttgacttggaatggtttcatttaacatgtaagatacttagatgttgagcccatccttgagaagaataatgtataaacctcaaagataaaacaaaatcctctcattcttgatcagtgcttttagtttgagcatgtcacttggattactgtgtctctggctctagcattaaaatagtcaacctctgaaatagcaaaagtggtacagaaactcgtatattttggagagtcatcacagggaatactatttagttatatttaaccaattgttgttatgcatctttcaggggtgagacactgaaaatattgcaaagacataatcacagcccttgatataatagtagtttgaaaaaagccgtattggggcacagaaggagtagtggcagagtgtgtgtgtgtgtgtgtgtgtattaacaaaatgggattagggaatttgtcaatgatgagatgacatttatgttttcacttgctgaaaactttagaaatctacttagtttgctaggtttgtagtggcttctgttttcatctgtagtagttacaccttaagtgtgacaaactttcatttacttaatcagtttcagtctttctaaggctggcatgatcactaaatgagaatagactcatcttaattttcacatggcttcaaaattatagaaatattaatccttccaaaaaatgtttagatgtagtccaaaagatttgtctgtggtctctgaaaagtgtttcactggagataaagctaatccagtttaaagtaactttgtaatcaaaattaatattgcatgcgctaatcataggctctccatgccttcacttctagtcagatccaggctcattgggagtcaagtgccagagaggtcctgcctcaggacctttgtacttgctgatcctttaatatggaaatgtgttttctccagagagtcatcacaggattcaactgcttatttcattcaactctatttttaaatgttcctgtagttgaaaggctttccctctctaaatcctctcttaagtagagccaacctctccatgccttttgttccctctctttaccttgctctatttttctttataggacttgccatgacctgattttgtgtagcatatttatttgtccttatttttatttctagtcctagaatttaagcttcataagttaaggactttgtacattttattcactgctatatctcctggtcctaaaacagtaggaacttaaatgtttaatgaaaaacataaatgaatgattaaattactaatagaatctgtattccctctccaaatgtacatttggtattgtactaatgtatataattttatgcaactcataaagtaatcgacatatttatattgctttcaaaattagcgccctcaaatacatttaggttagaaaaactaaaattaatacatcaattgatcatcaagcatagaaaaggaactccaagaacacgtaaacattttacatctaaggtcttactatacttttggtattaatgtatattgtattaaatcattgtaaatgtagttttctattccgaatagcaatactagaggaatttactttaaattctacattctctgctggatgatcccccaaaactgctgcccagataattacagttccctctcttagcttgtcttccagtctctaatttcctcctactttaaatcattgttcacatgccaccacaattagtgtttgaagatgacaggtctaagcatgtcattctcttgttaatacaaccccatgttctttctaaacaaaatccggctttctatgcctgccttttattgcttcccaccatgtgttctgtacccattcttaaactaaccttcagttacaccaaccttgggaatacatgttcctgaaccacaaaagggtttcctccatgtttttatcttacagaagtcacttaccttagtacttcatgcatagtctgtactaagtaagggtttattggtgatgactatgtgttcaatcttttaaaaactttgccactgtcctagaacttaaagatgactattccatgaagctggtttatatttcaaagataaaatgtcatatttattataagcctcctgtttttttttttttctggtttttcctggatagtaatgtttactcaatttactaataaaactagaatatatcacttggctataagctgtagtaccacagaatttgaggtgacacagaaaaattattcatctgctcttatatctttccaagggcatgattagtcttgatggcctggtgcaactgaattctattaattcttatttaaatcatcagaaacaaagtgtgatctcgtgtcactgaattagctaaacaaccttgctgctttaacacataagtgccaaaatagaaaggagcttaaaacaatagtttatatgtagcccaggtataagtccaatgtaggtgttccttattggtgactgatatggtttggctgtgtccccacccaaattgcatcttgaattcccacgtgttctgggagtggcccagtgggaggtaattgaatcatgggggcaggtctttcccgtgctgttttcttgatagtggtaagtctcgtgagatctgatggcttcataagggggagactccttgcacaagttaccttctcgtctgccaccatgtgagacatgcctttcgcattctgccatgattgtgaggccaccccagccacgtggaaccgtaaatgaattaaacgtctttcttttgtaaatcgtccagtctcggcaggtatttatcagcagtgtgaaaatggactaattacagtgactaatatttttctatatttttctgcctttgttgtggctctaccttcttcacagatgatgatgttttttgtttttttgttttttcatatagccattgaagagggggaagcaaatacagaaaagccacagtgacttcttagaagccttgtggtagaggtgatgcatatgtgctcccttcactttccacatgaaggggatgtgtgctcatgaaacatgtatatagccatgcctgtctacaaggataatgcagtggctggctgagtggctgcttctaagtgaaaaatctatactttaaaagctggagaaaggacatggttgtttgacagcctgtctctgccatagttaggaactatcagcttcataaataaaactatctggtggtcttctcaatggggagcttaattacctcaagtcaataagaggaaaatatccattagattcaattctatgttaagaaaatcgtggtcccagtgggattataatttctaaaatgaaggaatgtcagtaaatttaatggaaccttaagtataccatagaaaaaaatgatacattctgacattgaattttgttgatttaaataaatttattgtggtaaccatgctggttcccttcatgacatatgaatggggaattaaataatatacacaatgctttgctgaaaagtgttcaatttgtgttagatcagatacacttgtcttggtgacaaaattggcacaaagctttatgaaacccacgagtgggcaaagattgtatcagaaatatctaacggtataaagcaattttgtttttcattgttacgatattgacacatctccaagaaacacatccagggatgaatagctctattccccaaattctaaagacagcatctgacggaaatctaatttcagtcttgttattaaataagttttcttagtgtctgccatagtagacagtgtttgcaagatagcatattcattttttaacatatttttcttttgtgtgttataaataaaattaataaactgtcatattctactggtatccactgacgtttcttagttttactttaatctcaccattatgtaaattgactttgacagaatatttttagttgaaacattgctggaaattgaataaagttatgtgtgtgtgtaactcctgtgaaacactcaatgttatatctatatctcttatcaatagttaagcctttatgaaaataattgattctttagcatggtgtattgcacctttctcccaaacagagatttacagacacatagtagggtgtgtatatatatagatgagcatcaggtataacacataaatgcttatatatctaattggtgttgaggtctgaattaatgtatttttgaaagcatcggttcttgtgacagtagaatcaaatacttgcataatgttttatagactagttataatccttacaaaaatcctattgacaaaatagcattagcttaatattccagatgagaaaatgggctccaagtaattagatgctttgttcctgatcaaacactaagtggaaaaaaacccacctcattacaaaattttcttgttgaaagacttcagactgcctctaaaatagaggagagaagaaatagtctgacactctaaattggatataaacgtcagaattgggactataagtctagaaaaagtaagtatgtttaatggcacatatagaacttacagtcttaacaaatgaagctttttggtcaattttggagtatgatcttctataacacggaaaatcattttggggttttttttcctgaataattcataaatggagatggactaaagaaaatataaaggaaatagcataggaaaattttgtaaaaacttatttggatattttatgatttttctacatctgttttctaaattttacaccagggttccctttaaatggctacttttttggaaaagaaatctgagtatatacccatatgcaaatgagcctcaaaaaatactaggtgcctttagcttctgttaatatgaaattactaattcatgatgagaatattttattttaatgttagcggtgttgcttttggttggaagccaggtaaatgtaatcctattactatgcctataatgcggagtagttttgtttaatggtatgtattaatgcggcattggacagcttgaattgaatcagagaaatggtgttggcaagcattaaagactttaagagaatgcaaattttatatgcctctttttattgtaaattgacaatatataattgtataaatatatggcatacaaagtgatggtagaatttatgaatacaatgtggagtaattaaatcaagctagttaacatatctatcacctcaaagacttttgtggagagaacatttgaagtgtactctcttagcagcttcgaaatgagcaatactctattaactatattcatgctgtgcaatgcatttcaaattttcatcagaaaaatcagctttgaaagagtgtatgcaaaaattttataagcttctcagatgatatgatcttatatgtagaaaattctagagatttccacacaaaaaacctgctagaactaataaattaagcacaattgcagtaaataaaatcaatatacagaaataagttatattttatgcactaacagtgatgcagtccaaaaaggagattaaggaaacaattttatttaaaatagtaacaaaaagagtaaaatacttaggaattaaccaagaaggtggaagacttatacactgacaactacaaaacaatcctgaaagaaattaaacatttatttttataaataaatgaaaaggaaccccaggtttatgaaatggaacactcaatattgttgttgaggtatccgagttactcaaaacaaactacacattcagtgccatctctaagaaaatcccaattagtttttctgcagaaatagacaactctatcaaaaattcccatgtaatctcatggatccaggaatagttgaaacgatcttgaaaaaagaatgaagttgaagggtcatacgtcctgatttcaaaacttactacaaagctaccataatcaaaacactgtggtattggcttaaaaaaagggaatgtagaacaatagaatataatagccctgaagtaaactctactatatattgtcaaacaattttccataaggttgccaaggttttttaatgattttttaatgaagccacaaatgttgctaagaaactgaatatatacatttaaaataaatgaagttggactcttataaaatacacaaaaattaagtcaaaatggatcaggaagtaaacgtggccaaaagtacagaacttttagaagaaagcgtagacatttggaagaaaacataaacattagattgggcaattaaatatcttggatatgacactaaaagctcaggctacaacagaaaaattaggtaaattgaaatgcatcaacattaaaaacttctgtgcatgaatgaacaccatcagagtgaaaaggcaacttacggaatgggagaagatgtttgcgaatcatatattcaatagggaattaatatccagactgtgccaagaactcctatatgttagtccattcttgcattgctctaaagaaatatctgaaactgggtaaattataaagaaaagaggtttaattggctcacatttctgtaggctgtacaggaagcatgatgctggcatctgctcggcttctggggaggcctcaggaaacataaagcagaaagggaagggtgacctggcaggtcatatggtcagaacaggagcaagaggggtggagggagatgtcatacacttttaaacgaccagatttcataagaactctctatcacgagaatagtaccaagcggacagtactaaaccattcatcagaaatttgccccagtgatccaatcacctcccaccagacaccaactccaacattggggattacaattcaacatgagatttgagtggggacacagttaaattatatcatcgtagaattcaacaacagaaaaacagcaattaaaaaaatgaataaatgagttgatcagaaatttctctaaagtttggccagtaagaccatgagtagataatcgatatcgctgatcattagggaaatgcagataaatcccaaatgagatagcacttcacacccattaggatgatgattattttaaaacaccaaaaaaaaaaaaaaaaacccagaaaataaatatggttgaggatgtggaaaaatttgaacacttgtgaactgctggagggaatgtaaaaccttgcagtcactgtggaaacaaatatgttggtttctcaaaatatagaacgtagaattaccatgtgatccagcaattccacttctgggaatatactcaaaagaattgaaaaaaggaccttcaaaatatatttgtacacccatgtttatagcagcattattcatagtagcaaaagatggagcaactcaaatgtccatctgaagatgaatggataaacaaaatgtggtaaatgtatacagtagaatattattcagccttaagaaagttctgacacacattatagcatggatgaatcttgatgatgatatgctaaggggaaaaagccagatacaaaaggataacatatgattctatttgtatgagctatctagagcagtaaaatgcatagataaagtagaatggtggcctctagaagctgggggagagaaggtatggggagttatttaatggatatgaagttttttgggggaagataatttttggaggtggatggtggggatggtgacacaacaaggtaaatatacttaatgctgataaattgtatgcttataaatgattagaattatatgttttatgttatatatattttaccatgataaaaacctataagctttcttgtaaagttttagaaaatgtttggattcataagtgttggatgattgagttttatagtgtaaatttaatgtagttgtgctcaattgtcaattgtatgcctattgtctgtgagtatatattttccagattgttctctaaacataatttttaaccatttagttggaaaaaaaaaaaacctcaacttaaacccaaatggaattatgtagtccattcagtgcatactgtgaaatatattagtaacattttattcattttaaagattttcgttatcagtttaggaagaatgataattttataaatccatagcatactgttgttgtgtgcgggtaatactcattatttaggctgtttttaatttggggtcttttttaacagataatcaacaaacgttttttatttgcacacagtactcttagtatttcgttttgcttcagtaatagtaaatgaggctggggtttggagagcacgattgcttttggaaaagtcaatagagacatgtttttatcgctactgctttttttctatgttaattggaatttgacgtaaaattgattctgaaagatatcaaggtagacacttgaaatatagattggacaataaggttggtagaccattactgtgctttgaactagagtcattaatgtgattgtgaaaatttttactttgtatgttattcatcacttttctcccttagtggtgtttagagcatgatgagttgttactgtactgacaagtattagtctagtagtaatttctcataggctgacaagtgccaaaattcatcctcacatatgaatacactaaagcagacaaacactgttttcatctctgacactatctacagtttatcgtgatacattattttggcctacagggtcacaggcaaattatatttaatcactgctttaaactaaaacataactataaatatttttgcactctttaaatcagcataacaatccaatagacttcaagatcctgagataatatttaataacattaaaatgatttaaaagtataacgattgtattaaataattctgaataaacaatacttttgaatgaagaagattaattagcatgatcattatagaaatggtcctattaatacaaagatgtcaagagtcatttctggttcaagtcaattaagctacgttttaattgaaaaaagctgttcattgtgtacagcggtagcactcctgacatatcatataaatgaccccattaatgcaggagaaataaggtcaactgagacatttttactgaaaccaattatgttacattttaattgaaaaataaaagctgcttttattcaaaggaagcaccactgacactccatcatattccatagcctcctaatattgcagtaacttcctaagcagtctctcagttcttcgcattatacaaagttatctttttactacattaattaggtcatgtgttccctatttaacaccttctgaagactctacattgtacttagaaaaatgtctggagtctgaaagcagccagcaagaccctgtgtgatctgtcccctgcttgcttcttgatctcacttcacactggttcccttacttcaccaggctccggtcaagcaagaacatacttcttctccctctttatatagctgacaacttcctgccattcagtctgagccgaaaggtctcatcttcagaagaatcctttgcagtctaccatatgtaaaagagctctcctgatgagccctcccagccattcctgtatcctattcacacttcttgctttaaaatcatcatcattatctgaaattaccttgtttgattatctagcttatttcttctctgcttcccctactagaatgtttggtgtcaaggactttgtccgttggcttcagtactgtatagccagtagctaggagaatgccgaagagatggtaggtgaaaaatgtttgtggaatggataaataaatgaatagcaatagtacagaagtatgccatcttatttgttaataggtgaccatcggttgatagagtttcatttctcctgattgcttaactcagtaacactctcctgcaggagagctagtcaggactcagggtttttttgttttttttgattttttttttctttttttttctttttttgagacagagtcttgctctgtcacctagactggagtgcagtggtacgatctggcctcactgcaacctctgcctcctaggttcaaatgattcctcctgtctcagcctcccgagtagctgggattacaggcgcgtgcaactatgcctggctaattttttgtgtttttagtagagactgggtttcactgtgttagccagaatggtctcgatctccttaccttgtgatctgcccatctcggcctcccaaagtgctgggataacaagcatgagccaccatgcccagcccgaggactcaggtttaagtatgtgaacagatagttcagaagacgttataaactgttaatggaaagtctggaaggaacccagagatatgttttgtttgatctacaccttactacagatttgggtttctgttagcagatctagcagctctggggcaacattctgcaatggcaccatcctggtagtactgaggagtgctactctcctccctcaaagcgggcacattactgttcagtctggagctgcactcgccatacacacagtttatgtaactccactgacagactctgccactccagtcatttatggcatctgactttgattccacatggaaatctactgggtggacctgtcacatttaaagataatcatcatcatcattgtgtatgtgtgtgtataagttacattggccatttttctggggactgagtctgtctactccaaaagctgtgaaaatagtaatgattaaaagtcctcagactctatgattgtggaaattctttgtattctagaagcacacaattctaagacttctgagtgtctctcttcagtctcctgtgaagagcatcaccgatttatcactaaatgagcagattatatactggggatttagtgtagaatgtgccatacagtagctgtgcttcttgaagaaatccctggataggccaggtgggtttatggtaagagataaaattaaatagacgctgcaaaaaaaggagacaacattattaaagtcacaggaacaaatgacacttgtaaacatcttggacatgagttgataacatttaagtgtagtccaaagagttcaaataaaaaggcattgcaatcacttgagagagagagagaaataatgcccggagagtacatttgggctatattttagagaaaggccttgataggtagaaatagggaagaatagcattccaggtgaaatagcaaggcaaaagcaccaatgaagaagaaataagaggaaggcatattcaaggtatagaaaatcatgtcattatgtgaggtacaaaaagctatcgagtgtgcatttatatatgaggtatcatgctaggaacccaggatagctagatcaaaaggtatgcattaaagacattttgactaatttccaaatgatcataatgatgcctatatgcaacatcaatatatgaagtattcagtttcccattccttgcaagtaaacctgaatatgtttaacattatatcactctgttcttccctcctgcaaccataattcataagttattttcaccaattcattcaccaagcatttattgaacactatgtatcatgtctctgattggcactggggaaacaaatgtctctaatctcaagggacatacagtagaatgggagagagatacagttcctttaaattctggacctttccatttctcttctattttcaatagagcttgcagtcatggaaaatttattctctgtggcaacaaagtagggcagatatttgccctggaaggtgaagagagatagagaaggctttctgcctaacatttatcatgaggtactaacaaatatgacaattgaataatgctgttaaatactatgtggcatactgattccatttcacatacttatgtctcctctttttaatagaaggtagtgtaaaaagaagtcctgtgttacagtaatgtttcttttattatctaattgatccttgggtacgttacctaataattgggtatgtacatctccacatacatagcagtggaatagtaatagttggggggatttttgtgacatttaagaagaataattacaagagtcaaaagtataatataaacacaaaataggaactttccatttttcaatgcagatttattcagcatctttgcttctgattccatgtatttttctgcttcagaattctttttttatcctctatcttattttacagttaataatttcctgagggactactttctgagtggaaaattgttagaatcctgaagaaatgtatcacatgggcctgcctgggtcttcccccgccccccccccccccccaagaaaaacctgcatctgccttaaacataagatccagtagtcagtatgaaattcatcaagctaaagcttatctcgtctgtagttgtagctctctgaaactttaaaaaaggagttttaaactttgcatatctgaatttctgaggtagcattatatatgaaaccaaaaatatataaaataataagaaaattgctaaagaatcactttgtgaaatgatgaatccatttagcttagttcttctgtttggatatgatagccttattgccatagagaaattgaggtaaggcattaagagaacaagcaaacaattttgcagtaactaactcatctctcccatgttgccaggtgtgccgcatattgctgagcagtgaaaggattaagctaggaaagaaagtggggaaagtgctacctggaaatcagaatgaacattgaatatagaaatgcatctaagggggaatgagaaagagaagagtaaattaggtttttcttgagtcctgtctttgttacttccacattttgtctacaggattaagcattcagtgcctgataagtttagtattgtgccagaggaccccagagaaaaattagaaatgatcctttccttctagcaactttcagtgtaacttgagagtcaggactgaccaaaatagttcaataggtctgaagtaaaattatttgtgaagtagtaaatttcactttatagtgtatgaatgctgtagaaatatatgagagaaatcaacaagggctgtgatggaaaataggaaacatccagaagtagaagttgagctgaaacttaaagatagttagaattggataagataaaatgagtattcccagttgcaaaacaatgtgagagcatgtttcgaaatagagaagagggatgggcataggaaaaacatacagatgaagtaaaagagggcattttatcttttttatttttttcattttacatgtctgttttgtttgtggacgcctatttggtctcattgttctggctttgggagacaggcaggggatgctgcggagcacatggcccctatttgtggtcgttttgctccaggtgaaaataatagccaccctttattgaacacatcctgtgtttcaggcactgtgctaagctcttacactttgttatctcgtaatcttgagaatacctgtgtgagggcaaattgcagtaagagtaaatggggggtttgattccgaagtctgagattcttgcctttatgaccactgacagttaaggggcttgttacataattacaggaactcaagagtcttggtcgttgaataacaatggatcaagtgctgtgctgtgacccattattttatcaagtggatggaataaaacatgactactgtgttcatttggatgagtaggagaatgctgaactttgaaaggttatggaaggcaagcctgtagagaggtaccaaaatggcatgtagcaacacgcagggaggagaaagacctggatttaaatgcagtctctgccatctagagctgcgtgagcttgagaagtctgcatcatcttccctctctggcccctaaagctaaagaattaaaatgtatcaccactgctctctaagagttcagtttaagtgacagcaatagtcaagagtgtcagtttgagttttcccccaaagcaaagcctgacagaaagccatgattggctgattatcaaagaaactagtaagaaaactcaggaacatgtgggacctggaaaagtgagacaaggaagaaggaaaagctaataaagataacattgttgaactgatgaccataataggtaactgtacctcaaccttgcctgggacattatagaaccttatagaactgtcctcagaaatgtccctttgaaggacaatttattttcctccctcctcttcctcctcctcctcctgttgctagagctaggaagtgaaagggtgttaaccctctaacagcagaaacaggaactgcagcaaaaatgagagatgggttgatgggatacagtgcaaaatacaaagaggcatctactgttcaaaataaacctataaaggaatctgtattagtctgttctcatgctgctaataaaggcgtaccaaagactaggtaatttataaaggaaaggtttaattgactcatagttctacatggctggggaggcctcacaatcatggtggagggcaaatgagcagcaaagtcacatcttccatggagacaggcaagaagagaaagcatgttccgggaaactttcttgtataaaaccatcagatctcgtgagacgtattcactatcacgagaacagcatgggaaagacctgccgccatgattcagttacctcctaccaggtccctcccatgacatggtgggaattacgggagctacaattcaagatttgggggaagaaacaaccaaaccatatcagaatcgaaagaaaaattataaagtcaaagtagaggaaattctggagagccttgaaagttgggctaaaactagatagaatgtgtatgtctcaacattttctattatatccctgaatcatataacttgttaagaatggggttacacaaaatttcagttaggttggagagggaaattcaagagaactgttgggtgtatataacaagactatagttaatagcaatgtattgtatgcttgaaaatttcaaaaagaatagactttaaatgttctcacaagcatgtgaggtaatggatatatcaattggcttgattgagccatttttaaatgtatatgcctatcaagatatattgtatactataaatatataaaatttgtcatgttaagtaaattcgaaattagaaaaaaaatggagctaatctctttaagagttaaaccctgaattgtagggaatttcttgctgacgaagactaatttggtcttgaagagaatttcatgtcaccatgaacttatggcctgacttcaaaccagtgatgagctgtggagggatatagggcactttgctttccatcagatcctctcttaagctgttttgcatcacttaattctaactgtaaagttgggaaaatgtagatggggcaagtgacagcatatggtttgatatatacttgattgtatccataagaacatcctcttacctttttaataagtagcttggagtgcttcctgccaaggctttcaccagttatccagaagattaaaggctgaagtagtgattgtccttggaatgtccctctatctatgtgtagatctgtggttttattcatttgtttcccaaattgatccacaaggagattaatcttgtatttttttcctgatgacttttataaactagatgcgtaagacatataatattgacatcatatcaagttgcccatagggttatttaaatatttgaagagatgtgtttgttctcttacactctctgaatgcttttggtttttagcgattttattgtcatcaaaaaccatattcgactacacatttttctgacctactagacattcacatttagctttgggtactttgtcattgtagaagcaagtataaagtaatgaaatttatgattcaatcagaaaacaagtattgaagctgctgaaatatgacgttctcagctttatttcttctacgaaaagtccaggttaatgtttataaaatatttttaaacttttttgtctgttcaggactgaatttcttgttgagccggaatggtgagataattctttcttctgtggaacaaatgcattttaatgatagttacttatatgaaaatgttactaagatttaatttatgcgcttaatgctgcttaaaataaatgtattcaataacaaaacaaagccaatagccatagcacattaattattgaatagactttctgtagttactgcaactgaatgacaggtagtaagaccttaatatttgcaatcacaattgtattcttctttgccctagattaagcttgctgattacagtgcaatgaagaaaaattaattagtttgctccagtggagcagttaatatagcacaagcgaaacccataccctgcttcctcctgtaaccaacttgttttcacttactctgccttttgatacacaaccattttcttgatcacttcccaattgaggaaaagtttaattaagtagctaatactatttagaaaatatagtgctaaggaaaaaacatgttattaaattcaaaccattgatatttttattgctatttaacttatattttatacctggcaagcaaataattgaatattgtttgaaaatatttgtaattaagaactcaagaatatgaaaacatcattgagttataaaacatgtattactcctcaaagagcaaatattcctgtgttgggctgctcttagttggagtaaacacattacctgcccacagggaacttttcatctattagaattcagaatacatttcagggattcttaccaaaaagatttagaatacagctatatgaatttatagaaatattttaacttcagaaggattgtgtgctcacttccgtatcttcctttaagattttagtcatgttccgttttttgtgttttttttccttgtctgaagacaatatttttagaggagagaatttctttgaaattgatactgtaagtaaatttactgtatttacttagaactactcattcacccatacaaaaaaaaagttgagctttcattattgagctctcctcattatgttataaaggaaaaagacattgtccttatcatgggagacaagcagatacatgggcaattcttcagcaatgtgatgagtagggaaagacatacatgatgtgggaaatagtgttttacagtcaggtcatgcattgaaccaaaactcaggccgtaaggaaaggctttgaaggggcagtggtaacttacctgacatgtaaaggagccagatgaaaaggatgttgcaggcagagaagctgtaatgtacagagaactgaaggtaaaataaaatatcagcttatggcttggcaaacactatggggaaagaggcacagaagtcacaatgatagtgggagccatctgcacaatgatttaatggctagggtgttatgtacagttatgtgtcttgtatattgcatcatttctataacagtataaatgctattgagtataaattagatatttattgacctcatattttacagatttgccgtgaaaatttctgtatgtttaaatctgcgataagtttgttattgactcattcatctaaattaatagcttgttcttcagaaaagaagttttgagactggttgtgatggtctcatcaggttgaagagatcatacttttactgtggcacctattttttttttttaatggtttatttctatttgagtaaaacagtggctaaggttctatggtatcgggataagatggtgataagtgatctatatgacagagttggcagaggaattaataaccatattgacttgggagagtgagctctgtatatagaatacacattttagtcaggagggcagagtggtaaaagtctgagatcttgagatgcactgcttgggtttgaatcctagctgtattacttaaaagctgtgtggccctcagaaagttagtcatactgtgtttcagtttcctcatctgtaaaatggcgataattgtatccatctgataagattgttttgaaaatatttaagtttaacatgtatgtatgtagttacatacatgtaaaagtatttaaaaaggtgcttggtagatattaagtgaccagcaactctaaatattgttttattataattagtaagctaccacaggttctgtgctgctgaataattgatcaataccttacataacatcagcaaaggggtaattttcaattttgcagatggcacaaatctgggtggggggtcaaaatgaagatgagaatttttcatgataggctaaatcacggggtcaaaacccacaaaatagaattgagcagggtttggtaccttcttaattgcttgcttgctttattttcaatggcttgttatgtaacaccaaccatgtggtcaacttgctaggttatataaaggtgaataaggctcggttccttccctcaagaacatattaacatgtagacgcaagtacagaaagggagaactaacattgtattataaatattctaaaaatgctaaattaacagaaatatgatacaaagtatagtataatgtagtatttagaggagataatggtttcacactcctttgctctgacaaagcatcaagagtctttagttatttgtgtcagattttaagaaagccaattaaatgttatagaacacccacagctgagggaagaatttgtactgaagcttggttggagtatactccctgtgtggcttactatgagtggcagtgcagagggtttgtggtggtcaaataggaaatctttatgagtatgaaaaacaaatttctaaggtagactcaatgcaaagtcgaaccacatctggaagaactataaattccataaatgttcattaagcacctcctatgggcaaagtgttctgttaggcctgaatgaatttattgaagacataagaaaaggctcatgtcttggaatatattgtcttttgaggaataccagcataattatgattgtataatagtttaattttatttttgatgtgtactatttaaaattcagagtgctataaaaatagtaaatcagggaatctgtatctggaggaataagaaatgaagtctttttgaaggaagtgatatttagatggaagtctgggtactagcttgttgtggagaaggaagagggtaaaggcatgagggaggaaaatacaggtggggatggaaaggtgttctaagcagggagaagtcagtgcttgtgtattagtccgttttcatgctgctgataaagagatacctgagattgggtaatttatacagcaaaaagggtttaatagacttgcaattctatgtggatggggaagcctcacaatcatggtggaaggcaaggaggagtaagtcacattttacaggaatgacagagggcaaagaaagcttgtgcagggaaactccacttacaaagccatcagatctcgtgagactttcactaccacaagaacagcatgggaaagacctgtccccatgattcaattacctcccacagggatcctctgacaacatgtgggaattcaagatgagatttgggtggggactcagccaaaccatatcattccacccccggcccctcccaaatctcatatcctcacatttgaaaaccaatcttgccttcccaacagtgcaccaaagtctttactcattccctcattaactcaaaactccacagtccaaagtgtcatcctagataaggcaatttccttctgcctgtgagcctataaaatcaaaagcagattagttacttcctagatacagtggggttacaggcattgggtaaatatagcccttccaaataggagaaattgtccaaaacaaaggggcttcagggcacatgcaagtctgaaatccagcagggctgtcaaatcttaaagctccaaaatgatctcctttgactgcgtatctcacatccaggtcatgctgatgcaagagaggggttcacgtggtcttgggccactctgcccctgcggcttttcagggtacagcctccctcctggatgctttcatgagctggcattgattgtggctttcctcggtgtgtgttgcaagctgccagtggatctaccattctggggtctggaggacagtggccctcttttcatggctctaatagacagtgctctagtagggtctctgtgtgagggctctaaccccacatttttcttttgcactgccctagcagaggttctccatgagggccctgcccctacagcaaacttctacctgggcatccaggtttttccatacatcctctgaaatctaggcagaggttcccaaaccgcagttcttgacttctgtgcacctgcgggctcaacacgacgtggaagctgccaaggcttgggcttccgccctctgaagtaacagcccaagctgtacctcggccccttttagtcacagctggagtggctgggacacagggcaccaagtctctaggctgcacaccacagagggaccctgggcctagcccacaaaaccattttttcctcctaaactccagacatgtgatgggaggggctgccacaaaggtctctgacgtgccctggagacatttttctcattgtcttggtgattaacattcagttccttgttacttatacaaatttctgcagtgggcgtgaatttcttctcagaaagtgtgattttcttttttatcacattgtcaggctgtaatttttccaaacttttatgctctgtttcccttttaaaactgaatgccttaacaggacccaagtcacctcacgaatgctttgctgcttagaagtttctcccaccagataacgctaaatcacccctctcaagctcaaagttccctataactctagggcaggagcaaaatgctcccagtctctttgctaaaatataatgagtcacttttgttcgggctcccaacaagttgctcatctctatctgagaccatctcagcttggatttcattctctacatcattatcagcatcttggtcaaagctattcaagtctctaggaagtcccaaactttcccacattttcctgtcttctgagctctcaaactgttgcaacctctgcctgttacccagttccaaagttgcttccacattttcacgtgtcttttcagcagcaccccactctactggtaccaattcactgtattaatttgtttttatactgctgataaagtcatgccagagaatggataatttatacaggaaaaagagtttaatggacttagagttccacgtagctagggaagcttcacaatcatgctggaaggcaaggaagagcaagtcacgtcttacatggatggcagcagacagagagcttgtgtggggaaactcccccttacaaagccatcagattttgtgaaacttattcactatcatgagaacagcacgggaaatacctgaccccatgatccagttacctcccactgggtccttcctacaacatgtgggaattcatgatgatatttgggtgagggcacagccaaaccatatcagtaggtataagtaaaataggtgaagggtggagatcaatcagaggaaagcacaccaaataggaggacaagttctcaatccactgcaaggatttgatttgtagtttggctttcaggcctttaactgtcttcagcttggaagtggggtttcactgggtacccacccctatctgcctaggagtttggctctgcttcctgtcactgtcatatgcacttctctgtggtttccaaaacctgacacagggaagaaatacaatacaggtatctgatttatagcaatctgttataaattattgaatgaatatcatattttaaattcatacctgatagatattttgcacatttcttgatttacttctaaaataagtggatttctcttctttccaaatgtaaatcaaatttcgcctaacttcatatgaaacacgggaagtttttctcccttttgtcagaatttttaaatgtatttatattttaatctgaagaaactagctttctcaaggatggatagagtttgaaaatgatagacatgattcagttttctaactctaatgctatgctagttttcatagagtttatgattaacataaatgtagcaatatacatgattttccgttagggaaaaatctctgtttattcttaatgttgtaaatcacaagtcaataaacacttatgagtgtcttctatatatgtagaaatgtactaggtttcatgggtaaaagtgacaaataaggcaaggcgtctgttttttcatccaatggaaatggctcacaatcacatttcaaaaaagatcagtgaactgtatataactacctatgtcttaatatgaacaaattgtgattcattggttcatataacagctgcaattcctaatacctaacatcaaatcttttttgctatgtgtggtgttagccacataaattctcactattgattcaataatgagttttttggcttttaattgtgtgtcatttttttgttgtttacagacatgataattttacgtagttctgccttggtgtctacctcaattatcagagtcttaaagagattatagcaactgggaaccctaaaagccttcagcaaatcttggctttagccaggatcctcaaataatgtccaaacgtgttaagaacttgaaatattgaacatttccacttcatttccattcattctttccatttccttaggaaaattctaataagaaatgtaattcttaggagcagagagcaggggaagaaaacaggataatttataaactgtttaataaccttgtgagcaattgaatgttgaccatataaattctggataatatcattattgtactcaggttggctgttaaaaagtcataaaggaaagaattttaggcatctatttctagataactattaaaatggtgatcttatcattgcataccatttagctggggagacagaattgtatttaatgaaatgactcatttgttgtattggattcctgccaaattatttcatggtttgtcaaatgataatttcacaagtgtcagtgacaagatgttggacattagttttctcttttcctatctgctgagtcacagttctcaagggatggatattatagtgattcaatcacaccttagattttggcttacatttactaatcagtctagtaaatttggtaggggggaaatcgtgccatagcatataaaataatgagttccatttcctccccacattggcttctattttttgggttctgtatgtacctaggacctaatggggcacttgccacgtaggtccccaatgggagaaaaggttctgttaattactccatcacattaaacagtccagttagtacccatagaggtgaggaagaatgtgcttatgttttatgcttcaggcaaagtagctaatcagagagctgtgaacaattgtaaggaagtgacttgctgcctggttctctgcaatgactgatgacacagtctttttacatcacagaatgtgtaaaatttgttcacatgtataagctcttgttactttgagagggcaattctgggataatttggttgccatattatacttagtcaatccctatgtattgataatctgttttaatttgcatgttgatatacttactgacttacctaataccatcatttatggtttgagatatcattcttaatttccctttaataatacatgtaatgcatgggtttacctagccctaagactcatttcaaaatatattttctgaagttctgtagatgtaattattaaaatcacaaactttcaaactggactcataccccagctggctatggtacttaatgaaaattaaactttttgctcctcagttttcttatctgtataacaggattaaatgccccaccctcgcagttttccttttttctttttcttttcttttcttttcttttttttttttttgagacggagtcttgttctgtcacccagtctggagagtgcagtggcatgatcttggctcactgctaccgctgcctcccgggttcaagcaattctcctgcctcagcctccccgagtagctgggactacaggcatccgcaaccacacctggctaattcgtgtatttttagtagaaacggggttttgccatgttggccaggctggtctcgtacttctgtcctcaggtgatctgcctgcctcagcctcccaaagtgctgggattacaggtgtaagccaccacacctggcctacactttttctttaaggataaaagggaaatacgtgtattaccattgtgcttgtcatatagtaagtaccaaataaagagtagcttctaccattattaaaagctatcctggcttttttactattattaaaagttattcaaagcctacatatagaaggcatagctatatgcctttgtgtcacatgaatagtcaacttttctaattttttctgtggctgtgctttgctctcaaagtgtggcctgcatcagagtcatcagggaaggtggtggttaaaacggattcctccccggcatgttggctcacacctgtagtcccagcactttgggaggccaaggcaggcagatcccttcagcccaggagttccagacaagactgagaaacacagcaaaaaatacttaaaaaaaaaattagcgaggtgtggtagtgcaaacctgtagtcctaactattcgggacgctgaggcgggaggatcaggattgcttaaacacaggagtttgatgctacagtgagtgcatgatcatgccactgcactcgagcctggacaacagagtgagatcttgtttcaaatacagtaagtaagtaaataaataaacccagcaaaacacagatccctaggtctcactctcacgcttgattgagtatgtctaaggatgtgggcaagattctgcagccacaactgtctcccaggtgaggctgatggtactcgttctccaactaaagtttgagtagctttgccctggagtagctgtcccaaacaggttaatcctcagaattgcctgggaagatttaaaatatatttcccaaacataactgaatcaaaatttgaggagacattgtaaaaaatccatttgaaaattgttgcgcaaattagaggttctcaaacttgagtgcacatcagaattttctggaggccttgttaaaacagattgttgagatacggaatcaacctaagtgtccattaacagataaatgaatttaaaaatatggcatataaacacaatggaatattattcagccataaaaagaatgaaatcctgtaattggtggtaacatggatgagcctggatactgttaagtgaaataagtcgggcacgaagagataaatatcacaagttttcatatgttagagctaaaaagtttgatttcatagaagcaggcagtagaatagtggttagcagaagccggggagggtaagagggaggagagggaggaaagggacaagctagttaacagatacaaaatgataagctaaataggacggatatgtactagtgttctaaagcactgtaaggtaacttcagttaacagtaatttattgtgcatgtttaaatagctagaagagaggattttgaaacttcccaacacaaagaaatgacaaatatttgaggtaatggatatgataattagcctgatttgattattacatgttatattcatataggaaaatatcactctgtacctcctaaatatgcataattatgtgtcgattaaacattaaaaagaaaacacagatttctgggtctcactccctgagatactaaccaagtaagtctgggagagtcctgaaattcggtatttctaaaaaggtcccaggtgacgctgatgctggtctggatccacactttgagaaccatagcctgccctagaccactgcttcttaactcattttaaaattaaggatctgtgtgagattctgctggatggtgtagattttcttgaaaaataaaaaacgtgaacatagtttccatatactttccagtgttcatggatcccttgaagtatgtctatgattcttgtatgaaagcttgactccagatagaacgtctttgagtaacatatcccaggttaggaatggaattctctggggctatttgcaaatctgtctaaacatgggaatatgccagtaacattttactccattacccagagaacaggaccaagtcatgttattacctgtagaatgataagagactttcaattctaagaattatggcttatttttacaacttgttggaatatgatttgcagatttggtgaaaatggtagttacttccacaaagatgtttaacaatttaaaagttctagaagtttgtgtttcctactggctttattctttatttttactcttcaaatctagctgttcgctgtctttttcctgaaacatttttattaaggaaaatacagaattttgcagcttatcagtttaaacagaaaacatccctgaaaagtcttcgactatatgactacattacttatacaaatcgtgatcatagtgaaactgaattactttgtaaataaccatgattcattactataagcagggttttgaaattatgactacctcgagaaaacttttattaagaataaaaaagcaactatctcagctggaccaataatagaaacaccagtatattcactcgctttttatttctcaaagcacatttgtggcttgtagccaagaattcattgcattgaaggagtgtttgacaagcagtattgaagctgtaaacactttgaactcattacagtgtctcaccataggaacttaactgtcactgaagacaccctgtctgtgaaaccatcattcctacaattatttttacctttgcctgaaaatatgcttttgtgctttaaggtatttcaaaagacaagagaaagatggaagctaaggaggctatagggatttcctgagttctgtgagtgctgtgttgatacagaacaagatcagaaacttggatatatatgtttcaacttaaaatgctgattgatcatcatgacaatagttttatagagcatttgtatgggggtgaatgtttgaagttataaaaagcattgtaatgttactcattcatgggctgaacaaacatttcctctttctctttctctggctttcttgccaattacttttttcttgccaattacttttttcttgccaaaaacaactgagatcacccccttaagtccattttgaaacaaacttagcaaggagtggttgttagtctgcaataacaatctacatctcaaactcacatccttacagttgttgtgtaggtatcatagctgcgtgaaacagtgaagtgtaagattgtgtctacagtggtctggaaaatttgactcataatcacatgtagaatacagtcctttaagaactctcccaccccgcatcactgccctgaagataatgagccaatgatcctgatggtaatctcttctaaaatcatacgtatttgagaaaaattgtatcttttcggagactggtaatagtccagatgaaaagtgtttatatcctgaacctagagtattgacaaagcagatgaagaggattgattgggatggagaagattcattgatgggacttaaggaatgactagatatgacaggatagggaggtgaagtatgctaggatgatctgtatgataatgtcttacacaagtgaacagaagtccagtttaaataacgaggtttggagggagggagtaaagaagatggatttcatttttcttaggtctaatttaatgtgcttttggtaaaatgtctactaggccaccatgtatatgaatctgaaccttaaaaaggaggtttgagcagataggtgcacagtttttaatcattagcatatttaacagttgaaaccatgagagaatatgccttatgagaagaagacaccaagatcacacaatgctaggaagaccaaaaaggttgtggcagagaggtgggagggttgatcatgagaggaataattaagtactaaattccactgaaaacattaagtaagatgtgggttaaaatagtttattagatttggcaaattggaagttttgataatattcaaaagagcaactttggaggaatggcaaaaaaaaaaaaaattgtaagaatggttatccttcctagaagatggttgcagaaatgattcagaaatagcttgtaagtagagggtaactgaaaagccctgagtgtgcttactagctggtgagagagggtttaaagatgaatatgtgttccttaaatccattttgtgtgtttatgaggacagggtaaatagtctagctaaatcaccacaccctgccctgtgcctagcatagtttctatatatttattaggcaccaaatattttaggtatatatttttttatgtaaaatatatagggaactgtgtgaggccctggaagaaacacaatgtctattttcattgaaaaagagctacattggagagactaaccacccatcactcaatactattttatttagttgtataagtaatgggtgctatggcagtttatgacagacagacctgcccttatcttgggggaaccacagaatgctttacagaggaagccatttttaatgttctactgagagcaaaatagaacttcctcccattcctcacccactgaacacattccacagagttaaaaactctgctttccttccacggtcacttttcttggcattcagaaattattggaaactgtaactatgggttcagtgccaacaacattctaacactcatggttagaatcctaaccagaaagagtacaaataagggtcctttcttttttgattttggctcagatatcgatgttactaataatgataataaaataatagtttaaatttaccctgtctttatgattttcagaatacttcccccttctagtttatttgggatgagatgctagggaatatgagtaggaaaatgataaagtgagacaaagaaggaaggaaagtcaatgaagactacatttcaagagtttaaactgtggtggacaactggcgctcaatttgactggggacttgaagaaaattatgtggaacacacacctcagacttatcctttgaagagatgagaatgctaaggtatttatacaccaactcctgctggtcatctgttggcagatcccgggaggggctgtgcattcactccctagcatttttgatctattgcatgcactccggaagaacagactccagtaggcaaagagatgcaggagctggcaggtggaagttggaacaatgtccactgaaatgcgaaggactcagaggaagagacagggtatcatcagcaccagcctaatggggtttgaatctccattttgccatttactagcagtgtgatctctggcaacttacttatcctctcttggccttcgtttcttcatctgtaaaatggggatcataatagtatctacatcgtaggattgcagtgaggattaaataaattattcatgtaacaattttacagaagagaacatgaaaatttcgaaaagattacttacttgtcaaatatcacacatatgggaagcaggccaaagccttgattcttggccccagcctttttccttatacctactgcccaatgtctgtgttgccttgtatcttcataatttacttcccattttctcattgcttaggtctcattcctgattcttttgtcccatttactctcctctaaacccttgtgattgtccagatgagctttagcttgggtgtctgtgtatcccttctgaatatttcatgcttcggccttgcccagcagcttaaacttacactattaactcccggtcttctctacctcgcatttttcctcttacctatgaggcatcttgacctataatattttcacttccaccagctgagtctatctgtggcacatgattacttgtctgattccttgttctcatggaatccttaggcttctctgatgtattttatcctattggcattcacatcccagtgggcacgaagaatatttaataaaaacattggctttattttagaacggaataaacacatcattctttcctcctaaaaataaaagacatattagttggattgtgtcattactgtagagtgatacaagccagaagatgcagtgacaatatcagaatggtgtgttatctgttaccaaagggaatgggtggtagctgtgtaaccaggtcatcatagtggcatgaccatagccaagtgtacggcaccatagtcaagggcactgaacaggtcattagttgggattgagtcaagagttggaccatttgacatggaacacacattctaaaaatatattaagttggtgcaaaagtaatcacggtttttgccattactttcaatggcaagaaaatgcaattactgttgcaccaatctaatagtaacataaacatcaagcggcttcaacttttgcctaacaagtttatttaaaaggttctaggctagtcatgtttaaaatggaacagctttattgagatataatttatatgccatacaatcatctgtttaaagtatacaactcaatgtttttagtatattcacaggactatgcaaccaaatattgtgttggtattataccaattagagatatgacaaaagctttggaccctctcatgcacatttgtacaaacacaaaagaatttgcatatgataccagaaaattcatggacttctctgaagtccatttatatgcccagaagtactactcgttcagccaaactctatcttaaggcagctattaattctgtttgtacaatccagcagacagataaggttgttgatcgtcttatggactcatggatatcaccttaacgacaacaatatatgtgccaagtctggctcctaaagttttaggattttgtgtttaaaaagggggagaaaagctttagtatgtttcgaatcctaactgacagtgagtgacaaaggtttgaaaaaatatattgcagatgtgtgaacatctggaggctaattgtacatgtttaggtactccataatctcatgaaaacttttgacctagaaatgtcagcgctgttgccctctcaaagagtcatgattctttatcacatcgctttattgtaaaatggaagtacatttagtggcaatatccgtgtgattagctatgtccagtcatcagatttttcttgcgttattatgattattacagattctattacactatgacattgagcataaatcaccagcctccttctcggcacatacaagagtcacttattttctaaaggttaccaaatatactaacttgtttaaacaaacgtacacacacaccttcctatatctgggtaggtacagactcagataaatcttcatacaacagcatgctataatgaaaagaacttaagttttagagtcataaataacttgatttgaatccatgagtatatatttacttactgtataatctagggcatgttatgtaaacacttgagaattcaatgccaaccttgggataacaaattttacccagcaagtctatgagaaagatcatagaaataacgcatgggaagtacttaaaacagtgtcctacacatggatacagatcaagaggtagtaaatacactcacaaaatggtctaattaagaaagtcttccatgagtttatgccctccaaaagatgagattcgaggccaattttgtgtcataaactttatgcttttataatattcatttctattttatgattatataatgcttaaataataatatagtaaatattcatgtaaaattcttacaccgaaagataaatattgttaatatgttggtggtcattaacttctccttctctctgttctttctcctctcttatttatgtgacaatatatgatccttttttctgaggtttaatagtgattcccatgttttcctcttccatagataccataaatctgttgatacacatgttctctttaccatgaaatagatcccttctctgtaccatggcccctataaatcaggatacactacattatgcatctataagaataattctgatatctcagcgactcaaaagaatagaattttcttcccgccaaacttcatgtcactatagattggtaggcgtctcaactcattgtactcagctgaaggacctgggctgagagaagggtcatctcaatataaactttaagaacgcaagagaacatgtgaaagcacacgataacccgtaaagcttctgcttggaaatggcgcacatcacttctgttcacatttaatttgatgaagtaagtcacatggccatatcaaagtacaagtaggcagagtaaaagatactatcaggagcctggaataaaagaatggaactttggtgaatagacttaatggcaaccacatcccttaaaacaagggttctcaaacttgaacatgcatcagaataacctagaggtttgttaaaacagggagtgttgggatccaccccctgagtttctcatcctgtaggtctagagtacagccagagcggttgcacttctcacaaattcccagttgctgttgattctgatgtctgagaaccacactatgagaactgctgccctaaagtataaaagctcttctcttaagattccacaatggaaaacacttcaacagtggtactttcgactgtccatggtcacatttcaaccacatacttctcaagtttccaaatttatctcaatctccaaccactggtctgttaataatttcccaaaattgctgtattatttcttttcctctggtggaatttaattaaaatatctttcctacaaaccttttccaaatcattctaactagaagtattgcctataccttttccatagtagtatacacctttccaaagtgatcacatgctttgtattatggtaatcttacacttgtgtttttctcagtttcatgaactgttttcaagcgcactcatagaaatttacccaaaatgaatactaaaacacttaattttttattcctgattttgccacattagggtaaaagacttggccacatgttctaaatttaaatcactactcttgtctcagaagccatgtgaacagtagggaggacagcataggttctggagctggactgcctgggtcaaaactaaccttgccactttttagctgtgtaaacttgtgcaaatttcttaagatccctgagccttttcctcatctagaaaatgaaagtgagaattgtattcataccataggactgttacaagaattaaatgaattagttgatttgaaacatttagtgcaggacttggcaagttttgagccattataaccattataattgcaaaacatcctgaagttattctctatgcctgaagttacattttcttaatatccattttctccttaatcccttaaaagctgtcttctgcctcatttattctatcaaaactgtattctcaacagtcactaattatattctaattgaatttcagagtgaatttcacacctctccttttgaaagattcatttctatgaatttgggacagcttcctagtatgatattccatctataagtatatccatatcatctatatcgtataccttatctgctctgctaactctttccttgtgttattatggatgttctccaattctgttctgcagacgggtgacaagtgaacatgtagaagaagttttcagtctcctagttttacctccattcaattaactttaaaatctacattactagttctgctgtgtcaccggcagtccaagaaaagaaacctgatcagtttgtgaaaatagctaatatttaatatgagcttattatgtgccagctactttacctggagtttcttatttaagccttacaattgctttattaagggctaggaacttcacatgtacattaaaatgtagaagcaaactgttgaggagagaaaggaatttacccatattatacagataactaataggaagtagagattggatttgaatgaatccaggactgatgtcgaagcccagtgtcttaatgttattttgggatgtctgcatagatttttttttctttataagggagtgatgattttaaaagcaacaagacccaccttaggtaaagtccatcatccaaaaccaaactcagttttattcctgtgcctacgcaaccacattattggatgcctagaaaatgttcaaacttctaaccaagtcactggtaaccctctgtgattttggcttaatcaggtttattcatcagttttgcccatatttcacttgagctctagtctcattaccttaattacagcttcctgtatgtctataggcttttgcttctatagacccaatttatatggtatcaactctatatgaagccgtttttgaatctcctagtaatgctttaattttcctaaaattcctgttatatcaaatcagatttcttttttatttttttgtcagttataagtttattttttgtgagggcaaaaataaatttgttggataatgagtttgtgagtagtagatcaatttgttcacatattttgcaaaagttagagcttattactcattcatgtactattgatgtaacgcattagaagacagttaacattagttcctaattgcacctgaccaaaaggagctgtgggcctggcctatacaccttattgcgtgttcagcatcaactgatttagtgaagcagcaaaaagaaaaatggtgtgtgcagtattatctttctgccacagatacatgtttttaatttccaagtttccaatgcatcattcagttttatctaatgggaatgcagctgagagaagtttgtatcaacccaaaactacatgctaatatagtttagttttcaagacttgtggagtctttttttttaatggaataagatcatcagaaatcctggagcaagacagactggctgtggtctaccagcattgtagtaaaaacattggggaagttttataagacctaattattagaaaataccataaaatagtcattttcatagaaaaagctttcctttctttcctcacactaaatcacattactttgtgttcaaggtaaaatggagtttgaaatctggatgtaaataagaaaagatattattttattccaagtgaaacatgtattcacacttcacgtcttgaagcaccaggtggccatttgggctgagttttcaagaaaaaaaaaattatatagattttatgtccccccccttttgttgttgctgttggtggtggtggtggtgatttttattttttggtaaagataataacatatgaaacaattttcctgttaattaaaacttactctatttatgagcatgatattttaaagaaattttttatatataatgaatatttggatatatatgtggttaatggttattttaacaaacattttggtttgctgaaatttttaagtttttttttcttttattattatactttaagctttagggtacatgtgcacattgtgcaggttagttacatacgtatacatgtgccatgctggtgcgctgcacccactaactcgtcatctagcattagataaatctcccagtgctatccctaccccctccccccaccccaccacagtccccagagtgtggtgttccccttcctgtgtccatgtgttctcattgttcaattcccacctatgagtgagaatatgtggtgtttggttttttgttcttgcgatagtttactgagaatgatgatttccaatttcatccatgtccctacaaaggacatgaactcatcattttttatggccgcatagcattccatggtgtatatgtgccacattttcttaatccactctatcattgttggacatttgggttggttccaagtctttgctatcgtgaataatgccgcaataaacatacgtgtgcatgtgtctttatagcagcatgatttatagtcctatgggtatatacccagtaacgggatggctgggtcaaatgcgatttctagttctagatccctgaggaatggccacactgacttccacaatggttgaactagtttacagtcccaccaacagtgaaaaagtgttcctatttctccacatcctctccagcacctgttgtttcctgactttttaatgatcgccattctaactggtgtgagatggtatctcattgtggttttgatttgcatttctctgatgcccagtgatgatgagcattttttcatgtgtcttttggctgcataaatgtcttcttttgagaattgtctgttcatgtccttcgcccactttttgatggggttgtttgttttttcttgtaaatttgtttgagttcattgtagattctggatattagccctttgtcagatgagtaggttgcaaaaattttctcccattttgtaggttgcctgttcactctgatggtagtttcttttgttgtgcagaagctctttagtttaacgagatcccatttgtcagttctggcttttgttgccattgcttttggtgttttagacatgaagtccttgcccatgcctatgtcctgaatggtaatgcctaggttttcttccagggtttttatggttttaggtctaacgtttaagtttttaatccatgttgaattgatttttgtataaggtgtgaggaagggatccagtttcagctttctacatatggctagccagttttcctagcaccatttattaaatagggaatcctttccccattgcttgtttttctcaggtttgtcaaagatcagatagtggtagatatgcggcgttatttctgagggctctgttctgttccattgatctatatctctgttttggtaccagtaccatgctgttttggttactgcagccttgtagtatagtttgaagtcaggtagtgtgatgcctccagctttgttcttttggcttaggagtgacttggtgatgcgggctcttttttggttccatatcaactttaaagtagttttttccaattctgtgaagaaaggcattggtagcttgatggggatgacattgaatctgtaaattaccttgggcagtatggccattttcacgatattgattcttcctacccatgagcatggaatgttcttccatttgtttgtatcctcttttatttcattgagcagtggtttgtagttctcctcgaagaggtccttcacatcccttgtaagttggattcctaggtattttattctctttgaagcaattgtgaatgggagttcactcatgatttggctctctgcttgtctgttgttggtgtataagaatgcttgtgatttttgtacattgattttgtatcctgagactttgctgaagttccctatcagcttaaggagattttaggctgagacagtggggttttctagatatacaatcatgtcatctgcaaacagggtcaatttgactttctcttttcctaattgaataccctttatttccttctcctgcctaattgccctggccagaacttccaacactatgttgaataggagtggtgagagagggcatccctgtcttgtgccagttttcaaagggaatgcttccagtttttgcccattcagtatgatattggctgtgggtttgtcatagatagctcttattattttgaaatatgtcccgtcaatacctaatttactgagagtttttagcatgaagggttgttgaattttgtcaaaggccttttctgcatctatggagataatcatgtggtttttgtctttggctctgtttatatgctggattacatttattgatttgtgtatattgaaccagccttgcatcccagggatgaagcccacttgatcatggtggataagctttttgatgtgctgctggattcgttttgccagtattttattgaggatttttgcatcagtgttcatcaaggatattggtctaaaattctcttttttggttgtgtctctgccaggctttcgtatcaggatgatgctggcctcataaaatgagttagggaggattccctctttttctattgattggaatagtttcagaaggaatggtaccagttcctccttgtacctctggtcgaattcggctgtgaatccatctggtcctggactctttttggttggtaagctattgattattgccacaatttcagatcctgttattggtctattcagagattcaacttcttcctggtttagtcttgggagagtgtatgtgtgcaggaatttatccatttcttctagattttctagtttatttgcgtagaggtgtttgtagtattctctgatggtagtttgtatttctgtgggatcagtggtgatatcccctttatcattttttattgcatctatttgattcttctctctttttttctttattagtcttgctagcagtctatctattttgttgatcctttcaaaaaaccagctcctggattcattaattttttgaagggttttttgtgtctctatttccttcagttctgctctgattttagttatttcttgtcttctgctagcttttgaatgtgtttgctcttgcttttctagttcttttaattgtgatgttagggtgtcaattttggatctttcctgctttctcttgtgggcatttagtgctataaatttccctctacacactgctttgaatgtgtcccagagattctggtatgttgtgtctttgttctcattggtttcaaagaacatctttatttctgccttcatttcattatgcaccccgtagtcattcaggaggaggttgttcagtttccatgtagttgagcggttttgagtgagattcttaattctgagttctagtttgattgcactgtggtctgagagatagtttgttataatttctgttcttctacatttgctgaggagagctttacttccaagtatgtggtcagttgtggaataggtgtggtgtggtgctgaaaagaatgtatattctgttgatttggggtggagagttctgtagatgtctattaggtccacttggtgcagagctgagttcaattcctgggtatccttgttggctttctgtctcgttgatctgtctaatgttgacagtggggtgttaaagtctcccattattaatgtgtgggagtctaagtctctttgtaggtcactcaggacttgctttatgaatctgggtgctcctttgttgggtgcatatatatttaggatagttagctcttcctgttgaattgattcctttaccattatgtaatggccttctttgtctcttttgatctttgttggtttaaagtctgttttatcagagactaggattgcaacccctgcctttttttgttttccatttgcttggtagatcttcctccatccttttattttgagcctatgtgtgtctctgcacatgagatgggtttcctgaatacagctcactgatgggtcttgactctttatccaagttgccagtctgtgtcttttagttggagcatttagcccatttacatttaaggttaatattgttatgtgtgaatttgatcctgtcattatgatgttagctggtgattttgctcgttagttgatgcagtttcttcctagtctcaatggtctttacattttggcatgattttgcagcggctggtaccggttgttcctttccatgtttagcgcttccttcaggagctcttttagggcaggcctggtggtgacaaaatctctcagcatttgcttgtctgtagagtattttatttctcctttacttatgaagcttagtttgcctggatgtgaaattctgggttgaaaattcttttctttaagaatgttgaatattggcccccactctcttctggcttgtagggtgtctgccgagagatccgctgttagtgtgatgggcttccctttgagggtaacccgacctttctctctggctgcccttaacactttttccttcatttcaactttggtgaatctgacaattatgtgtcttggagttgctcttctcgaggagtatctttgtggcattctctgtatttcctgaatctgaatgttggcctgccttgctagattggggaagttctcctggataatatcctgcagagtgttttccaaattggttccattctccccatcactttcaggtacaccaatcagacgtagatttggtcttttcacatagtcccatatttcttggaggctttgctcatttctttttattctttttcctctaaacttcccttctcggttcatttcattaatttcatcttccatcactgataccctttcttccagttgatcgcatcggctcctgaggcttctgcattcttcacgtacttctctagccttggttttcagctccatcagctcctttaagcacttctctgtaatggttattctacttatacattcttctaaatgtttttcaaagttttcaacttctttgcctttggtttgaatgtcctcccgtagctcagagtaatttgatcgtctgaagccttcttctctcagctcgtcaaagtcatcctctctccagctttgttccgttgctagtgaggaactgtgttcctttggaggaggagaggtgctctgctttttagagtttccagtttttctgctctgtttcttccccatctttgtggttttatctacttttggactttgatgatggtgacgtccagatgggttttttgtgtggatgtcctttctgtttgttagttttccttctaacagacaggaccctcagctgcaggtctgttggagtaccctgccgtgtgaggtgtcagtatgccccttttggggagtgcctcccagttagggtgctcgggggtcaggggtcaggcacccacttgaggaggcagtctgccccttctcagatctccagctgcgtactgggagaaccactgctctcttcaaagctgtcagacagggatatttaaatctgcagaggttactgctgtctttttgtttgtctgtgccctgccctcagaggtggagcctacagaggcaggcaggcctccttgagttgtggtgggctccacccagttcaagcttcccagctgctttgtttacctaatcaagcctaggcaatggcgggtgcccctcccccagccttgctgccaccttgcagtttgatctcagactgctgtgctagcaatcagcgagattccgttggggtaggaccctccgagccagatgcaggatataatctcctggtgtgccgttttttaagcccgtcggaaacacgcagtattcgggtgggtgtgacccgattttccaggtgctgtccgtcacccctttctttgactaggaaagggaactccctgaccccttgcacttcccgagtgaggcaatgcctcaccctgcttcgggtcgcgcacggtgcacgcacccactgagctgcgcccactgtctggcactccctagtgagatgaacctggtacctcagatggaaatgcagaaatcacccgtcttctgcgtcgctcactctgggagctgtagaccggagctgttcctattcggccatcttggctcctcctctcaaatcagatttctgatccaatatttcaagttttaattttcccactggtaggctctattcctactctttttctgctcatggctgaaaattttctgtatctcccatctctttcatatttgaatctattgaatacatagcctccacactcttaataaaatactaatttcatcatgtaacttcattattcaaaatatttagtggctcccactacctatattaaagattccaaactcagtagttactaatatttttcataggctttctagtcctgtcctttcttttagtcttatctcttactactttaagcttattcctagggcaaacatcttactatttccaaaatgtgattcaacgtcattcctattgcctaggaagacactcttctgtcctatggctctctaagtctacttcctgttgaagtactctttttcataaacattcaaattgtttttgtgtcctactttggtgttacctgacatattttaaaactcatggattggatcacatatctatgcatttacttatggcaccattacattttatttattttaagagacaagatattactcttttgcccaggctggagtgcactagcacagtcgtagcttaccacaggcctccaactcctgagtcaagtgatccttctagctcagcctcctgagtaactagaattgcaggtgtacaacacaatgcagaggtacatttaaacaattttttattgttattttgtagagacagggtcttgcttcattgccccggttggtctcaaactcctggcctcaagcgatcctcctgcctcagcctccgaaaatgctgagattaggaatgtgaaccattgtgcctggcccacgttacattttaacagtggggatctgaacactgcagtttcccaaagccaaaaacatgactaactcagctataaatatttaaccaactcttaagtatacctcctggaccatggtcatatagagcagaggctgtgctactatatatgctttagttttgctagtacatttagaaaattgtttattacatagtcagtactatggtgaatggttaagatatgttgaatgccctgctgagacaacgtttttactttgataggaaagtcaaaagaataacacacatatttaattattaaagaaccagaacatgtagttttctgaatttcttagtataaaaagctccttaagagacataagtatacaaatatacacttcttcatctatgatactctattaaatttggcatatttctttttaacaaaaacttacaagggtagaaatctgctgagatgatatatgaaatgtggaaatgttaaagatagattgggggggtggttaagataagacattgaagcatataatactcctcttggagaatcattcagcttgccaagctaccatgaatcagtgtttgaaaagaggcagaagatacatacatagaaaaatcagccaaaatattcattaacatgaaatgtttccaaagctgaagtgctacattaatggttgactttgtgcctcaagactaaatattgggcaatgttagctttccctataataaaacttgccccaaaatatatgttgagtatcccttatccaaaatgcttgggaccagaagtgttttggattttggatattttcagtttggaatatctttattatacatacgagttgagcatccataatctgaaaatctgaaatccgaaatgattcaataaggatttcccttaaaaatgatcgtgtagttactcaaaaaattacagattttgtagcatttcagatttcaaattttcctattagggatgttcaacctgtattgaacttacttgcttacacgtgttgcccgtttgctgtactgtaagctctgtgaaaaaagtatctgctgacttctttgttcataattgcgccctagcaccttttgtggtagttggaaaatggtagacactgagtaaatatttactaaatgagtggataggtaaaagtatttcagtttggcatggcaagatggaaagactaacagtgtttaagtggctatggccaacgtcaggccttcttcagtttaagaactgtggaaagaagaaaattaaacaattaaggaaagataagaataaatccaacaggaagttctcactgaagccaagagattcaaaaaaatacaggaagaagaagaggaagaaaatactattttctatgcattatattcccaaagatatctgccttactgattaatatcaattaataccataactatcacattttctcataggccaaggtgaaatgtctgataagacaagctttgttgctaacacaatttaactcactttagaatattaacatgacatttatgtggtctactcctctctaagctcaaataaagcagctgcgtataaaaagcagccatggattaaatgacttcagcctgctttgtggaaactactgctgttaaacctgctcttgataaactacaaagagtgcctggactccatttatgaaaagacatttgaatatagacctcacatggtgatcatttaaaaatattatattttgcctgtattacaacattgggttgtatttttgtttaaatctctacttcatttacttatgcgtgtaatactgacttgcttcacaaaatgttactctggagtgtctggcaagcttcctaacaagaaatttgaaagcagttttacatgaaaatcacatttttgaattttatatttctagacaagttttagtacaagcagtgtaagagcataagagtagtctatgtcatatgctatttgtcagtctccaatgaagagtaaacatttatcagcttcagtaacaatccctgcctaactgaggagtgtcattttctgaaaatattgattgatagaggccttgcctaaaaaatataaaatgcatgtaatttacacacagctgagaaatacaagctcattttttcctgacaagcagtaatgccctttataaactatggagattaaattacaaaaaaagttaaattaaaaacaaaagtatgatcagagtgatcagagttttgtgtggtacattttctagtaatcatgttttacagcagtctaatttggtaaataaaagtgaattggaatatattttaaaggctaatatgtatatgtgtgtatgtgtatgtatatacatgtatatgtgtgtatatatacatcatagaaacctttatatttaagagaaaatcatcaacaaatacttttaacacatttgttgttatgacgcagtaacatgtatcctaaattaggaaagtcatgtttccggatattttcctaaggaaatattggttctaaaaattcagcataggaacgtcaagtattttattattcactgaagggaccaataatatcaatgcaagcagaggcctgatatagaaaaattaattaaggtgattatagaggtgtaagcaggactctagtaaatgaatttagaaggtggtctagtcagttgcttgaacattaatcagaatttagagttctgctctgttataaactcaatggtctcgtgaaaccatttttatacaagtctcaatgaattcatctctatatagttcttgttccacctactttagtattttttgaggagcaaatgagataatgtgtgcgaacataagacacaatgtgtaatctaagccaatctgggcagattaccttctctagtgcagattagagatatctatgcattcactaactgaatttttgtaccagttggaagtgtttctgaagcagatcttttttttgctagtctattataattattaaagatgatatcatgcctaaaatttgtcacattaaagaagcatcagtatctttgtaacattcacacattgattttacttcaacctagaggaaccatgactgcctttaaccatttgaaaaggtctttatgaatctaccatctccaagatgaatacccacagcctttattattgggctcacttttggtgtcctttatcgtcatggtagtcatagctcctacatctagtaaacgttaggcctagaatttgaattgccttgattctcaaataatatctgaatccatcatcttatatatttataatttctttgaatatgtgataattaattcagggtaattagcacatccaatgtctgtgtgtagaaacattgtgttggaccccataaatatgtataattatcatgtcagtcataaataataaaaaaaacttcccacaaataatttataaacccatgcagtccttataactgctctttccaatattaatttcagacttaaaggtgatctgttaaattttatcttactggtttcgatattattatagctaagacatccatagctgaattttattacaaagagtaaaagctaccctttccaggagagtaaaatattttattataatagctgtatttttatgccttaagatccaagatcattggcaaggtatatttggtggaagcagtccaaatgagagtcacatgaccatcaagtagatataactttaaactgacacaaggccatttgccatcactttttggatagggtgtgctgccacatgtgtgtttttaaaatactatattttagtacagattcaaaattttgtctgtgaatttattatgggagacattgataagctacattgtgaatatgaccttatctatcgaactaataatatgatcaaaagagaaaatgacatttgttcatgggttgatttgctaaccccgcagtgtcataaatagtttatagtagtgtcattgcctccatagaaagttaagattgcgtagattcttcagctgtaataaatttgtaacatatatattggataaaagtatatgagaatgttcaaaacattatttagattaagagatatacctattagaaattgcatatattccaggggaattttttaaatttttgtgggtacatagtttgtatgtgtatatatgtatagaaagagagagacagtacatgagatactttgataaaggcatgcagtaaataataatcacatggagaatggggtatccatccactcaagcatttatcctttgtgttataaacaatccaatgatactgagttattataaaatgtacagttaaattattgagtatagtcaccttgctgtgctcgcaaatactatgttttattctttctaaggaatttttgtacccattaaccaaccccagcttacctccaccccctagtaccctactcagcctttgagttgagatctctctctctctttagctctaataatatttgctttatttatctgggtgctccagtgttgggtgcctaaatatttgcaattgttgtatccttttgctgaattgacccctttctcattatataatgaccttttttgactctttgtttttgtcttgaaatctgttctgtctgaaaaaagtacagccactcctgctgttttttggtttccattggcatggaatatcttttttcatccattttcagcccatgtgtatctttataggcggtcattaaagatgtcaagtattttgtagaatcatagcatgtatataaacacatgcatgcatatacatatatatacctatggactacaatattatagataaaatttcataagtgactatgatccatgatatgagaggcagagaatgctcagcagtgggatccctctctcaagccatactgtcaaatctagtatattgaaatttctggaacacccttatatattagagtctttaccagaaatgctggtacgtttattttaactgttattgcagaaatggctaagaaaacaatgtctagattctaaagcaaggattaggattgtatactttcttctgttgtgttacacagatacaaccaaacaatgactatttattaagtactatctgtggctaaggtgttgtacttgaggctgtgttatttacgcactaagctgttaaagtttatttgatgtttactagagctttctgatgccaagaacacaactctggttttggtagctctcttttttccattgtttaaaaatgctaaagatcatgcaaataattaacatatgataaacattttttaatctcagtaacattgtaaatttataatatgatgagaaaaagagctgaaagattactgatgtaatttataacaggttagtatttttagttcatcattataaacccagaagagaagagctaataaagttattcagttgtgcttatgtaaatcttttggatcttgagacttatttaatgactggatgaagattttaagtgccatgggatatgtgagctacatggttcaactgtacaattggatcactgttcattttatgggctgtgatatacttcacattgggttgatttattgtttcagagtaaaattagctttaacatgttttcttcctaactgaattgtaaatcaattatgttaacagctcctcttggtaagggcctagacaaaatacatatggtcaataaccattttgtgtgaaataagcatataaaaagcagactttagtagactactctagatttgcatagttcctcataaatcaactttatgaaaatgataagaactgaacagaaatttatttgaagaatttgagccataacagccttataaattaggttcacttcacctattttattcacctcgtttagtttcagcaaaaaagtctgatttaatttagagtttattattacttttgattttaaatgcacaattcttaattgtatatttatacattccagttggaccaattttttgaaaggatttcctcaagaagtagaattgcaccatttaaatgtattatatttgacttgtcaactgtcgaatctaattgtcatcatttgaaatacaacaatatgtgctaattattttagttttagtttttattcttttactggatgtacttaaggcaaccttgtccaactcacagcccatgggctacatgtggcccaggacagctttgaatgcagcctaactgtaattcacccactttcttaaaacattatgagatttttttgcaggtttttttttttagttgattagctattgttagtgttagtgtattttaggtgtggcctaagataattattcttcaaatggagcctaaggaagccaaaagattacatacccctgatttaaggggtacaagatgttacgatatacatagacataatgaaatgattactgaattcaaccaaattatcctatccattatcttccataataactgttttggtatggtaagaatacctaaagtctcttttcttagctaatgttcagtgtacaatacaatgccattaactgtagtcatcatactaagcagttatcgagatttatttatccaatataacttcaagtttgtgtcctttgacctacttctcctcatttcttccaaacatttaaagagtaatttataccatttgttcttaaaatcttctaaataatagaagaggaaatacctccaaagccatttatgacttcagcatcaccctaaatacgaaagtcaaacagacaccgcaagagaagaaaatatatatatgccaatatctaggaggaatatagatgtgaaagtcctcaataaagtattagcaagacaaataacacattggattataaaccgtgaccaggtgggtttagccctaggacacaaggttggtttaacatacacaaatcaatcaatgcgacatactacattaacagaaagatgaaaaaccacatgattatctcaatacatgcagaaaaagcatttgataaagctaaacatccttttattattataactcttcgcaaaatatgtatggaaggaaatttcctcaacatcaaggctatttatgaaaagcctatagctaatatgatcaacggtggttgtggggtggttgtactgaaagctttccccttaagatttgctaaaaagcaaggatgcccactcttaccacttccatttgtcatagtaccaaaaatactagcaggagcagtgagacaaaattaataaaaggctttcacatctgaaaggaagaagtaatattatttctgtttgcaaatggtatgatcgtatatgtagaaacccctaaggactccacaagaaaaatgttagaactaataaatgagttcagtaagtagtggaatacaaaatcaacataaaattagttgcatttttatgcaaaagatatccaaaaaattttaaaaaattctatttatgataacatagaataaaatatttaagacccaatttaaagaagaaagtgaaaaatacgtacaaccaaaactataaaacattgaggaacaaattaaaaggtaaatatatgggaaaatatcccatgtttgtagactggaagaagtaatattgttaaaatttccatactacccaaatggatatatagctgtcccttggtatccacgggacatgggttccaggatgccagtggataccaaaatccaaagatgcttaaatcccttatacaaaatggcatagtatttgcatatacctatgcacacccccctatatactttaaaacatctatcgattatttgttattacacctaatacaatgtaaatgctatagaaatagttgttaccatatattatttttacttgtattaatattttttgttgttgtattgagttttttgttctatttttgattatttctggtctacagttgcatccgtggaaatagaaggttgactgtacaaatttaatgtaatccctgtgaaaatctaaatggcattttttttcacagaaataaaagagcattataaaacttacatgaaatcccaaatagccagaacaatcttgaggaaaaaaaagttggaaatactgctctttggatttgaaattatatcataaatctacagtattaaaaagagtattgtaatgccataaaaacagacacataaactgatggaacagaatagagatctcacaaataaacctaagcctatataatcaactaattttggacaggaccaccaagaagatatgtggggaaaggacagtctcttcaataaatggtgttgtaaattgtacccttgtcttatactgtacacaaaaattaagtgaaaatggactaaagacttaaatataagacctaaaatcataagactcctagaagaaaacagagaggaaaaagctctctgacagtcgcctttgcaaggattttttgaatatcacatcaaaatttcaggcaagaaaacaaaaataaactagtggaactacattaatctaaaaagcttctggaaagcaaaagaaaaacacagcctacagattatgagtagatatttgcaaaacatatatctgataagggtttaatatccaaaatatataaggaacttgcacaattccatagtgacaaactaaataacccaattaaaaaattgggaaagaacttgaacattttttttttcaaagaagatgtgcaaacggccaacagggaaattaaaacgtgctcaatatcactattagggaaatgcaaatcaaaatcataataaggtattacttcatacctgttaggatgagtattatctaaaagatgagataacaagtgccagtaaaggcaaggaggaaagggaaccctgacatactgctggtgtcggtgtaaattagagcagacattatggaaaattgtctgggagtgtttcctcaaaaagttaaaaatagaactaccatatgacccaacaatcccactcctgggtatagacccacagaaaatgaaatcagaaccttgtggagatagccttactctcatgttcattgcgttatgattcataatagccaagatatgaaaataacctgagtgtccactgacagataaagaaattgtgacacacacacacacacacacaaatattcagcctcacaaaagatagtgccatttgtaacaacataggtgagcctgaaggaaattacactaagtgaaataagcaagacacagaaaaaaatatgctacgttatctaacatctgaaatctgaagaaaatgtataagttgaatacatagacagtagaatggtgattaccaggagtagtgagggtgaggaaataagtcaatgtgtacatggaaacttgcagttatgtgggataaataaatttagagtttcgatatacagctaacccttttttaaaaaaatataaaagcagataataatggggtaaaatgtagtgttttgatctatgcatacattatgagaaagatttgatctagctagttaaaatgtctatcgcctcagctacttaaccctttctaatatttatctaaaatatgtcagatccagagatgtatgaccagattttaacatcatttttaatgtagaattgacagttgtaacaatgattttctcagtttgcttattcaacacccatggaccaagataataaatttaggacctatttaagtagtttctaaaaaggcgttaaaaaaatccccatgggggcaaacaatgtgaatcgaataacatttccaaatgaatgtaatttgctcatttggatgtgagctaagtaaaaaaacgattgtaaaagaaaatgtaagtaatagaaattatctaagaagagcaatgagatgtgttccatctgtgaccaattttggtcaattttttcacaggcatttaatgggtgcaaaatgagccagtcttggtattagaccgttaaaatgcattgtcttctaggagttcatattgtttcccctcccattctgaaaaaaattagaaaaggtaacaacaataaagaattgtggtagacaaaaactcttttgtaaggtatgatttgactcgtataataggtgttacgagtgttgagtggctctgtcagatagaaacagtcaaagaaatgctagtaatgttgtcttgtttgctttacttgtaagtatcttgtgtattttatttacttaatatatttaatttactttaatattaaaacgtgtgtgtgtgtatatatatatatatatatgaatgaatgaattctaatgggtcaggtcatatagtatgtgtgtgcacgtgtgcacatgcaagctgggataacaacgtattatatgatagagtctatctggtgataaacgttcagaggttggaaaagggcattgtgtaccaagctcttgaggtattctgggaaataactgcacaccaagcatttggatattgactgactgataacagtaaatgtacatttattcagctaaataaatgaaaaaaaaagtatcaggcattccaagcagtgaaaataacttaaataagaacacaaaagtaagtctacatttaatatgctcaaagcatcatgtgcatctgtacaatatccaaaatatttccaccagaattaaattttgttattccattattttactataatatttggaggcaaatgcatattaacataatcagtttaaactttgcaatactaaggtttctcttttatttagtacaatgacccaaagttatagaattatttgcctctgatttcttggcaacatatgtatactttactgaaaatttcatctacttcattcttcatcaccctacactcacacagagaaacaaattgataatgagaaattgaaaaggaatatgaaagctcagtgctgatttttatttggttcatgtaaacctctagaagcttagctctattaagattatctgaacctttgtaatactttctatttgaagctatttgcttccaaccagtctatcttatattaattattattttcaattcatcagattatgtggatgcaatggctgataagttgagatatactttgaggaacactgctatgataatcatgatagaggatgcatgggtgattcatagtatttccaactatgtccagttatgtttagtgtttgtgaatcacctatttgcctaccttctctagttgagtaactatatatgtaggtaattgaatcagactattttgctaccaagaatatagcctcttccccgatataaagaggcaccaattacagattatttacctaatggagcattttaaatatggaaggttattaactatttacacttgagtcaacattggaataaaaagttttagctgacaaaattatttgctaagtgtgtacttccatccacatttgccatatattttaaagagcaataaggaaagtcttttaaagtgatgaaattcagggctttcatttaattgatgtttttatgtgacatatttatattaataataaaatgcaaaacagtgaacaggtaatatttaatctttgttcttccttttcttaaagtcaggaagccagaactagtcagtcctatcagtaaaagcaaaagtaatatatccaatgacatttgcttaaatacattaccaagtcctgagaaaggttcttactaatctgggaataaatgtccttatcttgatatgtgtattagtccgttctcacattgctataaacaactacctgtgactgggtaatttataaagaaaagaggcttaattgacttgcagttccacaggctgtatgggaagcatggctggggaggtctcaggaaatcactgtggaaggtgaaggggaagtaggcacggcttacatggccagagaaggaggaagagagagcaggcagagatgctacacgctttcacacaaccagatatcatgagaactcactatcattggaacagtaagagggaaatctgcccctatgattcagtcacctcccaccaggcgcctcattcaatattggggatcacaatacaacatgagatttgggcagggacacagtgccaaactatatcgttctgccccaacccctcccaaatctcatattgttctcacatttcaaaatacaatcatgctttcccaacagttccccaaagtcttaactcattccagtattagttcaaaagtccacagtccaaagtctcatctgagactaaggcaagtcccttcaacctatgatcctgtaaaatcaaaatgagttacttccaagatacaatgagggtacaggcattagctcaaaagagttaaatcgatcagaagaaaggggttacaggccctgtgcaagtccaaaacccagcagggtagtcattaaatcttaaagctccaaaataatttcctttgactccacatctcatccaagccacagtgatgcaagggacaggctcccaaggccttgggcatctccatccctgtggctcagcagggtgtacagcacccttagttgttttcatgggctggcattgagtgactggggcttttccaggtgtatggtgcaaactgtcactggagagaccattctaggctctggaggacagtggccctcttctcaaagctcaagtaggcagtgccccagtggggactctgtgtgagagctctaaccccacattacccttctgcactgccctagtagaggttctctatgcaggctcccccgctgcagcagacttctacctggacatgcaggtgtttccacacattctctgaaatctaggtggatgctctcaagcctcaactctcacactctgcacacttgcaggattaacaccacatggaagccaccaatgcttatggcttgcaccctctgaagcaacaccccaagacacatctggggcctttttagtaacagctggagctggagtgtctgggacatagggagcagtgtcttgaggttgtgcagagcagtgaggccctaggcctggcctccgaaatcatttttccttcctagacctccagacctgtgataggaggggctgctgcaaagggttctgaaatgcctttgggcattttcccctttgtcttggttattaacattcagttcctttttacttatgcaaatttccgcagacagcttgaatttcccccaccaccccgagaaaataggcttttgttttctaccacatggtcaggctgcaaattttctaaacttttatgctctgcttcccttttaaatataagttccagtttcagataatctctttgctcatacatatgaccgtatactgttagaagaagccaggtcacatcttaaatgttttgctggttagaaatttcttctaccatataccctaaatcatcagtctcaagttaaaagttccacacatacctagagcaggggcacaatgctgccaatctctttttgttaaagcattgcgagagtgacctttattgcagttcccaataagttcctcatcttcatctgagaccacctcagcctggatctcattgtccatatcaatatcagcattttggtccaagcagttcaagtctctaggaagttacaaactttccctcatcttcctgtcttctgagcgctccacactgttccaacgtgtgcttcttactctgttccaaagttagttccacgttctcatgtatcttcgtagcagtgccctacctctcggtaccaattttctgtattagtcctttctcgcattgctataaactacctgagattgagtaatttgtaaagataagaggtttacttaactcaaagttcttcaggctgtacaggaagtatggctggggatacctcaggaaatttccaccttcttgtggaaggcgaaggggaagcaggcacatcttataccttacatggccagagaaggaggagaaagcagggggcagtactacacacttttaaacaaccagatctcatgagaactcattatcatgagaacagcaactgggaaattcaccctcatgatcctatcatctcccaccaggcccctcctccaacactggggaacacaactcaacatgagatttgggcaaggaaacaaatccaaatcatatcaatatgctagaatgactcaaacaataaatacgacaagaatattcctcctctgtattgacgctgttcagtatttttctggagaacctagccaatattatatgacgagagaaagttacatgaaatatatattggaaagcacaagataaattatttgaaaataatatgattttctcattatgtaaaatgatctcaaaattaggaaatgtacagtggtaataaaatgatactcagcatagttactttttgtttttcagtttccacaaacaagtgagatcatgcaatatttttctttctgtgtcttgcttatttcacttagcctaatgttcttcggctccatctgtcctgtggcaaataagaagatctcctttttttgtgtttctgttttgagatgaagtctcactctgccactcaagctggagtgcagtggctcactgcaacctccacctccccggttcaagtgattatcctacctcagcctcccaagtagctgggatttacaggcgcccaccaccacacccagctaatttttgcatttttagtagagatggggtttcaccatgttggccagggtctcaaactcctgacctcaggtgatctgcgtatctgcctgccatggcctccctaagtccctaagtgctaggattataggcataagccaccacacctggtcaagatctccttttttttttttttttttttttttttgatggaatctctgtcaccaggctgatgtgcagtggcacaatctcggctcactgcaacctccacttcctggctttaagagattctcctgcctcagcctcctgaatagctgggattacaggcgcacaccaccaagccaaactaatttttgaatttttagtagtgattggcttttaccatgttggccaggatggtctcaatctcttgaccttgtgatcctcctgccttggcctcccaaagtgctgggattacaggcatgagccaccacgcctggcccaagatctcctttttaaaggccaagtaatattccattgtgtataactatatagagagaataaaacagtggttaccaggttgggggtggaaggaggaaatggggagatgtaggtcaaagtctataaagtagcaaatatgtgggataaacaagttgaaagatctaatataaaacatgaggattatagttaatagtgtgttgtattcagaatttttactaaatgagtagattatagcttctcgtggtcagagggtgggggaacgattatgtgagatgatggatatgttaatttctttcattatggtttcattatggtaaccatttacatgtgtatcttatagcatcatgtgtataccttaaaacacacaataaaattatttttaaaaaagagaagttccaaaatctatgtagttttcttagaagtaaaccgcacaagaaagtataagcttttttttataggaagtttaaagttgtatataagtacataaataaagacatgaggaaaggaagtcacatatgatgaaaatgctagttctccctaagttagtttgtacattgaaagtaacttcagtcacactcgcatgttcactggagcactatgcgtaatagcaaaatcgtggaatcaagttgtgtccatgagtagataaagataatgtggtgtgtatatataatggaatactaacgagccacaaaggaataaaattatgtcttttgcagcaacatggatgaaactggaggctatcatcctaagtgaaataagtcagaaacagaaaatcaaatactgtattttcctataagtggtaactaatcaatgggtacacatggacatacagaattgaatactcaacattggagactccaaaagatgggagagtgggaagggggtgagagatgaaaaattacctattaggtacattgtagactatttgtgtgatgggtacactaaaagccgagacttgatcactacacaacatatccatgtaacaaaattgcacttgtaccccttaaatctaaagttcctgaagttacttcaatcaagatctagatggtccctgacttaagatggtttgactaatgatttttcaactttatgatggtgtgaaagcagtgtgcgttcagtagaaaccgtactttgagtacccatttaatcatgccatttttcactgtcactactgtgctcaatgcattacacgatatattcagtactttagtttttatagaacaggctttgtgttagatggttttgccaaagtataggctaatgtaagtgttcttgcatgtttaaggaaggctaggctaagctataatatttgacaggttcagtgtattaaatgcaattttgactcactatattttctatggacaatgggtttattggaatgtaaccctgtcataagtcgaggagcatctgtataattacacactcacatgcccacaaacatgtatgtatgcgactctctgtgtatctatatttgtattattttagaggatataacagaaccctagcaataaatagaatttatctcagatggtaaaatgaagataattgtattttaaaagttacagaagtatatattaacaaataggtgacaagaaataatctagagaggagcaatagtaggaagtagttactatttctactattcctactatatagtagctgaaaggaaagggggaacggagttcagtgaaagctgcaccaatggagggaatgtagttgttggtagaactcagatactacattatgcagctctggagcagggaaataatagagaaatttccccagctttctctttccctcttctttcaatctccagctggtacttcccaccagcttaatgcaactggaatctagccagctaatgatcacaggagatacagtgtgaaagggtcagccacttagagaataagcagagaagaaagggtgtttatgttcagggtgagcacactgaacataaatcacatgaatggtaagagggattcagttttctagataattctaaaatttgtttaaatgtaaatgcgtgagtacagttaagaaattattttcaaacaggtgatttgctttagtagattttataacatacttaacatagtatgacatgatagagaaataatttaatggtgtggaatagatattttgacaacattcccttttatttaggtaaatttagtacacaattagggtgacatttcatgtctctagagatagaataggttagctaataaagccttcaactgtggaaacccaaggcacaacaaatactaagataactttcagataatgattgaatgtgaataaacatttaaatactttattacaatgtagaagaatattacaataatattaaggtgatataaaacctagaggctgtaaaataccgacaaatttaccaacacaaaattaaaatattttccattgtgaaagaccattaaacagtaataaaacctatgatggactgcagaatgacactagtaataaaaaatcaataacctcagtatgataacactcctacaatgaatatacaaagtataatattttaaaagtggctacatattatggtcaggacattcacttgggaaaattagaaatagcccatcaaaataaaattaagcttaactaataaataaatgcatagtacaaatatcttcttattatgagggttcatgtaaataggccctgtgtttcttttggaggaaacacaacttgtaatattttaatcagacaatttagtattatctttcaaaatatgtaattttacatatatttgatcctgaggtttcacatttaagaattagatatatagtaatactcatacatatctacgacaaatgtgtaaggatgttcattgcagcgttgtacacagtagctccagtatttttcatgctatggactgttaggcagatatatctctaccattggactataggcaccataaaatcagggtctaggtttgtttgtgtttgtttttatttttgctcactatttcagctgcagtgtccagcataatcctcgacttatggcaagtgtccaataaatagttacagaataaataaatggataaatgaatacatgcattactgaaattaattttgaagttcacattgtatatatacatgtgtatatacattttaaacttgaaatttgctgaaaacatactttatgccaggcattgctctaaatgccttacttgcacttaccttcttggaaaagtctttgcctcattttaccaatgagggtatgaagaaatgaagaaattaagtttcttatccaaattcataataccagtgagtggtaaagctaaattttgaatctttactaattgagcacatcttaagaaagtacatgcatagacagtgtatatgtttaatctcattagacaggcagatgagtatgataaatggatagctaaaagaatggctgaatggatagatgcatggatgtatggatgacatagcatctggtgacaagtattacttctagctaatgggactgtggtgctgtagagatatggggtactttcactattaactttaaatgcgtctgtactgttttagttttccactacaataagcatgtatggcttttgtaataaaatgtttaaaagtgagagattaaatccagacttatgaaattaaaatatcaaagacaactaacggttgaactcttggggccaaaaccgtcaatgggatgtgttttctctgagggaaagctttcctaatcaaggggcacgttcccattgagataagagtggaaatgacccatctggtcaatccaagatcagagcccatatggggactggagctatgataaggagtcaggctccataggatatagtaattgagatagttataccaagcccctgggtttctggtcatcaggaaagacaggcccctgctagtagagctctacctgagggagaggtatttgagagaggccgacatttcagagtcaagaagaactggaagctataccaagaaaatgggttatgtggtatttagcatatcagttttaaccctcatccagccactgagaaaaggaaagaagaaattttaaaattgcaaatggacaaaaggaacattcagtaattaaaatagcagtaagattctacgcaaagcctttccttttctctatttagtctttgaagttgctaatatctagtcaaagggagttgctttccaaatatgtaatgtttgcatgcatattatagttatatattagtgatcatattgtttataaatgtgtgtataccatcctaggtttttgtttctttattgaatccctttctcatatatctgagcttaaaaagcattttttacaattatcattatttggtagaatcctacccaccgctgactcatagttttagtgagatgacaaggaattcacacacttgaatctttcaaacccccaggtatgcagacgcttagcacaaaatttttggaagctatgcttccaaagttctaaggagtctgcttttcctatcctcagtctgagagcacttgagtacatttttttttctgtagatatcagtcaatattatttttgaaaatacgtttttgtaaagcacggtgctattttgtagtgtgtatgccaaagtttagaacaatgaataaaacattagttttcctgtgtcttgagtattttcaatctgaatttaaaatgtactaactttgtcatcatcactcataggcttcttgattaacctgctaatgctctctaatttggaaattaatgcttctttccctatcacttaaaaataatctgatacagtttctagagcatgagatgttcttcaaatcaagtcttatttttggaaatgtgatcaataagaaaaacttcttgcaatacaataggaagctgaggtgcattatgcttaactttatccaaggtcacaaaatgaaagaactgggagccaaaccaaggactctacttttttttttccactttaatcagactgtcacttattggttgtatgaccttgggctgtattcttaactcacaagagagtggtgaatttaaatgaaaaaaaaacataataaaagttcttgtatataattgatacttgataaaaactaattctataccaaactgaatctcttttgcagaattttgtagggagaaaaatacaggctgctcctgttccttgctatgtgctttctgccccttcaagcagtgctcaattttcaacatgtgtcttactctacattcagggggtgtagaccatgaaaatgaacctttattcccaaaaggttctctctccattcatttactgatttaacaaatactgagtacctactacttctcagtcattggtaaaacaatctaaaggaagttcctgcctttgtggtttttatattcttatataaaaaataaacataataatgacagtttgtgacaagcaatgtaaaggaaatcaatgtaaaataaagggaaaggggttgggcttctttaaatgggataggaaatgcatctctgaagaggtgccatatgagttaagacctaatgggtgagaatgaatcaaaaatgcaaaaagagaaattattttaggtaaaagagcaccaaatatgaagatcaagaggtgtaaaatggccttcggtatttgagatgcaaaaacaaaacaagaccaatgtgtgaaagagaaagagggatgacattagagtgcttttagctaagtgtgaaggattgggtcatgctgtactttacaggcatggaaggcagtgtcttttaacacatacatcaaattctattcactattcaaaaaatatactttagtatatacattttaatgaaaatcaatctcagctatgttttacgcattcttaacatcatttattacattctcttttataaagttatcccttatcatcatcatatttgtgttacatggttttggatgcttactctctttttcacttgtacctttctccatcaatgcttcacatttgattatcttcacttctgtaaatttctaaattgcatttttttcacattggaaattacttgacatccatggatattattgtatttgtagttgggaggtcctaattacaatggtggaagccagaaactccaaactcaaatgaaatttcataagtactgtcaaaaggaaaatgtatctttgtaatttgaaaatgggttaaagtttgctacttcttgattgggtgtgtttcatcagcatgcctccagtagtgcttagaaaatacacaaatgcgtgatgttcgtccactggtttcagttttcagttagagtactactgaaaactttggattagttcaggaaaacttaattcgccatcagttattttgtcagttgttgaagtttgtgtgtgatggtgttttgctcaacactgaaccccttattctgatgttgcgtatgacatatgataccaccatgacaccatcccacataaatgttttgtgctgagagagtcacatcagtgttgtatgccatctggtttgtccaatggtccactcgtttcttccttaggaattaggaaatggagccattctaattataaaacgtgattaattgcttggtgaattggtatcatgtctgacacatggtaggcattccacaaatacttaatgaaggcatgaatgcaagcaaacctatgaattacaattatgtgccaattggaaggaaatcaggaaaaataatagatcgtatatattgagcatttactttgcattcattttctctgttaacatcatccctaattatttgcaagatactaatatgactcattttatagataaaaactgggacagggaaattagtgaattttaccacagtcccttacctattagtgatagggtcaggatttgatcaaggtatttttgcctcaacaggctaagctcttttatatgtagtgggtccatttttaccatatttttttcaaaaaaaaaaaaacctgatcattttgtacaatatctgcgttaagctagtcatcattgagtaatttgccccaggactgcccttataccatcaggcatattttgaaatcccaaaatataccagaaagaataataaccaattaaatttatgtcacatgaaataaacatctttattctggcctcactgtgtatcaagtataacttctaacactgtaaacaattaaggttcacaaatagactattttatgttagcgaggaagataaggggtggagttacttctgaaactgactatactttttctagcagcagaggaaagaaaaagtcaatttggttaggtcaaaagcaaagcacgaaaaccgcaggtgacaatcacttaagcagagttaaatgtcactgagtcaaaatactttcatctcaaatgtaaaccctaatagttcttcccacaacaggcatgtcgagagaattgtaagaaagtacagatgtttttctatctgtagtctcccatgctgactgagtagcttccatttgttatgtcaagttagtgtctgttctcctgggtttagaagttacataccaaatatttgttctaaggatttaaatagtcaaggatgtatttttcaaataaaatatatttaacatatgtaaacttaggacaattgtgacggaagagacaattttgaaaatttcctgcatttggaaattgaaaatttaaagatagaacttttcctgttgattagggcacacggcagaaatttgatttttgaaaaacttttcaactgaaacacgtcttatttaaaactcctaaagtcacagttggttgcgaattttcatttaactgacttttccccaccagcttctgtgcatttgctctgaggcactctcaggatgtttggtattaacactgcagagcttccattctgatttaatttccaaaaactatcccagcgaagagggcttttatggaaggcaattcaatgaagcagggatacagtggcaagtggtaaactgagaattttgaaattatttattcgtaacttcctttcccattacagtcattctttcatgagaacatatctctgggatcatttatttaccattgtattattaaagtctaaaatatagcctggcacaaagtaactcaataaacgtttgtggagtatatttttctgtgtctcatattttcaatatagatttttttttaccccctccgagacggagtcttgctctgtttcccaggctggagtacagtggcgtgatctcggctcaccgtcatctctgcctcccgggttcaagcaattctcctgcctcagcctcccgagtaggtgggattacaggcatgcaccaccatacccggctgatttttgtatttttaatagagacggggtttcaccatcttggccaggctggtctctgaactcctgacctcaggtgatccgcccacctcagcctcccaaagtgctcggattacaggcatgagccaccatgcccagccatagtttttacaatcactatcattacttccagctaccattatttactggattggctgcatgataagttccatttgtattggtaggtttaggatttattgattaacagaacgctcaaatagttttcagtgtatcagtcttctaaaagcatctgattttccttttttccctgttatgctctaggcaagcattatgcattttgagccactgtttttttcttttttaattttttgtttgtttgttttttgagatggagtctcactctctcacccagggtggagtgcagtggcccgatctcagcttgctgcaacctcctcctccctggttcaagcgattctctaacctcagcctcccgaatagctgggatcacctgggattagaggcgtgtatcaccatgcccagctaatttttacattttttttttattattatactttaagttttagggtacatgtgcacaacgtgcaggtttgttacatatgtatacatgtgccatgttggtgtgctgcacccattaactcgtcatttcgcattaggtatatctcctaatgctatccctcccccctccccactccccccaccccacaacaggccccggtgtgtgatgttccccttcctgtgtccaagtgttctcttttttcagttcccacctctgagtgagaacatgcagtgtttggttttttgtccttgtgatagtttgctgagaatgatggtttccagcttcatccatgtccctacaaaggacatgaactcatccttttttatgactgcatagtattccatggtgcatatatgccacattttcttaatccagtctatcattgttggacatttgggttggttccaagtctttgctattgtgaatagtgctgcagtaaacatacgtgtgcatgtgtctttatagcagcatgatttatagtcctttgggtatatacccagtaatgggatggctggctcaaatggtatttctagttctagatccctgagacatttattcagccaaaaaacacatgaaaaaatgctcatcatcactggccatcagagaaatgcaaatcaaaaccacaatgagataccatctcacaccagttagaatggcgatcattaaaaagtcaggaaacaacaggtgccggagaggatgtggagaaatttttatatttttagttgagacggcttttcaccgtgttggccaggctggtgtcaaattcctaacctcaggcgatgcacctgcctcgtcctcccgaagtgctgggattacaggcatgagctaaagcgcccagcctgagccactgttttctacttgtaacaagatgatggtgatagttttctgctagttacaccataagcatgttgaaaagcgtaatggaaagtgcaaaagataaaattgttttgtgtttctcctggataaatataggccattactttttatcgttattaattttatgatgaaattcaatcatcttcatcaacgcaaattatttccattatgacattttaccgtcctttaatgagaagcattgttactaaatggtaaaagcaactgcttgtatcagtgaatgaagtgctaaaaatggattaattaaggagtacttaatttagctaaggcagaacatatcttgcagaatgttaaaaaatttaacatgggaggagttgtgcaaattttaattaaaatgttgtatatctattgtatatagtgacttgtaagtagagaatacatgtatgtacaatgcagtcagtgctgaatgccaaatacaaaatattaaaaataacaatatcatgctttaatgaattagtccattgccatgatatggtctacaacttagaaactccagcatttagatatcagatgatattataacataaatctcttcgtatgcaagcctcaaaaaataatccactttacttccagcactttgtccttttagaatatcacatcaatgaattaggttattgtttacaaccataggttttggttgtgccaacatataggcctttctgttttcatattttgagcattctggctatggctagtttatgaccagaagtgccttctttccagtttctctattccttttcttctcagtgaatttatttatttttgtttcctaatacaaaccctgtggggaggttgatgctcatcatggtttctaaatgacatcctctcacagtttttgttgtttaataaaactcttaaaagactgaccaactaaagctttgtgagtgcacatttatacctgctatctttgaaatcttgcttgttttcaattacacatgctatgcattataattctgtatttccattcctgcctgtcccttggcagaaacttggcctgaaatttagacagtagagcctcttctttagatttcccagcggtgtttgaaggttacacccagcgactggctaatcggacttccctgaggttgactgcccaagattagttttgttgaaggcactgctttcatcttacttactcacattgactttcttggggtgagggcatgttgaaagcaaactttgtgcgatacttggtcttcaaatacactgagatagtatctgagagaatgaggttaaggtaccatggcagtgtagtgcaatgactggtttctaatctgattttgactagcctttgaatttgccttcagaccgccatgaggttcaacttctttattcgaaaaatgatcaaatttcgctaaatgatttatttgttccatagtatcctcaaatatgaaacactcatcagaaacggtgttattgttcataaagtaaaatctctagcagtattgtgagttctcactattttcattctgagacggcttcaaagattggataagcaattattaaaatctggtgtccgtgagcattttatgtagtagagtcttggtgtaaaattacgttcatgtaattgttaagttcttactttggggattcagccactgctctcatttcataaaatcttaatgtcgtgtaataagaagtataaattacatcccatcattttcatactcctcaaatactttatagtactcattatcataccattgcctttagtcactgtcttacataattctcatcaatttctatgactttaactgtcctctgtattgagtttcttaacaaatacttaggtgatcacagagtgccaggaattggccttagtgcagtcatcataaatgaggattaccccgaagtccataacatttattttgatttcccataaaaagtaatgtttataattatggggtggctcatctgctatatactcataatctaacatagtctaagtatattctatagcacatgacaatcacttagcacatatggaataagtgataaatgctttttccttctaagtaaattcttctggcttcctgttaatagtatacaaatggtctcctacaactaggtttgtttttgtgttaatgatagaaacagcaaaaatatgacaaaaatgacaaaaaaatgcaacatagtaatggtattaaggttcaacaaactttacagttttactaaacattggatttgggcttcataacatcttaaataagagggaatgctcctggtcaaccacagtctctgaaaggagcgtattcttaggttttgcggggggagtcagaagtccagcaatctaagaacatttcagattgggaataggatgatgatagctttagaagcgtggtaactcaggtgagaccattgttaattagtttgagaattatcttcattgaagtgaatccactctggcaaagtttcagaagggagtgtttgctgctggttggctgggggaagcatgataagaatcatggaggaactaattgttaaatgaataaatagggtagattgaaacttttgttggtgtctacttgttaccatggctgcagaacaatcagtgtcctctttcgtcctcttcctcctttgttttattgtcagtttattaatctttatatcctaaggctgtagcacataactttgtatataggcatttccaaagactgtggagtaaatgatttgaaaattgaatgaagtcatttttgatccatcttagaatttttgtcattcattgacttgttttcatttcccccgtacacagttgtaccttagatcttgaacactttatatctggattatggtcctagcctcctatttctctcaagttttcctccagcaatccattctgtacttaaagaatttactttaataaaattttgatggtgtcaccctctcattgaaaagtatttactctctagtctattgaatgaaggccaggttttctagtttgctgttgatgatccctcagttttctatgtacaatctaccagtttcatcttagttttcactactctactctctctaagacacacaaagccactgttgccaagacatcgctaatgtgtccctacctctgcatgtttattctacatattcccactgccccgaatactcttccccattccctcatttccagctattgaaatcctatgcataattaattcagtttcctatttaaagagaattgccttatcctccaatattatatgattttaaaaatctgaacatgttaaacaactggttgtgccaattagaggaacacattttaaattctgttcagcaatgcaattactttgtacttctattatttactttcttattccaaattagaagcagaattcatgaattttctatctttcaaatttcctggataatccattaaaatactttgaatataatagatttcttgaaaatgtatgttgatgaaattcaaaatattttagaagacctaaattcctttcttcaaaaattacttatttctacctactggcagttttgaattccacataatctcagaagtgggatagtaatagtttggggcaaaatggcaatagtttggttaaataagtgcatatttattgtaatgactgatatttatgaacagctgcatttagtccacatgttttatgtaaatgaaatttattacaatgtttgaaattttttggggggcaataaaaataatgcttggccaatttttcaccattttttactttttataatggcatatatttgagaccaaacatacatgcatgtgtctatgtataacacagcagtgaataggcacaggctcaaccctttttgttttctcacatcatggttttatttaatatactaaaaatgaaagagctctaagttatgctaatcacaggtacagctgactagttactagtgagaaggaagaacattttctagaatttcaagatacggtgaagtatagtatctactatataagaaacaattggtcaaatattttgaaaaacaattatcaaatgaattggagatttctaggcttcagaattccaaagctaagtttgtaagattattaaggaaggcagtgttcatgcacaaaatattatttagttcttctttaaaaagtacttgcaaaaattactttgaccatctgttgattaataattaaagtgtaataagttgagccatatgtgttgtataactttgtacctttcagccttgtgcattgaaatgtctaatatcatttgaataaatgaataaaacaataaaacgggagatgatgtaacagtctgcttataagtaatgtttttggcccttattcaaaatgtagcagactagcagtttcagcatcacttgggagactattgcaaatgcagagctccaggctctaccccgatctattgaatcagattctgtagttttaaaagatccccaggtgattcatatgtacattaagaattgagaagcactgtattgttctacggatagaagtagaccaaggaacattaattttttcgtctcttgtaactctttttaaaaatactttaaaaatagctgttctgattaatcatggttctgatacttgcaaaagaattgatgaagtcacttgttcaacctgcttttgtgctaacggacttgagactttactcttggctttttcacttataatcagaacacctgatcagaatatacatactgaatacagatatcttaatagtagttaagctaagataaattgtatggcaaggaaaatacattgccacattaccttgacctcctgccaggatttatgtttatcttttatctttgatttttatattcattaatgattaaaaaactaaaattgcatacatttatcatgtacaacacgatgttttgaaatatgtatacgttctggaatggctacattgaactaattaatacatgttttacttcatatgcttagcatgtttcatggtgagtatacttaatatctactctcgcagcaatttttaggaatacaatacattgttataaactaggttgtacaatagatctcctgaacttatttttcctatctaactgaaattttgtgtcctttgaccaacatcttcccaacccctgccccacagcccctggtaaacaccattctactctctacttctatgaattcaactttttagattccatgtgttagtgagatcatgtggtacttatctttctgtgcctggcttatttcacttaatatcctccagatttacacatgctgtctcaatgacaaaatttccttctttttaaaggatgaaaaaggatgacaatgaaatgctagcatttcatagtcagaacttatgtgttaacatttctagtactaatgacatacttcacataaaggattactttacatcttggttcactggaatgagtgcagtaagtaaattttaatgccaagtagcaaatgaatcttttgaaggagctgccactttatatgtgttattacaaagtattattgactttaaatgctgcgtttcattcactttctggatgtggcaaaggatatgaagtcagatcaacttaatgtgcgggacttttacatttgtctctaatgtctgagaaggaaagtgatattctactttatcccatgcaccacaatgtaaacaaatatttttaacatacacggaatagtaaaaatcattatatggtatttttctgtttaatttatattgtggatacatgactcatttcagcagagacttatttagctctctgcatactttaatatcagcaacattcagttaaaaggtatcaggtttctttactgagaaccaaagcggtaaaccattttgtgtatttgtttaattaccagtgcaccatttgaattgacatgttaatataactttccattggagggaaaatgtaatcttttatttttgtttcttatctaatgaaagctactctgttagatgggctagtttggcaatttgacttaggaaaaagtaatatggaatgaagtttttatatgaacaaggaaaataaattaactttactgctcatctcattggtctgccaaattggaaagacattttaggcctcattctcatgttctaattagtctctggaggacattcatggacaattcactgttcattaatctatcgtcttcctttaactttgatttgttcattatccttttagagtctcaaatatagaaaccaaaaattgatgtgtagtgttaatgtgcttacagatgttgataccacctatccagataagaagtccatcttaatgtacatcacatcactcttccaagttttgcctcaacaagtgagcattgaagccatccaggaagtggaaatgttgccaaggccacctaaagtgactaaagaagaacattttcagttacatcatcaaatgcactattctcaacaggtaaagtgtgtaaaggacagctactattcaagatgttttctgttttatatgcatttttaggtattacgtgcacatatatatataacttatatgtatatacacgtgtatatatacaaagcctaatgtatgtatatgtacaaaaagagacagactaaaccttttcaattttgcttcattgactacaatattcatttcaaaacatattttaaaaatactattcatatgtaccatatcataggaatatagaacataatatattaaatttccattgtgtaacacacaatgaaatgaaaggcaaacttacgtacatattaaactctaaaatcttcatcaactagaacaaagagctagagaaagattaaaggcaaatacagtttttaatcattaaaaaatactttatgacaatatgatgtacaaagtcagattttgattattcaggataacaattttgaaaatagaaaagtgttttaaactatttcaaataaacaataaagaaaaacatgatgaaattcttcgttacataattgtatagaatttagtggggttcttccatgacattggcttgttctttctctcaacagtgggtggtttggatgttttcctatgctttctcaggcacaaacaacagtgaagaaacctttagcaacatttctgctgaatgtgtggagagctcttaggccaaactctctcactttgctgagctagctctgtattagcttatgaaatttttagtcctttccagggtatggacctgatgaattctgtttttatttactttggatttagagaaaattgcttatggatgcctgtttttgccggattgaagagtaccatcccatataaatgttggagttgtgttactttggaatcctcatggctaaatagcatgctcatatcttcccagatcatttactctccaacatgatattaagtgccttcattctgggagtataccaatttcgaatatcatttatatatgtttagtattaaacattgaatctcaccatttccatttaatgttctgttttctaccatgttggaaagtagtcctttcgggttacttatggtttttccccctcctctctatccactcccccaaacccttctctgcagatcacggtcagtctagcacagggatatgagagaacttcttcccctaagcctcgattcaagagctatgcctacacacaggctgcttatgtcaccacctctgaccctacacggagcccatttccttcacaggtctgtcaacatttactctctgttgtacaaaccagagaactgcttccaagataatctaacactgcttttacttgcttgaatttttcagtgccttttatctcctcgtgaagagctggtttgtttttccaagttttattgattccctcatgtgattctgctttgttattgagtcttctctaggtttactatacgttgattcttcataaatatgaattcccgtaatggtttctactttcattatgtaataacctctaaggttctctttgacaaaggctgctaatggttataaaaaacatgaggctcatgaaaagttttatatatgtaacttcgaaaagtgtaggtacatctgtgaaaattgctaattacactatttggggagatttttctggatctacgtaaaggaaatacatacattctaagtgaattattttatctattcattctaaaatatatattctatgtaagaaaaatataactgcaagcttcttcatatgctctcctttaattttgctaatttaaacttgtgtatagcaggctctgtagtatttataagaaaaagtcacactgaaaccaggtcatattctcggcaatgtttagtactttctatatgaggaagactcagtggagttttccaccctttcaatattgtatggaacccaatatacaagaaatagccttataaatgttacagcgtgggaatgaaatgtgctaggattgctagatttgcaagaattactttttaacaaaaatgatttattttgctcaatggagccaattcgaaacgtgctagaggatgtgatttttatcaaaactacactatgaatgggagtttaaaaatgatagacctgatcctatcggctaaaaaatgtgtacatttttggagactcaattttttgttaagatagtggtgtgcatttaattagtaatttatttggcagttaatcgatgcattagctgaaaattctaagctttgaaatagttatgacctccatccttggctagtttacttgcaaagctctcttctcactctctctcattctggacctcttgactctccatcgactctctagactcaatttatcaccattccctccgttgaaatcaccaagacttaaggaataagtgccacctcctaagattaaggagcatacaccaagcaaagatataggggtttttttccccctctcattatcactttattgagctgccttttctaggttttctccaatgcctattctggtagcacattttcacctcatcaccaccttcattaaggcatcgctcaggtatgactccttaatgaagtaattacaaatggacttacatcttgctaggctctgctcattctacctttgtgtaaatattaccaaatacataatatgtcataaatcacagataattcaacaaattcacttacttgttttatttaaaataagccattcaaataaatgtaatgtttatcatttaaaaaagacacagcacaaatcacaagagatgggggatggggaatgatatattctgtcactaaaggaagcatatcagaagatgatgttacatgtagttaggtttgataagtgtatgccttaattattcacactaagaacatttatttcaaaagtgtcaaaaggactgagctttcactgcccctacaggctgtacctgctctacttcaaaggaactcaagacaggctggatctgattccatcagaaagctttattaaagtgtttacttgctggtctacagagaaaaataacgttctctataagaggagagagccatgtgggtgactgtcccctatggaaaacacgtgcatgccctcactccccagacacatcactctgctttaacttcatttatttattcaacaaataagtattcttaatcacagagacaaatggcttttattcagctctcctaactttctaccactgatgaaacatttttctcagcctctacactcagcgggttcttcctctctgactattctgtgtctttcattacctggctctttctgttcttccaacttctttagcttatgaaactcatgggaaatatcttggcattcttatctctgtacttgttcttttatcaacataatttaataataatttaataacctggcttcaatctgtattcaatctgtatgcaaatgatcattgtatctctgtcttcaccacttccaatcttacttgagttatagccacatttccaattaattttcaactctttgtatgtatctataccttgatatccactaatatctcaaacctagtatgtctccaagtgaagtttattatgaagtttcttgtccattttttaatgttattcagagccctaataatacaatttttttcgcttaattttgtccatataacaaggctactctcctaaactgcctcgaaaagatttatgatatattaatattttatatttttatgctcattacacacgtatttcatgttccttcaaccaaattacatcactcgttctcccacacaggtgccccaaaattttccatattagcttttatgcttcccttagctcagagtgcttttgtctctgttttaaattggccaacttaatttgtatttctaggcctaattagtaagtggcagaacctgaattcaaatttgcatttattcaactccatgcccatgctcattatagtagggtgacgctgcactttctcgacggtgattcttatatattgcgttacgcacacatagagcagtattcatacatttgattatttagcgcttgtgtttgaatcacctattatgtgccaggtactgttattgaagcaagtgacacataaacatgcaaaacaatctgtgtctgaaagtattctaattttattatcctcctgctgtcttccctcatgccatacgtttttaactcatttaataaatggtaaggccgggcgtggtggctcatgcctgtactcccagtactttgggaggccaaggtgggtggatcacctgaggtcagagttcgagaccaaccgaaccaacatggtaaaaccccatctctactaaaaatacaaaattagctgggtgtggtggcgcacacctgtaatcccagctactcgggaggctgaggcaggagaatcacttgaacccgggaggtggaggttgcagtgagttgaaatcatgccattgcactacagcatgggcaacaagagtgaaactctgtctcaaaaatacataaataaaaaaaataaatggtatgatatgagccttttaattttatctgtgagcttttctgtttcatgatcctctagcatagcatatctggtagcagaattggaggccaatatttcatcaaagtcatttccctcctgatgcagtagatgtgacttatgaaataattagagaaatcaaggattaccgtgaggtttcttacttaagcaactggccaaatagagttgccacaaaccaagatgggtgagactgtagaaggaacaggtttgggagtgaacgttaggatttcagttttaaacatattaatcttgaggtgcctatgaggctatgaatgcatgtaaagaaggggttctaagatcagagttgaggataataatttagaagtcaacacatagatgttatttaaatccatcggccaggataagattgccaaggaaaaatgtgtagacagatgagatctctagatgtatatatgatgaggcatcagcaaaggggctgaaaaaggtggctagaaaggggagagaaaaaggagaagatagatgtggcattctggaatccagaagaaagtgttttcagagaaaggaagatacctaactacattaaatattgctgatgagttcaaataacatgatgattgaaaattattcagtgaatttaggaaaacagtagggtacgatgtctgggaaatcctaatatatagcagttactacagtggaattactaacactcctattcactcttaaaactttcccattttgaccgataaagttacatgctctctctagtttatatcccctttaataagaacaatttcagtggtgtgtgcatgtgtgtgtatttggaggtgttgctgattagagtaggttcaaacgacagtaaaagtgaaggctaccctcattgtaacacttaaaaaaacaaactacaccgcgagctgggtgtagtggctcatgcctgtaatcccgcctcttttggaggatgacgcggggagatcacttgaggctaggagtttgagaccagcctggccaacatggcaaaatgctgtttctactgaaaacacaaaaattaagcgagtgtggtggcacacacctgtaatcccagctacttgggaagctgaggcatgaggattgcttgaagccaggaggtggaggttgcagtgagctgagatcggccactgcactccagcctgggtgacagggcaagactcggtctcaaaacactaccctgaatagttgatggccacagggacaaaaacatacttcttttaaattaacccatcctgataactaatcatgtgtctatatgtattagttcgatttttgatgcaacaactacaaacctagtgcccctaatcaacacatattcattattttacagttctttagttcagatgtttaaaacaggtctcattcagctaacattaacatatcagcagggctgccttccttttggaggctgtagaggagaatccatttccatgccttttctagcttctagaggctgaccacattcactggctcattgccccctttcaacttcaaagctaacaagggcaaattgagtctttctcatatgacatcactcttacctatactcttctgcccccctacatctacttttaagagccttcattattacttacttgctatgtgaccttcagagaatttcttgaactctgggcctcagtttcctcatgtgtattattgaaactgtttctaactcatatagttattaggagtgttaaatgagattaattttataaagaacattgcatggtataagcacattgtaagttctcaaaacccggcaaccaatatgattactactttagatacatcaggggttagataagattttgtggtctgatctgagaaaatttttatgtttttattagcacttttatgagaagagatagcctggattctgatttataaacaaactcacaacctgtatagagttcggcaagttaatataccgagtaaaagattctaaggaaaaggatatccttttttgttctgaggttgctgaggaacaatcttggaaccatgcagagcagaacatagtaatgccttttataaagcagaaaaagcacttctgggtgattttacatccagcaatcctgtgttgggaggggatgaggcagaggagatttttcactctatctctgcctttgccccctcctggcacaacttgtccctcagactgtccacatattgtagaaagtaattggcaaacagaggatgggaagccagccagggagaccactccttagattaaaagtatcactaatttgcttcgaggaagcctttatacatcctgatgtgactgaacaaattacccagaaacagaattgttaggttttagctcaactctataaattggtacactgaagacttctgagtagaattttaaaactggaaggaaccttgaagtgaatatatgtgatgatgttattttcaacagttacactcttatcgtttaacttcttttgaaatttactttattgtgtgtaagaacacttaacatgggattcaccctcttaactgatttttaagtgtaaaatacagcattgttcagtataggtacaagttgtacaacagatcttgagaattttctcatctttcatagctgaaccttcgttaattagcagcttcccacttcctcctctccacagcctctagcaactactatttcactctctgatttgatcagcttgagtattttacatacctcttataagtagaatcatggagtgtttgtccttatgtgactgtcttatttcacttcccataatgtccttagggttcatccatgttgttaatgtggcaggatctctttctttttgaatattaatagtaatctcttgtatgtatataccacattttctttatcccctcatccatcagtggacactgaggatgtttccacatcttggctcttgtgaatggtgttgcaatgaacatggcattgcaggtatcccttcaagatcctgatttcaattcttttggataaatatccaaaagtgagattgctagatcaagtgggagttctgtttttaatttttgaggagcaactatattattttccataatagccatgccattttttacttcaccaacggtgtacaatagttccaattattccacatccttactaatccattttttaatagtaggcatccaacaggtataaatgtgatagctcattctgcttttcatttacatttccctgataattcataatgttgaacatattttcatacacctgttgaccatttgggtgtcgtctttggagaaatgtctgttcaagcctttagcccatttttaattgcgtttttagtttttttttttttgccaatgagttgtaggaattctttatatattttagaagataaccagttgttaatataatataaggtcttcaggtctgatcacaaaatcttacctaagccctgatgtatttaaaatagtaatcatgatattggttgctgtctttttgataacttagaatgtagctataccatgaagtattctttatataattcattttatttaaccctcctaatagctctgagttagaaataattctcataatatatatatatggtttgtattttcccattccatagattgccttttcacagtgttgatttgttcccttttctaaacagaagatttttagttttatgtagtcttaattctattttttttgcttttattgcttgtgcttttggaaataattgcgaggatgaatgtcacaagatttttccaatgttttcttctaggagttttatggattgaggttttacatttacatattttatccgtttggagttgatatttgcatatggcataagataagcaccaatttcattattttgcacgtggatatccagtttttccaacaccatttgttgaagagattatcctttcctccttgtgtatgcttggctctatcgtggaacatcagttaaccctatatgtgtagatttatatctgggctctattctgttctattggtctatatgtctgtcttcatgacaatacaatttatttttaattactgtagtttagtaatatattttgaaatcaggaagtgtgatacctccaattttgtacttctttctcaaggttgatttagccatttgggattctttgtggttccatatgaatttcagagtttttctctgtttctgtgaaaaatgccattggaattttgataaagattatattagttctgtagatttctttgaatgtaatgacaattttaagtccttcgatccatgaatgtaggatgtctttccatttgattttgtcatctttaatttctttcatcaatgttttatagttttcagtacatactctttgacctctttagtttattactgttttctttttggtgctcttgtgaatggaatttgtctcctagaaactcaactaatttttgtatgatgattttgtatcctacaactttactgatttttaaattggttctagtgtttttaatggattctagggttttctattcataagattatgtcatctgcaaataggaataacattcttcatttctgatttatatacctttacttttttttttttgcctaattattctagcaaggacttccagtattgccatcggtagaagtggcaagaatgggcatacttaccttgttcctcctgttcctgatttcatagaaaatcctttcagttcgcagttgttgtgatatgacctgcgatctttttatatatggcttttacattgaagcaatttccttctattcctagtttgttgagagtttaatggttttttttaaatagtgaaattgtgttgaattttgccaaacaagttttcagcatctaatgaaatgaacatgtgacttcttatttattctgttaacgtggtgtatcatactaattgattttcatgttgaaccatccttgtatcccaaggataaatctcacttggtcatggtatatgatccttttaatgtgttgttaaaatttgccagaattttgttgagaattttgcctctatatctgtcaaggatattgagttgcagttttcttgggatgtctttttctggctttggtaatgctgaccttataaagtgaatttggaagtgctccctccacttcagttttttcaaagagttcgtgaagcattggcattaattttctttaaaaaatgtttgatagaaatcacttatgaagtcacctcgtcttttgcttttctttgttgagagtttaaaaattacttactcaatcccttacttgtattgatctattcagacttttccatttttacacagttcagatttggtaggttttatgtttctaggaatttaaccatgtttttagattacagtttcttggtgtaaaattgttcatagtggtctctttatgaagattaaaggagcgttattgtgttatagtccaaaaacctagaggtttttaaaaaaatgatttagtgtaagtaacttaaaaacaaaaagttatttaaggtaaagccctcattaagtatgaaaattttataaggatagtataaccaaaatacatcatttattccactaggtgtgtctgcatttaggaaatatgttaaatgcctagcatgtaatttacatttattatttctgatcttcaaaaaaatcttacaaagatgtaactccacaaatggagttacctatcaaaataggttaggaaattgatgcttaaaaaaagctttgaatagtgtgggaatgttatttttcttcttgacatataagtgataattctaaataagaataggaaattttctgtcatccatgtcccaaatacatttcctgttttgtcctctgaattattctattcatgtttattttgatgtaaataagaattttaatggtgttaaacttttcgaagaacattaaggaatattccatagctaagatattaagatgaaaacaggagtataataggaatctagtctgtgggacctgcatatgctattttctctctattactcagttttctcatctctaaaataaagatactttcaactttccatggggtggctaaaataattaatgcatagtgtatgtgagaaaagcctccactatcacatagagtgttagaggggaaagactccattcaccttcttacacaacaggcattcaataagtagttaagggtaaagaaatatttacaacaacgtggatcaacactcttccattttgcattatatttataaatgataatgtaatcttaaaaatataagtcaaaaaatgtagaatgaaagtccatttttacatttggtaaagatatttggagtttctggaagagatgatatataattttaccaaccattctagaaaatgacttttttgtctcttgataccagagataggtccagaggtattgctgtggatgttacaaaaatagagtcaatttttgcgaaccaaggatatttgaatgctctcatttaagtcatgtttattacattttatgggatttgtcggttcctagaatttgaatgaattattggatggaatttagctaatctgtgttccggtgtttaagcaggtcagggcggcttatttgtaatcattaatagtttgtttggatctccacatgtaggctagatgcagtatgccttctttaggaagggcctcttaaggaatatctttttcaaacatttattttaatacttttttatttttatgttttattatttttcttttacaaatcaagtctttatggaagtaagaattcgtgttacaactgattgaccttagttgtgtgactcagttatctcttggcatacctgtgtaatgcttagctcacctgtgtaatacaggtgtgcttaccttgttcaccagtaactattgccatatagcaaatcaactcaaaacttgggagcttataaaaacaacattcgtttttcttattatctcttttgattctgggtctcagatgggttcagggcttctcatataggtgtaataaaatagtagatgaagctgaagtcattttgaaggcttcttcactaacatgcctggtggctactgctggaacttcagccagggcagttggctggaacatgtatatgtggccttatttaatctgcagtcactcactaaatgctggctggattccaagagtaagtgacccaaagagtaccaagcagaaactctattgccttttgtgacttagtcttggaagtcacatagtataacttcttccatagtcaggggtccatcctagtcaaggggcagaaacataaacccaactcttgatggagaagtatcagtgttacatccgaagaataacatgtaagatgaaacatattgtatccatcttaaaaaaatacaatctgtcagaacttacaagattcttctgaagaatccaggttagttgggaaatgtggctagcatggtgcctaacaggtgttcaataaagtgcactctacttactgatgactgtacttgttttaggtaagcttgtacagatcttcaaatatccaggctcctgattaagaagtttgagaatgtccttgcacataagtgtcacagagtaggagccgaaatggccacttaattgctttctagcacaaatgaaatttcaaatccatttggaaataatttgtatgtgtaatttaataccaagaatattaagtagacactgaaacctctacacctttcattttacaggtgaagacactcaagctgagatatgctaagtcatgtacctaagattacagagcagaaatatttggtctaggatcctgatatcctgaattttgttaaacatgatgtcttcttaaggattataattattttaagctaattcatcacactgtcacattttctgtagggcgatctctagtttctacattcattaagtaatttgattttcttttttgcattaattttattacaatctattttgttttcagaaaatattttaatatttttaatcttttctctttaaattattaaccttatattttaatgaaactatattcaaagtgttgtaacatcataattaagatacatgacaaccatgattgaaaatgaaaacttagatacatttctttcttttcttttcttttctttttttttttttttttttttttgagatggagtttttgctctgttgccccggctgaagtgcactggcacgatcttggctcaatgcaacctctgcctcctgggttcaagcaactctcctgcctcagcctcctgagtagctggtattacaggtgcctgccaccacacccagctaatttttgtatttttcagtagagacgaggtttccccattttggccaggctggtctcgaactcttgacctcaggtgatccagccgccttggccatccaaagttctgtgattacagatgtgagccattgtgcccggccatacagatatattccttaaaatgtataattagtggatacccatgcctaattttaatccctgctatagaattctggcagcacatatccttgcatattgtggtctttatctacaaataatatcagtgaaaaaatgtaataatgcttggttaatcaacataaacttgttaccaaacttgtagattaacacagagcctcctattatgtcatacatgtgttaaatccatgtgggtctcaaatctactagcaaacttttttgttttcactaagagtttacccccttaagcatgtcaatgtaaagaaaaatattaattcttttgaagagataccttatttagtaataattagagtgactttaaaatcaacacataattaacggtcacatattttgttcattataaagtttaatagaaatacagtcattttttaaattatgagaatgctatcaattaaatctttggggaaataaactatctttggaaggattaatgatgagttgatggtatcgttatgaaactcctcatttctagatcatctgcataccaattcagctacataaagtcatgttcctcttttatgtgtagcaaatccagattttcaagcttagcattttaaatacttacttctattaggtaacttatttaaagtgtaatgatgccaatgatgagaggtatgtataacaatgggattacttcacaataaaacttacttatagtgaatatttatgaaaatgtttattaggtgtctctgggaactctggtcaatttaaaatcttagtacattttatcttcattataacatgtcccaaggaaatttttggctgaaagattagcattataaaaatagaactttaattagaaatttctatattgtgtgtcagattgctaaatccagtggcaattatctgcttcctaagatatgtagtcctctttctgaaacattcaaatttactttataatacctgaaaaagtcatttcaagaagaaatttagatcattaatggaatgagaaataagattagcccgtggattcttctacttctactttataatttaaatttcaggtgagctaggtgattaaagtcattttaactatttggtacctcaaatagttcaggaacaagtatgccggaagcactgtagtattaccattaatttaataattgcttattggccacttgatcctagaagccaggaataaatgtgaaataaagtttttataagctcttaaaaatcttaacatttctattgcttcatagagcatgattatagttaattatttatggagtcaataaaggaatttagtatggcaattcttgcatcatgtattggttatgatgcttttaagaaagactctaaggaaagttagaagtcaaatataaagttgggaaaattattagtaacatttataacatacgaaggattgatagccctcatatataaataatgctgataaatcaataagtaaaactagaatgccccaataggaaaattcataaagaacatgagccagaaaatgacaaaagcgaaaaagcccatatatcattaagtatgtaaaaagacataccatctacttaataaaaaaatataatataaacaatcaaattatttttaactaccagataggcagattgaaacagtgataatactgataattttgcagaacataaagaaacaggaaacatcaaaagttgtaagagggcttatgacagaataaattgatgctgtccttctggtgcataattttttaatcacaaaatttaaatttaggagtaataatctggtaaatgaaatgatgtaagacatagttaaaacaggttttcaaagagggaaagtttaataaacacttgaatagtgatcaccataggattaataaaacttagggtaaatatttttaatgcaatatcatgaaatctttaaaattcatgctatagttatatacttaataccatgctgtaaagatagcactgatacatggttagattataagcaaagttttcaaatagagtatatatctgtgtgttacgtgtgcatatatatgtgtgtgtgtgggtatatacatacagcaatacacatatctaccaataatactaaacacttacatagggagtatgttctattcgaagttatacatatgggttgtctctaacagcactttatctctgtgcctatttccctagtctcatcctcataactagaactctaaatccattatgtatacacactgtgtgtgtgtgtgtgtgtgtgtgtgtgtgtgtgtgtatgtatgtgtgtgtgtgtgtgttttgtatgtgctataacatttcacttttgcttctatggtgcaatttttttcattggaaatttaacaacttactatttttaccgtcttaatttttaaacaaataagtcattattactcagtggcccttgaaatattgaggcaatatgtctcaaaaacttcttgttaggtgaatggttacattcactccttctttctttctttttttttttattatacttttagggtacatgtgcacaatgtgcaggttagttacatatgtatacatgtgccatgttggtgtgctgcacccattaactcatcatttaacattaggtatatctcctaatgctatcccttccccctccccccaccccactacgggacccagtgtgtgatgttccccttcctgtgtccatgtgttctcattgttcgattcccacctatgagtgagaacatgcggtgtttggttttttgtccttgcgatagtttgctgagaatgatggtttccagcttcatccatgtccctacaaaggacatgaactcatccttttttatggctgcatagtattccatggtgtatatgtggcacattttcttaatccagtctatcattgttggacatttgggttgattccaagtctttgctattgtgagtagtgccacaataagcatacgtgtacatgtatctttatagcagcatgatttataatcctttgggtatatacccagtaatgtgatggctgggtcaagtggtatttctagttctagatccctgaggaatcgccactccttctttcaatagaaaattattgagtaattagtatgtcctagaaactaccataaagctctttaccatgataacccaattgtggtttggagatttactaatgtatcacaatatgcaggttaaagactgctgttagaatgtgttactagtcacttaatgtttattaagtgccatctaaaccagtcattctagatctggttattaaatttcactatgttataataactttttcattccaatgtgcactgtgaatcagcaagggaacgctattcattgtggtcatttggaaacccagcctgatgaaacagctactatctaggatactcccagtcactccgcaaagggaaagaaaattctgaaaggtcttgtgctggcaattaattgcttgaactggaagtgacatatctgcttcagttcacaactcacgagcacaactagttacatggtctcacccaacttagaactaagaaatatattcgtattacatgtctcaaaggtagaaagctggaaataaatatgaatggtgttaataactgctacactgctaaatttatgttgtcagaaacatctaaggacaaaatgaactatgaaataaaaacatggccatgctctcaaaatttgttttttttgatatgaactcttcaagcataaaaaattaaattccaaaattgaaatcataaactaagttaacttgctaaaattcatggggtcaaatatgtgatatttgaatactcgctaatagaaatgtctcaaaatgcaataaaaggctttgggggatagtgagccctctgtcagagtagtgtttaagtatagactacctaatgagactggttgtaaaaggcagtcggtcacgggacacatggcttattaatatgttcacttactatgtactggaaccatatagctgtctaagatgagctttcttctcctttgcaagccttaaatccataattctaatcgatgggtcttgtggaatagtggtaactattatggaatgagagacagtgaaccaagcatggggaacatatatggccatattattgcccttaaggaatttacaaactgagtaagtagagaagatgttgagagtagttctaaatcctgaaataatttcactttacactcggaagaaaatccaaaacaccatcgtgatttgttccctataggtatcctaccttctttcctacccttaaccccatttctcagctccagatacactggcctactagcttggcatcaaatacgccaagcatactttgagttcagtgactttacacatgtatctccctcttcctggaagggtttttcccccagttattcatatggcgcacttcctttaccttagactgcaaagagatcttttctgactaccctatttgatatgccactaccattgttctgtcttctttcaaagctttaatttttttcctcattgtagttatcactactgacattacgatatttgcaggtcgtttttccctaatgagtaaaaactccaagaggaaaaggactagaatatatactaggtacataaagcatattgatcaaatgaatgaaagcatcacgtttcttttatatgccccagtttgcgattgtattgtatattctaagagttgagtgaacagcaatacttaagggagcagctgcccgtgaatctaatatattgttcagggttttgaagcaggtcctgcaatataaaccctgctgcagcacagttttacgtcatcttccttctcttactatgaattattaatcccatcaacctcatcgtaatagaagagttacgtataaaagaatgagtaatacaaggtgggatatgctaccttgtatttcaaacacatgtttgatttttccaaactaatttcagtgattggagagatcgtacaaatatggatatataaggcttattactagcgtgatgaatgggatccaagaatcggcagtttatgcatcctacaatggtccatcgactcgtactcaggaagatttccatagagtaagttcatcttgaacagagctttttacgaggcttagataagaaaagaatgaaaatactttaggtgggacatgatttcaataaatggtattactaaagccatggaaataaccctatgcttaagagatggacgaaacagatattttggaatctttgctgctctaagattctttatcgcctaatagcaaaaagattagataaagaggaaaactatcacttactggtcaaaggtagaaaatgtatggagaagaaatcagtgaaaagtgatgtaaaatatgtaactaggaaataaataaggctagagaaggtaccagaagtagatgagcagctgtggactgttacccccactcccgtctcaaatataaggggcgtagcctgagggttttctgttcaaaacaactttgactgtgtgtgtgtgtgtatgtgtttctgtgtgtgtgtgctggggagaaaggttggggtgggtggaaggagagttgatggggggagagagacagcaaacaatgttgaggctcaaaatgaaatttctatttttaagtacattttgaaaatattggcttatataaagttttcactaatttttgaagtaatattaaatatatgagtcttttaacaaatattgggcattcataatttgagatgtaatacctaattttgaatgaaataattgtttttctcaataaattaaagcataagaattattggagatttttcaccattccatgagaggaaattttagtagtgtacaaaagtagattaagatttatagacagcctttggcttggagaaacttactctactcagtgcctgaggaccagttgtgaagacagtcttatttgtgttggacaaaaacgtcaggcctttgaaaaaaacaatattcaaagtcagtattttgattgtatttgaagttcttagtgatgtttctaaacgttacgttaaatattagaaaaatattttcatggtcatatgtgtcatggtcataatcaatatgatagcttagttttttaagagtacaaaaatttaggccaggcacggtggctcatgcctgtaatcccagcactctgggaggccgaagcaggcggatcatgagttcaggagttcgagaccagcctgaccaacatggtgaagccccgtctcaagtaaaaatacaaaaatcagccaggtgtggtggcacatgcctgtattcccagctactcagaggctgaggcaggagaatcgcttgaaccccagaggcggaggttgcagtgagccgagatcgcgccactgcactccagcctgggtgacagagtaagactccgtctcaaaaaaaaaaaaaaaaaaaaaaaaaaaaaagtacaaatattagagcgaaacgaacatcaacaatttagtgaacgtttcttgtgtcagtttcagtctcagtatactgtgaaaagggaatgaaaaaaacatgtttaaagtgagtaaaattgattgacgtggtctttttcagcatgttttaagtgtttttcgctttgccaattaaaacttctattttattatttacctaaatctaccccccagtaaacaaaatagtatttccattttcataaaaggcagttccttttctttttcatcacccccatctttagagatctttgactttctattttttctcactgcctgacattaagattccttctgttaaatgtttttgaattacatttagttcataagaaatgtttcccctagactttaagaactttcggacataaaatttttcgccaattttgttcattcacttaacaaggacaaaaaaccagaaagagttgggtgacaatttccattcagtaaatgttctttactaaatctgaattgcatattgtggaatcagtaaatgtcaagaacaagccagtctatcttttcacaaaaaaaaaaaccaaaacctcgttgttactattttctattgtttttctagtttctattttatttacttttgttctgatctttattctttccttctattaacttcccctgtggaataactccaattataccatatcatgaagcaaaacatataactgtagaaatacaaaaggctcaactataacactggactaagcattggctgatctcccctagcatacctagcaatattaatcactcagataattaggcactgtcctatatttttgtaagatttataactttaaatttttcattacatatttttttccagtgactttgagacttatcttactttttagtgtgttaggtttatcagtggtgattttattgttatacatgacctcataatagttgttttttctttcagtacatttgttttatgtttaaatttttatatttacatgattaacttatgcaaattatatgtttaaaaatctgttttattgccaaagttgtaaggagggagtcaaagttcctagtcatttatttattagaattattcacaggagtgacaacgtgcgtaagtttatgttgaccagtcaaattttctcttcacaaaggacagaatgtgaaaagcacagattcttttttggtcatggggcagggaaagataatataactctgactgtgagagaatgagggaggagtagagaagggatcacatgttagtgtttattcttgtttcgtagaatgtactcatattggcctggacagttgccctttgattttaggagattaaaatatactaagcatgtaggcacccacccatacacacatacacaacacaacacacacacacacacacacacggacacgcaaacacagttgctaatcagtctgacttttatctgtaattctggttctgctacttactaaatgtgtgacttaaggtatattactgcacattgtgctcacttttgtctatttggatattttagttgacatttcaccttacataaaaaatgtgttgaaaattgttagcaagaaacaccatagggcatcatcatctgctttgtgatacataaaacatttgttaaaactgttcttttcttctgtaaggacactcaacagatttatcaaataaccattttaagtgtacaatacagtattattagagacaacgttgtgtagcagatctttagaatttattcatcttgcatgatgaaaattttatgcccattaattagcatttccccattttctcctcctttcagcctctaaaagccaccactctaatctctgattctctgagtttggcaattttagatacctggtgtgagtagaatcatgaagtatttgtatttctgtgtctagcttttttcatttacaatataccttcaaggttcatccaacttgtcacatattgcaagttttccttctttttaaagactgaataaaattccattgtatgtatttaccacatcttctttatccattcagctatcgggcatttacgttgttcccacatcgtgactatttttaatcgtgctataatgagcactggagtgctaatagctctttgagatcctgatattttgctctttttttgataaaatggcttcataatagttatttcctcatatcattattctaaaaattgagctgctaagtataaatctgatcacaaagtaaacatgtaaatattattttttaatcacacatgaaggatttttatagtaactttgtgtaaaggtgggtattttcttgtaagttattggaatctattaattttaagggagcattccaaattttaagaggtagaaagaaacaaaattccagtgcctatgtagtttatttcattttaatttaaattatgagatgattgaatagtgttcacattagaagtataggaagatagtttagaggtcaacttctttggtcttgtatttctttttgttaatgaaattaatgtgtgttcagtggaaatatgcacatgtgaatatactgttagtttctttaaataaattatatctccaaatgatataataccatgaagccactacaaagttaagatataaaagagtttaattgcatggcatatttttacaatacattaaataactgaaaatgtagctaagacaacattgtgactggttttgaaaaaataaattatttgtgtggttatacatctatatatgtacttagaacaaaggttatattcagaatattttacactagactcttttcaattaattttataggagtttcatttctctgaattttcatttgtcagtgaaattacatattttaaaacatgcaaaaataaataaaacatgtaatttaaaaatgtaaaactcttttacatatatttttaaatgtcaataaatgaaaaactcttacatatatttttcaatttcaataaatgaaaatcaggaaaatagtgacatggtcttcaaaaatcacaatttaatagagaaaactgaagataggaaataatattctaattacggacaatgattaacactggcagaactggtaaatagtacactataaaataaaatactacattaagatatataatcagaggacatcatacctcaatacatatgtgtttgttttgttttttaaagacacgggctaacattactaattactgaaggatggagaatgttaactgagcttgtaatgataagccggtgcagataaataaaatggtataacaatcatcacagtttataaaaccctaagagtttgttaaatgtgcataatagcgtccacaatcccgctaacacaatctccaaacatttttgtgtacacatagtgtaaaggatccagaatttcaatcatattctcaaaagaattcattgccccaaaatggcaatgaaattctgagaaaaatagggtatggtgagactctgaggacttggaaagccaggcaaaatactacttatttctatggtacagacagataagtcctttatgttatattatccatgttgaaaatctggtagattgggaagcaggaaagaggtttcatgtttcagctgcaaactttgtgttcgtggaaagacaagagcaagtgctacataagttgagccattcccagaacaggtagtgaaagggctctattgcttcaactgaagaatgtgttatgctcttatgtataagagggattcttcacaccttataaaatgttcatatcccttttacgtgctttgtattatttatgccccagtgagcttacttgtgagataaaagatgaaatttttaactctgtcaactaaaaacaaccttatatatcttgaatgagttgaccaaagtagtatggttagaaactgataggtatgtcactcaacccaagttttccaatttctgggctctgaatcattttattagcctaagctccttcctgagtgttgatcttagataatgaaccagttactcttagataatgtctgtgatgatgaataatgtcacaaaaattactaactgatattggacaatcattatataacaaacattgctgtaaacacttttcatacattaattcaatgtttataacaaccctattgagaagattctgttaatatatccattttacacttgagaaaattgataagctggttaagaaatctgtgcacagttatgcacatgaaaagcagctgtgccaggatttgaacacacacacaatctcattccagaattgattctattaacctgtatgctaaaatgacacaacatagagctttatgaagctatcattagaggaaaggttgggttttcataaacacacttatgcacacacttcatgatttactaaaagtggatgaatatataagcaatataatgacaaattataaatcaggcaaccagaaaataagaaggtaaaatacaggcaggtttaaaataaaggttactttataaaatgaaaggtgaagtttgggaactggtaatgaggaagaataattgctgtgaaatctatcaacagatgacttcattaatcttttttccttgaaagagattcagatgatattaccatctctttcaggagtggaagagagagaattggagagaaatgttttaaagattctgatttatagcaagcctgtgaaaaaatggtgcattaaattcccatttggcatcctagttgtagtaagataatacatcctttctaaaaattccatttgatgaataagcaaaccaattcaaaatgactccattttattgataatagcatcagtgtcattaatgagaatgctttttgactaacagcaattaactagatttggtgaactgagcaattgaacattgaatttgaaatcagaacattcggcactgaagatgatataagtacatattagaatgattgttgattatttaaggatttattaagttgatgaagaacattaaagtctattatatcctgtattatttaggatgcttggtttcaaatgtactcaagatacaaagagaatttgttggctaagtaaagagttcaaggtttgctcaagggtttaatacagagttttattatggatttaaggagaagtctttgcttctctgttaatctaagcctaccctccataacttttcgaactcatacagaccggcttccctcagcagatcttggaaactcttttcccttgtttacagctaaatgtaaagaatatatctttacccaaataggaaacaaaaggtctgagtttctctctgcttggaaactcttagatcatatgcctggcctgaacacctccctgaagcaaagtacatagcagtatcccacttggcttgcacaaaaaccgagcgcatatctagaactgagagtaataacaatgctttccaaatcaccaggctactgtgccatcagagagtagaagaaaggatattgactgtataattgcagtgcttactacagtcctcctctttgaatatccaacattgctatacacccttcatagcatatattcactttcaaagatgctcagactcctcaaaaagagcaagtataaaacattatccagtgattgcattcagctccaaggttgggatatctgggtgattagcagtccctttcaattagtctttatgatccatccagtggactatgactaagtgaaaaaatttgatgtccagtactgctaagtaaaaagttagaagggcacatcctgattaaaactaaactaaatttataaaagaaaccaaattgaaacagatattatatcctgcactttcagagccttcctggtgatttttccttctgttcattataaattttgctaaatacttgtcttcatcatgatatctgaagttgacatattttggggttttgtgttactttattattctacttattgtgttgtttaaaagtcctggtgcttgccctaggtttgagtgataacaaggtgtttttagttagacctggggtttctttggcaatcagatttgtttactatttataggctttcagtatttgttcttatcaattccatgacccagtaacccaaattctatgatttggttttaggcttcaaatgttaacctcttttgacatctttaagaggcctctgtgctttgcacaatcccctgactgagaaaatttgcagcacagggttggggtagagggcatagccaatctttgagtatatctttgaagtatagattacatagaagctgcttcttcatgataggagggatcgtctactttgtcacaaaagtgctttagggaagcactatagttgattttttttagtacttaagtcttacattctgcctctcctgtctctgttcatacaaacattcgatttggagtaaaaatacaaattggcttttccactcatatcaggctccaaattatcagcctctcaaggcgttcacgttataagccacaggcagagagggcttcttcagacaaagctatattttcttttttttctgtacttcaaaaacaagtaaccattagcatgaggttttttctttcttggtttaaagaggccagtaggtggcaacatttttgtttctatcaaatctcctaatagtgttggtactcgtaaggcacatgacttaggataaaatagaccattgtttaatcaactgttttttaatcatgtaccaagtatcattttgagttggggtgggggaggtttatcatccttgtcttctcataattcagcctgttccacattataggatctattaactttcaacaacccacttcctgataccaaagtccatataaactagaatgatgtttggtacaataatggaaaactcttctcaagaaaacttgaaatatgcagacacacacacgcacatgcacacacatacacatacacacacatacagaaaacatccacattggagcagtaacatgtgacatcttttcttccattaaagatttcttgtaattaaaccttgggaattattggcttatgtaacagaaaattccaaaggaatggcaggattctggtaagcctttaatccaaatattcacattgtcatcacactgcagctccgtatctcagtggctcttttggctcttcactcttccgttatctatgccaggtagttatttctttccctatacagttttgttatgatagatggctgccagaactgtaacatttttttctttgcttatgtcaaaggaaaaataagtactttttttctcagtcaagcagaactctggacaccttctggttggaacatgttaagtcatgtttccacagttaatatactgtgttaaagcataaaatgttgtagttggatttttgttctatgtccctggcaaaaaggatttatttaaagcaatcaggacttatgcatgggattggggaggtgattaattgctcccaagccacaagattccttcataaggatggaatatagtttggaaattattttatggtagtatttgaaagagttcagtgttttcccatgatttaataatataaatccttaatagaataaaatatatcatgaattgcaagtgtatttgaaagtgtgtgtgtgtctaattttattggatccagaaaatatgctctattttttcttggaaaatgctgtgttttatatccactgcattttttttatgttctgtacatttcagttggatttctttcaaagggactgccctctatcaatcaaagtcatctttagcataggttaggctattactgatgaatcaaatatttctagagcaatactttaggacctgtcccacaactaatatattcaaaatttagcaaaagtttattgagtacctgttagaagcaaaggactatgctaggtgttctcatatacatgaagataaatatatgtcataaaacaatgacaaattggctttcagaatgtgcttatttccaatatcatcatatttttcttttctgtcatttttcattttatcatataaagaccttgaggggtgttttttcagagaaacaataaaccaatgatggatgagcccacttgagttagttacatactatacagcttatataaagcataagcatataaaaagtatatgcatctactttcatagtttggattgttatttaaatttggtggtattacattttcttctcacagatgactggtcttaaatgtgtactatagaatttacagaaacaaaccatagggtttaataagctgaataaaatgaagctctttatctggttagattactttgtaaaggacaagaataggggagcctcccaggtcaacctgatgtatgattttccatttttctaaataagttttattgacttttacattttaatggaaaatgagtaattagcagaggtgcagattatatttggcagaaaatgattataatatttttatcagagagtaaaatatatgcagaaatagccaagtaatctgatttgttaataataatagtatcctgattatggttttatcttttgttttaaaataacatttatatagggtcaattttgaagataaatgggaacctggtgaactctgtctctttttctcagagtgtgtgtgtgtatgtacataaatttaaaaatcgaagttatagttaattggaataagaagtttgttgaaaacagtttgatgtctggtaattgagaaatgtttatgaatctgacataatttactaaataatggagagagatacattattcagaacattatataagtacctaggccaaatttctgaaagatccaaggtgagagatatatgtataattatcttggtggtaatttactcatgagtagtattgacattgagatattaacaatttgtaccgacccacttgtagctgagtatatattcttaaattgtgttccaacataaactgtcatctatattggtggatctttgcgatgctttgggttaggtcatcaaaacctaagcaaaccctggggaatgtactttatatgtatattattctcccactcacacacacacacacatcctcactgtttagaagtacacatttgtcaacattacaatgcttttggcattcacagaatctgttcaaattagtacagtgttcactactgccatagcaggaaaaaaactgtacttttgaatcatttatttttaaatcatttgaagtagaaaattctgacaggttgcactgatgaatctttactaaaaataaaggtctttgtttacaaataattacatcttctcaaccagtggtttcatgttgcttactttcttaaaattccaaatagaacaaggtttgcaaaaatcgtcacatatacatgttatcactgttgactgttttatgataatttaggtagcattcattgtacacttacaatatggcaggagcatgtggcagttacttgaatggcaatatttatgaggtttaccaccaatcaagcttcccactatacagattaagattaagacttactgaagggtccttgtgctagtaagaggcagagtaaaatagacctaggcatcttgaattcctaaacctatgatttctaagttatgtcttctggcctttgtgttaaaatttatttctaatcaacagtgatacttttaaaatatacataatagtgtcatatgtgaaggtcaaacactagtaatttaatctgtcaagtacttactgatcatctaatttgtgttaattactgggtgttacttgacttgtcctcaggttctttatgcactagagaggagacagacactcttacagctgctttaagacacagtagagataggaagtataataacttttcatataaatcctctgggaccataaattatagcttcataaatcttggcttagcaggtagcagaaggtataactgaatgatgagccttgatagtcaagtatgatttttataaggagatcatcccatagaaatattacttcactttgtggagctaaatgagaaagaagcacgaatcgtcagttcattttgtgactgttcgtttcgtgtgtagggcatatggttaggggaggaggagtaggagaggcggctggaaaatgaggttgaaggacacattgtggaggattttgcatatcatgctcaaggagatacattttattcagtaggcaagagaagggcattggcaggttttgaataacaagtcatgtgtttcaaccctgggacttatgaagctgaatggagaggcactttgcctttaggaaggattgccaaaaaaaaccaaaaagggccatgctgagttgaaagtgtcaaggttgcctccagaataagctaactgtatttggaaatcagggtttattatcaacagatcagttaagaccagtgatagaatcgcattgcaggggctagggtggagagagataacagagtaatcccaaaaagtacatgaaatttcacagagaaaaaaagtacaatcaaatttgaagaggttcaaggacagaatatttgattgattgttttgttgatcgatctatctatctgtagggaactagaggtgggagacatagttaggtacgatttaagagtttccttaggaaagtaccatcacataacagatatttaaaaagactttaaagaaggtagttatgttaaacagtgctgcaaatgaattgaggaggatgcaggtaggggaagggcaactggatctactgttttagaagtatacttgtgtgctgtgagagggatttttaagtataagtgtggaaaacaagaaataatacatagaattacggctgattatgggaaactggaaggaggaaagtttaatcaattctgaggttcagtgatgaaagtaaggaggagatgggatagttcatagaagaatgatgttaatatttcagattgggagagaattaagagttctgataaactcctaattttgatgatacactctgtggtaggaatctacagtacaccgtaaattcctgtgtataacatacaatgtgctatataaaatatgtggtatcaacctataaatgttgatttttcaggacaaaaatgtccagaaaaatgtaatgaacattcagcatacagcttcgataagaagttttaatcccattagtatttaactaacatactcccatttttagtaagtgattattattagtattgattcctacttaattctcttcaatgccgtagtctctgtattttcctcccttcattaaaaaaaaaaaatctttcaagttcaagttttatcagagagcaagatggcatagggaagagagcagagaccatgacatcactggaacagtttaacatgatttgattttataaaacatgataaaataagtatcaggcggcattttgttttaaaacacttgctgctggaattccactattcatatgataacctgctgatcagtaggactctgtctcctgatgccaagtttttagcaccttctacagcaatgtgtgaataatgcagagatgcgaaggaaccttttaagccaacttgagaaacaagccctgtcaaaaacatgatttctcatgactgaataatgcaacagactattccatttagaaaaacatcagtaaatagtctgagttttgatagtgattacattcttacacttgaggtaaaaaaaatattcttgtctcagtccacaaagttgataggcatagggacatatgagtgtatacactgagggtgtttaacaatgaaatgtgattcaaaaatataacaagatttgataagcaaatgggccagcaatttgaaatgcttcaaattatacttaggctctgagatgaaatgtatgtcatttaagtgtacttttttttttttcccgagatggagtctccctctgtcgccaggctggcatgcagtggcacaatctcggctcactgcaacctccgcctcctgggctcaagcgattcttctgccttagcctcactagtagctgggattacaggcacctgccaccatgcccgactaatttttgtatttttttttttttaaatagtgacaaggttttgctatgttggccaggctggtcttgaactcctgaccttaggtgatccgcccgcctcggcctcccaaagtgctgggattacaggcatgagccacagtgcccagccttaagggtatttttaagtagctcatcaagatgcaattagatttaccattatctgacttgagtagaaaactggaaaaaaaaaaaaaaaaaacacaaaagcagagaatggtgagaacttttaagcgaaggtgtagccgacccagtgtcaaatagacaaaatgtagaaaagacaaatattatacatgtgatcttttctgtcacataatgttgacccctaggatttccatcttatgctttcagtaacagtaaactacaatatttagtgcagtattagatgattatcatgtcctaatacatttcctccataaaactagaagaatggcacttaaggtccaatgaaatatgatggttaaatataatatttgtactcccttgttggtgttgcttaatgcatttcttaatcctccaatttatcgtgtcacacagcactaagctcaacaatttattcataaagtggctgcaaatataatttggaacaaacttttttttgttcaatataatttatttatttattgcttgtataatcacacaaaagtgtgagttccatgaggacagagacagttgtctcttctgtttactacaaacgtcttccgggccagtaataaccagaagttgttacctgttaaataaactgaaagtcaaatgtagggtgatttctacgcatgaggagttctagagctcattgatgtcatccaaggtttaaattcttagtgtaatgtattctaggctcatccatgttgtagcaaatggcaagatttcattctttttttaaggactgaataatattcaattgcatatatgccataatgtctttaatcatttatccatggatacttaaacgttgtttccatatcttggctactgtgaacaatgcttcaatgagcatagaagcccggatatctttacaaggttgtgttattttttcctttgtgtatatgcccagaaggagggattcttgggtcatatggtggttttgaattccttgcctcacaaaaccttgctttgtctttgcttgctgtttttttttttttggagacagattattgctctgttgcccaggttagagttcattgacccaatttcagctcactgcacccctgcctcccaggttcaacgattctacttcctcagcctcccaagtagatgggactacaggcacccaccaccacgcctggctaatttttgttattttagtagagacagggtttcaccatgttggccatgctggtctcgaactcctgaccattcccatcaatgatagactggataaagaaaatgtggcacatatacatggaatactatgcgaccataaaatagaatgagttcttgtcctttgcagggacatggatggagctggaaaccatcattctaagcaaactaacccaggaacagaaaaccaaataccgcatgttctcactcataagtgggagttgaacaatgagaacacatggacacagggaggggaacatcacacaccatcgcctgtctgggagtggagggcaagggtagggagagcattaggataaatacctaatgcatgcagggcttaaaacctggatgacgggttgatgggtgcagcaaaccactatagcacatgtatatttatgtaacaaacctgcacgttctgcacatgtatcccagaacttgaagtataataataaaaaaagacacctaggaatcattctcaacaactgtactgtccttgtcatatttatagtgcccacgtccaatacactctaagatcatatatgtcagaagtctgtcatctccccctctttccctacttctgttttgttgaagtcctcagtatatatctcatcaattcattttttcaacagttcttgagttcttatggcagcagtcaggttctgactattacatactgtcattcactggatatctaactggtcttgctgccctcatcttccatagatcattctccacactgcatccagaatgatctttcataaatataaatgtagtaccaatgttcatggtttgactgtcaattcccccaaaagattaccgggaaaacacgttgatgaaacaacgctgagtgtattagacatggcgccataagggaagacactaacttgacaaggtcttagtagtgtgtaaaaattcctacttctcagttcatatttcgcttcccttttcaatgcttccatttcttcttggacgtgttcttatgagagcacatatattttttgcttacttgtaggtttcctccactggactatgatttccttgagggcagctcttttattctttatatccattgtgatctaagtgagtgattaatacatagttgatacatgaatccacaatatgtgctcattttagtattaattgaatacataagacattgcttcttaagtgtgccttaattggcacaataacaaaatttgttgaggatttactgaagaccaggttcttccatgctgtatgtatattattaacatgtttaacttagcttaccaacattaggagtttatattcttgttattcccattttcagacgagaacactaaggttcagtggtacagaaaagaatttgagtctagatattttgattccacagcccatattcttaattctcggtacactacacttctctagcatgtttgataatatattggtaacactcaattgccaaatgtattctgcatatatcacaaccagtatcctgatatatgttggttgggttatgaaatgacacataatttgttcaacaaacatttattaagtttttacagtatgctagccacaatgtgagattccttatatgtactacctaaattaagtaacttaagtaaatgtaggaggatttgagacatgcatttactttcccctctttgatttctaaggcaccacacattccaggttttcttcctgtttttctagcatctgctttgattttaatttgctggttcttccccatcaacacaaattcctgatatgacagtaaccaggggttggttcttagaccacattcattttctcgatgatcttatctagcctcctggcatcaaatactgtctgtaagttgatgcctcccaatgtttacccccagctcagagctttctgccaaactccaaacttagatacacaactttttatacattcctagtcaattcaaatttaccctatgtaaaactaaatttactaacacccacatctgcttcgtcaatagtttttcctgtgtcagtaaggtttcactatagccttccagttgccccaaatgaacatctttgagtcaaacttagtcttgttctttctcacacctgatgttgttgattagaaaactatgccaggtttggccggatgcggtggctcacgcctgtaatcccagcactttgagaggccgaggcgggcggatcacgaggtcaggagatcgagaccatcctggctaacacggtgaaaccccgtctctactaaaaatacaaaaaatttgccggccgtggtggcaggtgcctgtagtcccagctactcgggaggctgaggcaggagaatggcgtgaacccgggaggcggagcttgtagtgagcggatatcgcgctactgcactccagcctgggtgacagagcgagactccatctcaaaaaaaaaaaaaaaaaaaaacctatgccaggtccaccttaaccaggtatatatccagaatctgatcacttctgactacttacatggccaccaccatcacctctggtctaaattagtgaaatagccttttaaacaagcctgcctgctttggccttgccttacctgtaatccattttgtctgccagatggtcttgttaaaacgtaaggcaaatcacatcactcttctgctgaaaaccttcccatgccttgccagacattcagtaaaatgcagtcctgctgttttataagcccatgcacaatcacctcctcctttctctatgtttcttctctggcttccttttccaccgttgttaccgtctctcattccaccgcagtcatagatgcctctacctggaacacatttcctccacatactcacatgacttactctctcatatctttaaatctttttctcaatgatattttccctagtactttcaattccccttccttgcttccttttctccataacacttacatccttctattttacttatttctcttgattagcatgccttcagtgacatgattcactgaatgagaacttagatttctgtctgttttgtatatggctatatcatcattgcctaaaatagtgcctggtcctttgtagttgcttaataaatatttgttaaagcaacactatttgtactaagtgacagagccagaattccatatgattttcaagctcttctctataaaataaatgaagttatgatgtattgaatgtataaaggctcttttgttagttgctcttctacctggcaagtctgtaattaaaataattttgtaaaaaattatctatttgaagtttttttattatttgttcaattgccagtagataggctagacaaagataagtttaccaattgattatggatatcttacattcttattaaaaagcaaaataataatggatataacacattattattttcatgattaaggatatatcacctctaatgagtagatactaaaagagccttaattttctgattcccttatttctcctcaaggcaaggatagatatccctgtgctgatggcatcgaatgcattggcaagcctaaaatcaaacaagctttctagtagactccactcaagattatcatcaatcttcctttgcaaatttggttttcagtttttgtcttcacattgaaaaatagtcaatatattggcaacaaatgtaatgcattactcaatggcaggtgatatcgctaaagatggtcaattacatgctaaaaacaaaggactttgaggtctgttggatgccaaaacctacagtcaattcagtcaatatttttgacagtacagagggaaaaatcactcaaggaaaattgccacagtatacattaaatatctttgtttatcccattttagttattttgtgtgatatctctaaatgctgttctgtatatgctgctgacaaggagcaaatttatttgtttagaaattctgcagcctttccatcctttgccttaactttcttgttgaggtactaatgagctgtgaaaggccaaatgaaagagaaataacacctccagataatctgtactctgataaactactcccagaataattgggagtttatggttgttgtagggcagtggaagaaataagcaatgttggccaactatacggaacaacccgtgttaataaatttgtaaaagaagtttacaaggcaatcacaatcctttcaaacaaatgtcatgcatgtactttcaggcctaggcacaatgttattatctgaaaagcttgataggtaggattgtattttgtcccactatttctaaatcaggaaattctaagcatacttgtgacgatttctcttttaccttaaatggcttccctattccagatttacagtttctgcatgagttttctactcaatttgcataattttaatttacctttatgttaaggtttttgaagagctgccgtactttcatatttggagtttaacatattttaatttatggacgtggcaataatttgatgacctttttagtgtaatataaagcctatatataaaaacttccaaatagaatatgtactgagtttgtaggaaatttataagtattatgcaaatcaagaatatggtagctgattccactagaggctattttgaaaatataaagaaactttgtttttaaacatagtattgattatctcactatgtgacaaaaaggtatttctgtttattctgtttctttccatttctgctttccaaagtagaacaaataagttgaaatgtaccaatgggtgtgttttaagttttgacaggtttcgggtatgattatataccaacaaaatcccagtaatatttgctgcatatttcattgtatctatattttatgtactgatttaaaatttaaaatgtgagtaaattttaaggcattgtgctaatgaaacttatggtagttcattttttatttttatatagacaagctatctgtttagaatgcaaaaattatatgccatatacaatcatattataaacatataaaattggtcacagaaatttctaagggtgaaaaagactggatgaatcaaagaaatctatccacaattctgtgagtgtatgagagacttagaatgatcacattcacataaaatataacacattattatattttgatttttaaattaaattttataaatctagctatctctgggaaatgtttcttccccttgagttattacaaaaaagtctggcaacaagttaatattcaggatttcgtgagacagatactgaattcagttcccatctctgctttttattagctcttcgaccttgggcaagtttctaacctttatgaatcaggtctcctcatagtaaaatgtagacaataatcatcccttatgttgtgaggttaaattagatgatttagtggagtgcttacaccatccctcacaaatggtaaacacttaattcactatacttcagttctggtggtaaattctaaaagaatttagatgatgaagacagcattataatttaaagcacagtctacacagtggatagcacccacttaggagatacacacgatgaactggggttctagaaggacatattataatgtctcttcacaggcttatttaagaattaagaaagaaataaactttaccaatttttaatatacaggttttcagataatttgatgtaatatatggtacttgatatcttctgtggaaaatcagagatccttaataggatgcataatgtcaggcctctctcttatttattagcgtttttggtgctcttgatgtgctgctatgtctatgaacactaaagtgtgtttatagattatgttatcttaagtagtagaatacttaaaatctttgtcagcaaaatcagagtaacctaggaaatctattttactacacagaaatgttctggacatctcatggcaaagtagttgaaaagattgagttatgtactttatttttgaaaaggtcaagtgttacataaatgctgaacattttcaggttggcaagtggctgtgagtactatgttatttctcaaattatttccaaaagcagaaaaaaaccttcaatctttgaaggagaagcttctgtattaacaatattaagaaagagactagattttataagacattcatgctatggagagagcattttaaaaatggatatttggtggtagtcccattataaataggtcagttataaaatattctatacctacagaaaataaatggaaagaaatgtcaaatctgtttaaaaatattataagtgaaaactttcagtgaggttttgtctctgtttatgactttaggacgtttactttctatgttcacctcacttagggttctgtttcgcttttctgctcatgcttccatttcctcagttggtaatatacacatatctgtacatatcctttaatcctcttctagtatcttcaccaaatcagaagtgattgctcttatcacttagcccaccctgattttgagttttttttttacttgaaaatatgagaagtaatgttagtataacaagagatggaaacttatcaaaaggtttcatacttttatttttctgaaatgcaaaagacttactgcgttcttctcagttctatgaaccctaagatcaaaagctttagttgtctatgggacacagagatacagaccctgaagcatgattactcctattaggagccaatgataaaattgaagaactttccactgctttcagccaacaggatagaggacttttattactttccttgaggcagagggtggaatttgcaggtgttaatgaaatctaccagagtcttcccaagaattaataccattctttgaaatggcaggctctgaagacctttccttgaataggaaaggaataggaagagattccaagaatctctttccttgaatagggaagccaacactgcattgaagaaggcagtaagtgaaataaacaagtggagtttgtgtcatttcttgtccctgctctgtcatggaaagatgccttggtctaattctcttaggaaaaaaaatgtcctcatatcagtataaggtaaaatggaatattgttacatgtcatatgctaagagacacattattgtattcaacaaacatatagtatgttatactgtatgtcaggtgctgaacaaaataaactgtctactgtcgtgaggcttccgagatgctacatcacctctcataaaagaacttccccatttccacaatcacacccttataattgtcttcctaattagctcactagttatttatattatttccctaattttaataatgaaactatcccacagaagcactatagatgcccaagaagtagagacaggaagctacccattagttcccccatagggatttctctcccttatgaaggatataccacatctttgtttaaggaataaggaaaagagacaaaggtatgtaacataaataaagagaaagcacacagaatttagtgatatatgtgaaaggtaacgggataaaccaagcaactggtgtatgttaaggaggtgaatatagctaatgtccttggagaaaatttacctagttagaaaagatgtgtcaatttagtagaatatttttacaacctaaaatctaattgaaccaaactcctctttattgttgttagttctctattctgggttgcactaaataaaaacaatgaggcagtgaaagtgattttataaaagttgaatggcaaagggtgatgctgaatgtcaatacaatcgctgtatgttgtctgtgagccttacaattaccctctaaattagtatcatatctattttcaggtgtgtaccaagagtgtgaaattaaaaaactttgccaagttcaagtacacactacctataaattccagaacctgaatttgacctcatgtttattttactccaaagtgaggccgacttaaagtttcccgaatgcggccactggttttatgcagcatgatttctttgagacattgttatatacagcaatggaggtagggcagggggagggcagtgagatttcagagatggctagcttggacatgcaatagagtgggaaagtgacccaatgagaatcaattggagggggagagattggagagaggaaagataatcaacagtgagaagttcagagaaattagtttaaatgtgggaagcaatttcatcatcaggagatagcaatctatggcctgagggtgaaaatagacttgctacctgatttttgtaaataaagttttattggaacacatccatgtttattcacttaatgtattgtctccagatgctttggggctacaatttgcagtgacagagctgagttgggggcatctggtctttagtggtctgcaaaattgaagatacctattatctagccctttacagaaaaaagcttaaggttaaggagtcttggatcaaataacaggaagaataagattttcactgaaattagtgtaagtgtagataagtttctatattttggggacatctcttgtgctaacttctaatttctttacatatagacttgtggaataaatgagtacatagctaagaatattataaatgatgagaaaaaaagcaaaattccaaaacgggctacatgggaatatttatgtttaggttctcctcatagctcacaattaatttgtatatgcaattacaaactctatggactacggtcattctagaggaatattatttaagtgcagtatatgtcaatttgaaataataagttttcacgagatatgtgtattttgttttgatttttttggtatgtaaaaaccacttgtctaaagcagtttacttctgaattattttgcattttaaaagtatccagtgaatcatttttttcctatttataaatgactgattaaaataaataagacttggtgtttttccatgagacgtatttgaaaattaataaaattgttaaacttaggattaaggaaaataacattaagaatttatttggtcttctgagacattttgtaactatcctattttaaattaaatttagtacttttacaaaatctcgtttcaattaccaactcatatgaattccaaccaaatactgacttttaaaattattgaaacatccaccaaacagtacagagttattatgttcatccttcttctctggacttcatgaatctctgtcagccaaggaatgtcggtttgtttactgggtatcccatttttcctcccacacctcataggtgtgacttggatttcctcatcctcatcttggaaataggtccccccttttagggtgtttgtaagaattatatgaaacagtaagaacaaagaaatcactaggctagacgtctttcatgtgccatctaataaatttctgagaaagtttttttattgatgcttatgaaaattttattataaacttgcttttaaaaagaaatcttttatattgggttattaaattgttctaggtacatttctctaaatcttctattattttctctctgaccttccattgatttaggagaatttgccataacagtgcttatttctttttcttccttcttgattttatgagaaaggttctattgtgtggattataatagccaagacagaaagtctcaggtgaagtacaggaaaaaataaaggaataaaatataaaataagttagaaagtaaatgtatacccaaagatataaatggtagaattagagaaattagaggaagaaaacacacacacacacacacacacacacacatataagttggtatactatatatgtatgtgaatatgtatatatgtataaacacatatgaaatatgaataggaatattgggaagacatatatttgaaactatgaatattttatgccatattactccattttcaaggtattgattggttaaaacatattttatataaaacctgaaattggaagcacaaatgaccttaaataagaaattaaaattaccccaaacaatttagtaaatatttattatctgtgtactgtgctgttaggcacggggtcagtgtccccgccttcctacaatgcaagggttagtgtaatatctaaaggtatgtgacttgaaaaacgatgaagcaaaatgactggaaccttcattgagagtatgttttagagagacagagtagagttttagagagacatctgattttatagtagaaagtttattttaaactcacatataagcttttacagatacatttttatagtaaaatctcagctgctagaaaattagagtatatcagtatatgagattgctgtaggtttcgtggcactaacaaaaacacaaggatggatgaactaaaaaatgagtttgtttctctttcagacttacttctcttaaatgttgtgtagatgggagtgatggaggccttgtaggaagtctctgctcattcagggatccatagtcctgttgcccagtttttcgatcatcccctgggacgctgtcttcgtagtcacggttgaggatagctcaccagcttcatgtgtgtatcacgaccttcaggagggaggacgaagaagagagcatatctatgcccatttacgtcttaatgacgaagttggatgcgttatatccaactggccaatacttggttacatgccacatctaactgcaagggaaagtgggaactgtagtgacatttctagatagccaaattgtcccctaaactttctaatactacataaagggtgaagaaagatacatattggaggatgagcaatctttgccagagccatttttttaatgtaggaattaagattaatgtttttcaaaaaaaggcaggggttgcaatcctagtgtctgataaaacagactttagaccaacaaagatcaaaagagacaaagaaggccattacataatggtaaagggatcaattcaacaagaagagctaactatcctaaatatatatgcacccaattcaggagcacccagattcataaagcaagtccttatagacctacaaagagacttagactcccacacgttaataatgggagactttaacaccccactgacaacattagacagatcagtgagacagaatgtcaacaaggatatccaagaattgaactcagctctgcaacaagcggacctcatagacatctacagaactctccacccctaatcaacagattatacattcttctcagcaccacatcacacttattccaaaattgaccacatagttggaagttaaagcacccctcagcaaatgtaaaagaacagaaattataacaaagtgtctctcagaccacagttcaatcaaactagaactctggattaagaaactcactcaaaaccactcaactacatggaaactgaacaacctgctgctgaatgactactgggtacataacgaaatgaaggcagaaataaagatgttctttgaaaccaatgagaacaaagacacaacataccagaatctgtgggacacatttaaagcagtgtgtagagggaaatttatagcactgaatgcccacaagagaaagcaggaaagatctaaaattgacaccctaacataacaattaaaagaactagagaagcaagagcaaacacattcaaaagctagcagaaggcaagaaataactaagatcagagcccaactgaaggaaatagagacacaaaaagccctttaaaaaatcaatgaatctaggagctggttatgatcaacaaaattgatagatcgctagcaagactaataagaaaagagagaagaatcaaatagatgcaataaaaaataataaaggggatatcaccaccgatcccacagaaattcaaactaccatcagagaaaactgtaaacacctctacgcaaataaactagaaaatctagaaggaatggataaattcgtggacacatacaccctcccaagactaaaccaggaagttgaatccctgaatagaccaataacaggctctgaaattgaggcaataattaatagcctaccaaccaaaaaaagtccaggaccagatggattcacagccgaattctaccagaggtacaaggaagagctggtaccattccttctgaaactattccaatgaatagaaaaagagggaatcctccctaactcattttatgaggcaagcatcatcctgataccaaagcctggcagagacaaaacaaaaaaaagagaattttagaccaatatccttgatgaacattgatgcaaaaatcctcaataaaatactggcaatccgaatccagcagcacatcaaaaagcttatccaccattatcaagtgggcttcatccctgggatgcagggctggttcaacacacacaaatcaataaatataatgcagcatataaacagaaccaaagatagaaaccacatgattatctccatagatgcagaaaaggcctttgacaaaattcaacaaccttcatgctaaaaactctcaataaattaggtattgatgggacgtatcttaaaataataagagctatgtatgacaaacccacagccactatcatattgaatgggcaaaaactggaagcattccctttgaaaactggcacaagacagggatgccctctctcaccactcctattcaacatagtgttggaagttccggccagggcaatcaggcagaagaaggaaataaagggtattcaattaggaaaagaggaagtcaaattgtccctgtttgcagatgacatgattgtatatctagaaaaccccattgtctcagcccaaaatctacttaagctgataagcaacttcagcaaagtctcaggatacaaatcaatgtgcaaaaatcacaagcattcttatacaccaataacagacagaggcaaatcatgagtgaactccattcacaattgcttcaaagagaataaaatacctaggaatccaacttgcaagggatgtgaaggacctcttcaaggagaactacaaaccactgctcaccaaaatacaagaggacacaaacaaatggaagaacattctatgctcatggataggaagaatcaatattgtgaaaatggccatactgcccaaggtaatttatagattcaatgccatccccatcaagctaccaatgactttctacacggaattggaaaaaactactttaaagttcatatggaaccaaaaaagagcccacattgccaggtcaatcctaagccaaaagaacaaagctggaggtatcacactacctgattttaaactatactacaaggctacagtaaccaaaacagcatggtactggtatcagaatagagatatagaccaatggaacagaacaaagccctcagaaataatgccacatatctactactatctgatctttgacaaacctgagaaaaacaagcaatggggaaaggattccctatttaataaatggtgctgggaaaactggctagccatatgtagaaagctgaaactggatcccttccttacacattatacaaaaatgaattcaagatggatcaaagacttaaatgttagacctaaaaccataaaaacctagaagaaaacctaggcaatacctttcaggacataggcatgggtaaggacttcatgtccaaaacaccaaaagcaatggcaacaagagtcaaaattgacaaatgggatctaattaaaccaaggagcttctgcaaagcaaaagaaactaccatcatagtgaacaggcaacctacagaatgggagaaaatttttacaatctaatcatctggcaaagggctaatatccagaatctacaaagaagtcaaacaaatttacaagaaaaaaacaaccctatcaaaaagtgggcaaaggatatgaacagacacttctcaaaaaaggcattgatgcagccaacagacacatgaaaaaaatgctcatcatcactggccatcagagaaatgcaaatcaaaaccacaatgagataccattgcacatagttagaatggtgaacaataaaaagtcaggaaacaacaggtgctggagaggatgtggagaaataagagcacttttacactgttgatgggattgtaaactagttcaaccattgtggaagagagtgtgcaattcctcaaggatctagaactagaaataccatttgacccagccatcccattttatcccattacagtaatatacccattactgggtatattcccaaaggattaaaaatcatgctgctataaagacagatgcacacgtatgtttattgcggcactattcacaatagcaaagacttggaaccaacccaaatgtccatcgatgatagactggattaagaaaatgtggcacatatacaccatgaaatactatgcagccataaaacaggatgagttcatgtcctttgtagggacatggatgaagctggagaccatcattctcagcaagctaacgcaaggacaaaaaaccaaataccacatgttctcactcatgggtgggaattgaacaatgagaacccttggacacaggaaggggaacatcacacactgggtcccgtagtggggtggggggaggggggagggatagtattaggagatatacctgatgttaaatgacgagttaatgggtgtagcacaccatcatggcacatgtatacatatgtaacaaacctgaacgttgtgcacatgtaccctagtatttaaagtataaaaaaaaagattaatgtttttggctctagaaccttttgtttaataggctatagaatgagatttttaaaaactaaaataccccatatgtgtacgtatgatacccatttttgtcttcttaactggagcatcggaggcacaatgtagcatttctgtgagtggttctgcaatagtgaagaatgttaaatttgctgacatttaacatcaaaggcaaatcatagggattaacagaaggcgcagagttcgaatggtggacttgacacatgccttcttttagaaagaatttgttagctttattttttgctcagcttcttctgacttctttttctgtttatgtttttaaaaaactgttaaaattatgttttaaatttttgtggctacgtagtaggtgtatgtatttatggggtacatgagatgttttgatacagacatgcagtgtgaaataaggacatcatggataatggaggatttaccgggtctgtactaccatctgggctgtgtcccattgctgtctttctggtattctggtatcttcctcagtgtgatatcagtgtctgtgacttgcgtgcattatttagacttgacatttgatttcctactcagcaacgtaatgaagacgaggtattttcctagtagcttccaaaccattgattgaatttgtggaaattaagaaaaaatacactttgacttatttttaagaagttacgtgagggccggacaccgtggctcacacctgtaatcccagcactttgggaggctgaggtgggcggatgacctgaggtcaggagtttgagaccagcctggccaacgtgttgaaaccctgtctctattaaaaatataaaaattagcccggtgtggtggcttgtgcctgtaatcccagctactcgggaggctgaggcaggagaatggcttgaacccagaagggagaggctgcagtgagccgagatcccaccattgcactccagcctgggcaggaagagcaatactcaatctcaaaaaaacagaaaaaaaaaaagttatattatatttttttaaaagtgctgttgcttagactcttaattcattttcttcatttaaagagattgatcatattgggataaagacgtgttttggaatccaaacaacctggttttaagtcccagaaccaccagttacctttgtgacctttggcaagtcatctaatttttctatttccatttcctcatcctactaatttctatcaccctgatctgttgtagtgaaaaatgatataatgcgtgttaagtgattagcaaattgactgacactaagtactcaataaataatggcagctgttgttattgctgttgtatatgcggtagtagttgtatttgttgttgattgttgccctaacagcaggccatgatttttcctaaatcctcattagggcttaactttgaactcaatttcaggccctatctatattaaaaattacctatttaatagtgtcattaggttgaatgtcatgtacagtgttgcatgatggattaatttctcataaatcacttcagtaatcatttttatgctttgaatagtaccttggtttacgtgttatatctgtgagaaaacacagcggaaatgtgtcaagaatatttccaggtactaatcctggttgttcagaaatgctcttctgttatttagtgaaagaaccgcttggttatccctctgtaatcctttatcttggaaataatcttttactgaggggtaaaaagattatagaatacaccaaaaaattcaccatccatgcattgacttagactccatgaaaaagaagtatgatacatttaaatgaactgagaatgataaaatttgcaaatgttcttgaagcatttatgcattcaagaccaataaaactgtttttgatccaggttaacagtcgtatcatactttaaggctgaatttagataaattgccaaaatccattttatcagtgatataaaactgctcagtgatagactgtgccctctcatagtgtcccagctattttttctaagagctttgtggtttgctgggctgctggtttcactacctacatgtagccacttgattacttatctcagtttgaattgcccaaatcatgcttccagaaacacacagagctcattcacctgtttccccataaaaatcatttatcatttcaatgaactttggcccccaaacacaggcattgcagagcatttcttgggatctagaatgtgcttagcattttatatgcactatctcatctaatctttccagcagccttacgtacgtatatttttatttttcttgttttatagatggggtaactgagatgcagagaggttaaatacccaagatcagacagatagtaaactggattttaaaatatatttatatattcagaagtatcaaggctattgctgtatacttcattagaaccatttctagtcagagaaattctacgagtagaaattatgactagaaattgtctccagaaatgagtgtctagagatttttctagacattgctggactaaaacagtcatttatcatccctgatttttttacctttctcctttctgctctttcaccttttttttttttttttttttttttaaaagagacggagtcttgctgttttgcccaggccggagtgcagtggcgctttctcggctcactgcaagctccgcctcccgggttcacgcctttctcctcctacctcagcctcccgagtaactgggactacaggcgccgccaccgcgcccggctaattttttgtatttttagtagagacggggtttaaccatgttagcgaagatggtctcgatctcctgacctcgtgatccgcctgcctcagcctcccaaagtgctgggattacaggtctgagccaccgcacccggcctcttccaccttttttaatgagcgatgtcttcaaggaacataggtgacaatatctaatacttcctaaatctaacaggcagtaattaagcctctgaagtctgtggataacgttgaataaatttgagtgtactcaattttgggggaaaaaaaaaaaacaaaaacagaatcgtttcatccattcactgtcatgcctctcatcgtaatcattatttgcccaatgtactgaagagaaacataaactactgtgataaagacaaaataggattgaagcataggaaaaataattagttccagttgatgatactggcatcttcattcatgaaacgattggggtctatctttcttataaatagatctataaagaacaaaaaccaactttcctagaaaatctcttcatttgatgccatgacatgtatgaagtgatctccaatcttaggtacaatgtaaaattctgtgatgataaaaacatattttggggtgctgaaacaaagcataagccactttttatatctttatttccaaattctcagattaaacatcgttttattttaaaatgtcttttattccaaggtctctatggaaaatatacaaatgtagaattcaggcaaatttcttttttcgtcggtttgcttagtctgaaattctagagccatttccaattttgttttacaaactgcagaaaaaagtttaatctcaccttagaacatatatacatatacatatcaaaataaacccatatgcacatctgaaacaaaaattgagacaataattgttagtattatataagtgacacagactactatttttctgtttaattttaaaatattcctagtcataacctactaacatgattttatgaaccatgaatggattctgacttacaatttgaaaaacaatagtctatctagacaaataattactcagatcttaaattcaaattttgattataattctgtatatatatagttgaattgatggatataaatataaaattttgcatagcttattcagatttgaatttatctttaagaaggctgtctttgaaatgtttttgttttatgcacatcctcagacaaaatatttaggttcagaatttgagtactagatgtcatgtccttgagtataagtatacaccttttaatattttcttccaaaattcaatcctgtgtaaatatcaataaatcataaagtgtttaatattttgattcaaattgcacagtgtaaagtattgtgttacttgagtattagtgctgtttacaatgcttcgtttggagaagattatttgaactcaagatagttaatgatttttaagaactcttaaatacgagctaggttaaggttcagatttcaaaaagagttaaataatgtttgctcttacacatttttgggggcgtattttcgacaataattttccatctcctgaaacctgaacagtgacttaagaaggtaatcttggggcaatttatgcttcaaaacacttcttatatatgcagaggaatttgataataattacagccgtaacatactttatttagttgttatacaaggtcactctgtgaagtgcattatgcactctttaattcttaccacaatcttattatggaagtattattgttcccattttacagaagcagaaactaaggcttatgcagggctaggtaactcccaaagtcacaagattccctttctttctatatcatcaatttcagcataagtggttggttcatataggaacataacaggagtaggaaaggatatgatagggtttcttggtcgtttgtattttcttgaaaaaattgccttcttgctgcatttgaagcagggtctggttcagataggaagcattatctcccagggctgccagcaaccttgtttactcagttatagacataacacacttacgccatattctttgaatcttactaaacttactgtgagctcaccagacttctgtgcttctagggcattgaaaatgctatatgcaaataggacagatacacatattataccacctgtctcctctgcgcatgtgcatccttcattgcacataggacttcacttctaaaacacaaattcaaaaataaaattatttacaatttcaggatagtatcagcagataatagaggcatgtgtttcttctgcgctcagggccctgtgcaactgctcaggttgcacaaacgtgaagctggttccacctgcgcacatctctcaggctgcctttatatcattttcccccttaatgctgactttgatagttattattaatagtatttagagacggaagagatacaccatggaagttgttctaacccctaagaccttcagaaattgccttactgttagacaagggttccatgcaaatagccctttcagtgcacttaccctctttgatatgatgaagttcggtgattttgacttaccaggatgacctttctctgccacttttatagaaactggaaaaagagtgcatcatttgatgaaaatgtcattgcaataactgccactatgccttgtcatctcgaaggacttaacagttggggaaatttaaaatattgaattttcaaaatttgagcatttatcagaagagcacaagtaagttggtgctggcagcttagtgggttaattcccagaactgagaaggacaggaaatgtagcacatacacaccaggggaaagccaccaaaggttgaattttctctgggtgagattatgaaatcccccaaacagcttctgttgttctacactgctttttgattcctttacaaaaccctgtttgttagggggccccgtgcttgcttgcaatatttgtggaatgcagaagattcttctacaaatatttctccaatatttgtttgttctgctcacctccgtaaatagtatgcctatgtccttgacctcagcaaagtccctcttgagcatgttctcaggatttttgaagcccggcgacctgcaaggagtacactcctcccaaagcaaaacctcctgcaaacttagtagtttactcaaatttttgcccttgataaatgcctttaggttaaagcagcagacatgtagtttatcccaagaagcctctcctgtcacttgagtgtatggttcctatagcatgcaaatctctgcaaacatatggccaggtttacagctcatgtaaactaccccgtctctattacttggcttcagatggggagaagttagagccacgcagagcgctccagcctctccagaggaagcctttctcaccagatttttctaatcgacctccttgcttgctcttacacacctttaagctagatattggattaagggttgtgagaccaattttgtgatcacttcttagcaattttttaacaggtaccctggatcttctctttagaattatggatgcttcgtacactttgctcttggctttagggtccagacggaaattccaagacaaccatttgcattctcacttaatatcctgctaattaaattgggtaaagcatacttcatattttagttcttctaagataatgtcttactatttaaatcgtggccttctggaaataaaggctaaatcacagaagtcattatgctgttagaaattttagatgggtgggtgaggtattttttttctttctaaattttgccttcctttcccctacctccttgttttcttactgatgcctttactggtctgtaaatatttggaaatatttcattacctagggcctctcaggaagagatatttcctttaatgccattgcagaggtatgtaaatataattctgataatgtatatgtaagttattataaataagaaatgaggaaagttcctacagatcaatatttatagcatttaaaaagcaacatgaggtgatatactaatttactccttccagtaatctagaagagctttaatacaatattaatttggtgtggattttgaccgctatttgaaaattgatgtatgcatgaggaagttaaaatgaaaactccctattgtctgtatctgctgttcctgtgtttgataatgccagtggacagtcctagcattttaaatatttcattcgattcatcatttaatgtactggaacaatctgcaaagacattaattgtgtaacacccaatttattttattgtgcagcatttggaagctcctgaagacaagtcatttggcagttcattgatggagagtgaagtaaacctggaccgttatcaaacagctttagaagaagtattatcgtggcttctttctgctgaggacacattgcaagcacaaggagagatttctaatgatgtggaagtggtgaaagaccagtttcatactcatgaggtaaactaaaacgttaatttacaaaacaaaacatatgacttgttataatggcaagtcatcctttttcctcaattactctcttacatccttgtattttggaaatttagttactatgatgtgcttgggattccaacagtcagattttgaagttttcttttggagagcaaccattgaaggcatttctacctgatcggccaacaggaatacgaaagcccaacttctttctcttgtgtcaaggcagtgctgaggcattacttacattcctgagttgatgtatggtattgggcttaacttctctcagtgggagacttttcctgagatgatacactcgtttggcttctttcccttccctgtcctttttcctccatcttcaactcccttgcggaacttcctgggagctcttccttaataaatcacttgcactgaagtccttatctcggggcctgcttctgaagaacttgacttaagataattttccttaattcatattaaaagtggttttgggattctgcaaatacaaattaaattccttttactgggaatataaatctaaatgggccacaagtttaaaactgcaaacaaataaaactcaaaaccacaccgatttacctagagttctaattacaattgttaacttccttctttgtcaggggtacatgatggatttgacagcccatcagggccgggttggtaatattctacaattgggaagtaagctgattggaacaggaaaattatcagaagatgaagaaactgaagtacaagagcagatgaatctcctaaattcaagatgggaatgcctcagggtagctagcatggaaaaacaaagcaagtaagtccttatttgtttttaattaagaagactaacaagttttggaagcttgtgattattttgatgtggtttgatggttaagttacgattctcagtttgttcccaaggcacacagctttctttcaagggagactggttggattttcatagaaataacattttggttttcacttttgtaactaaaagagcagatgttagatagatgcactgttatctacagaactatgttttaagatttgccaaaattctgtcatagttattattttctaggttttcctccaaacattaaaatgtcactataaaaggcacagaagcatgcacaggagattgtgtacataaaatcacctattagctatagttgacacgaaacttctcttctgaagaaaaagcccttgaaaatattaaagagttactcatctatatatggaaatcctcttgaaaaacattattcaaacgttttgggaaattcttattaaaatacagtatggctatgaattatcttaagaatatatattgacttaataaaaaagaggatttgagacatttctgaaaaatgacatatttcttataaaggtaacaagcagatctcatcattctggatatgtgttttgatttatattgttaggtgtgtatattcatgtaaagcctatcaagacaagatagatttatttttaaatgaaaagaaatgaagtgccaactgtggatttgaatacattaagtgaaaaaaattgtccaaatgccttaagtttatttaactattatttatgaagttcaaaagcgttaaaaaaaaaaaaggaccaaggaaactcattagatatgctagaaggattggtattccagtactaaattatagtgtgaaattatggaggggaaaaacacatttttaagctcaggccttttgaaagaataaataaggtacatgtaagatagaggtttcataactatatatgtattccaagccaggagatactaatctatgcatattgatattattcgcctgctgtgatcgtggtgatgattgtcactacccctagatgtgagaggtacaataatcatattataactgttgagtctgcccactccccagtgtttaccaggtccactaatttactccatctattatcgatattaagatataagctgccttctgtggtcatatgccaacattcttcaggttagaacttctatttgcagtgatctgtggaacttaaagcaacctcaaacaaaattagaaagttttgaaaatccaaccacctctttactgtccttgccataatagccaccagtgtcttctcctttgtgcactctaggtttccatcctctcctggaggctaaatgctctcatttttcttacactccccattttcaataaaactaacaatatggcattaattattcatactaatcagttaattaattgctgtgtgaaattgagttgcaagaaaatatgaattcctcctggaattaaaattgcaactttttctttgcttatctgaaacataaaaaaagtcttttatctgtgattctaacatttaaaaagatgttcattcaaaaattccccccttcaagggatgtctgccattaagtgaaggatgacagacacctagacttctgtgcgtgtaatttcctcatccccatcccactagagaatggaaatgctaaaatggcagtattaccacctagctgagattgacataaaaaattagtttgtccttagggaagattcaagagcttttgtacgtgttacagcttttagaataattattaagaaggcaaggagagccttctagctggtatagcttttgctaaaacatctcacagagtttttaaaatgagacacgtacatgtaaccacttctatcacatagacttttctggaaaattccttaaaaatgaatatacaaagcattatttgagcaacacaaattcagaaataatatgagagtttataaataacagtcttccttgccactttgactatgtatgtgttcgtgcataaaacctattaaattctaatgtgataagccattatgtaagctttgctgaacctgatttttgaaagattttgtgagaggaaacaaaaaacgtgattatgaaaagagggtattgtcattatttttaaaaaactaatctaggttttacttaatgcttcaaataaattataacctgttcagtttccattatcatggtcatgagaatggattatctccaatgattagcttcaacttggagcattacctattttttttctaaatatatgattacttcagagtagaagattactagtaaacaaaaatggattcatcgatacttcttttctctctctacctaagacagggtttggatagatccagtcggaagccattatttcctgcctaagccttggtttagcgattagagaaatgataattaacatttgtctagtcatattaagtatatccaaagctatgctataatttctaagttgatataacaaaagttaaaaacttcttgtaaatacagataagcttatcactaaaatctatgaacatttacacttagcaattattaatcctatctaccaacatacttactattaggttgctgcaaaagtaatcatgtttttttccattgtaagtaatgggaaaaactgtaattacttttgtaccaacctaatagcaacatcaaattatatttgatatatagtcattgtgagatatatatatatatatatatatatatatacgtataaaatacacatatatctctctatatgaacaaatattaatggaatacattatcaaaaacaattaatggcactggagactcaataatgatcatacaaggtctggccccagatctcatgaaacatattctgtagaggctggcagccaagaaaaaaaagaacacaagaaaaataccggataggaatatagtttttgaagagattaaaatgtaatgtgatagagaatggttgaggggaggctactttagactttgtgatccaggtaagactttgaaggttggtaccatttagtttgagatttgaatgacaagaaggtaccactatttgcagatcacaaggaagtgtggttcacggattaggaacagctaatgcaaaggcccaaaaatagggacagtttggcttgctggaggaaccaaaaggccagggggactgtagagttgcagggtggtaagttagatggctgaggtctgagatggggttgaaatataggtaggagactgattacatattgtagtgtcagtcagggctttgaataagggctttgaattctagactaagtgcaagacaaagccatcagattttatgtaggtgagagataggtcaagaaaacctatcaggaaggccactggaggaagagaggacagttattaggccagtgaagttggccagttaagacacagtagtgtcttagaccagctggtagttgtgataaaagtatactttactatcttagccatttagttattttaaaaaccacttctctgtttagttttagttcctatttttttttccttttgacagtaaaagtgctttttcctttggaaatagactgcttcaatttgtgcccacagttactattattcaagttgcatctaggaaataatatttatcccataaaccatcaacaattatgcaaaacaagaaatattaaaaatacaaagataatagcgtgccctgatttctgccttacataaaatcctctccagtttgcctaaggaataagggcttgctttctcaaacacttatttatgtgaactggggcaatatacttttcttttctgttctctactttatagttttgtaaaacagcaatagtgtcatgaggctgacatacctctgaaagatactagatgagatagggtataaaaagttagtttgtgaatgcaaaattattataaaatgtgaagaaagataactgtgataaataagatgatgagctgtcagttaactattttaccataccatgtcactttttatatgtaatttgatattttctatatgaagtattatataattttatatataattatatttcatatattttgtataataacttatatataattttttaacttttaaaaaaattttgcagggaatgaggtcttgttatgtttcccaggctagtctcaagctcctggcctcaagtgatcctctcccaccttggcctcccaaagtactagtattacagacctgagctaccaaacctgaccctcatagatgttttttactttttttctccagccttttctaattgcctcagtcatttttttttcccaaagagtatagctgtggttattttgtatggggataagggagcatgagcaggatgattagaaatacatttgcagttattttttcacaatggcaacatttaaaaatatgcttacaaaggaatgtcaggaaagataaccatacagatacttcctcctttctttctccttcataaccacactctcatttgattctttccttgctattgtattttccctccaattctgttgcttttatggacataaatttctgatgaggtaaaagctaatacaataaagaagtttattaacacatctccagtcacaaatgagtttggcacgtgccgatactggtcaattacaaaactttaccaatgtttatatgatttaaatgagaaaactaagtgccattcctttcataatgtagtgtttaaaacaagagaatattgatgtggttttgttagaaccccttaagaggagtaagccaatgattttttttttaatgctgtggaatacacttgggatggtaggaggtaaggaattcggaagaaaaacacacaacttccaactgtggaagtgcaagaagacaactggcacagggaaaacagaagattttcttctctatgaataaactaattaatttgattgaaaaatgcaacctgcagagagcaaaaaagatttactgacatttttataaggactcaaagttaagcacagcaagttccatcaacttttctgataattgtagttaggacatgcaggcagaaactaaaacttctgtgacggtaagggaaaaaaatgaaagcaagtcaggaggccaagtgaagttgtgttttttggtttatatcagcaggaggagagatatgaatagtatctgggtagatacacaagccataatatggaaaataattgtgaatcaccatcaatgctttgactggacagaaaaatacatctaacaaatatggctcatctctttttttttcccccaagtgtctatttgactctggaaataagatggcatatgtgagagtggatagagaaaaggaggtgctgaacaaatgagtgggttattttctcccaagtgcagtgaagtttgcgtatgtgaatatatgaatgaatagatgaacaactaaattaagttattcaggtaattccaatcttggaattgaattcgttgcagtaaatactttggaggtgcacaatctcaaactcctaattgtgattttatttcacaatttggtaagttcattgatttttctgttttacttcttccagtaatgttaagcaatagtaacttgcagatcaaggtggtgtaggaccagtagcatcagcgtcacctgagaacttgttaaaaatgcagactctcagctctcattctgatatatacagaatcagaattgtgcagtttagcaatatcccaggtgatccctgatcagtttaagtttgagaagcactgatctaactgaaattaagacagagtagaaatctcaacttctttgtaaacctctacttagatatcttctgttcctatttttctatcaagtgacgtgggccaaatattttaattactttctcaggagctctaaaaatggtgctgatatttcattcagtcctcatatgttgatatcataccccatgggtgattaagcagtagcaagattctggtgcaataatatataacagacaatatatgagtgttgatgagtattgataattaagctattggactaataagaagtaggaattatttatagatgataacgtgacattcggttaggttgcacatggattatggtcataataatttttctgtcaataattaaaaatgtgataatgcagctaaatgtggacatctcttgtactaataatacaatgcatgtgactcatagtttaaattacaggaaagctaaatttctggaattcacagaaatgagagagccgtatcttcaaaaacaatgctttctcacaaagataaataatgctgatatggtttggctcatcttgaattgtagttctcataatccccatgtgttgtgggagggacctggtggaaggtaattgaatcatgggagtgtaaccctcatgctgttctcatgatagtgagtgagttctcacaagatctgatggttttataaggggcctttccccttttgcttggcccttcttcctgctgccatgtgaagaaggacatgtttgcttccccttccatcatgattttttctgaggcctccccagccatgccgaactgtgagtcaattaaacttgttttctttataaattatccagtctctattatgtctttaattagcagcgtgagaacagactagtacagtacattggtaccgcagagagtggggtgctgctataaagatacccgaacacgtggaagtgactttggaactgggtaacagccaggggttggaacaattcaaattaaactaatagactatctcagagagcagatttaatagaagttgacattttaatcttagtacaaaaattcccaatcagaaatatcaaaactatgtcttgttcataattaagttatactacttatacattgaagaaatatttattgagtgtgtagtatgtgccaggcactgtgccagatgctatgtagtggcaaaatttttgaagttgagagtgagcttctatttccacataaatgaatagaatttcagagtgtcaacattacctattcttactagagataatttaaacagtcttccaaacgtgatatattcatatttgtccttggctcctgatgacatctgccaatttctttattttctttaaaagcatttaatcaggaagattgatttgagggttgccataatgtatttgccacaagaatctttttctttttctttttcttttttttttgagacagagtctccctgtctcccaggctggagtgcagtggcgctatctcggctcactgcaagctccgccccccgggttcacgccattctcctggttcagcctccccagtagttgggactacaggtgcccgccaccacgctcggctaactttttgtatttttagtagagacggggtttcaccatgttattcaggatggtctcgacctcctgacctcgtgatccacctgccttagcctcctcagcctcagtgctgggattacaggcatgagccaccacgcctggccaagaatcttttgcatccagccacgcagcttctttatgttattgttactaaactgaatttatgttttcaaaatgaaaataaatgtgtttgcatttgaactttaatgttgcctcggatagttgaaaaatattaataattaaactgttcagctatatggatggaggacaaaaatggatcaggatttgaaaacaatgacacattttcgattttctcatagaattcagtataaaaacaatactatttctcacattccattaagtaggaaaataaatgttagtgcatgtttaattttgtgaaaaactggaacattttccttcatttctagttgttggatggggaactttatattaggttctttctgaactatttactgtgaggttgtaatttaaagtttgacctccaagatcaggttgcagggtgcagtataataactatggcaattagtgggaatttttgaaaatgatacatgacatgctctccttggcttctttcctagcccaagatgtcagcatacttcgtgttgggaaagaaggtgctgtaaagaggagaatgaacacattagttttagggggataaaaactgtataattttgtcagaccttgcctcacttcattctccaatggaaactactatattagtgcctaagatttatacacaccgtgacaccatgcagtgtcaggctttgcagctgagtctagtaaggaataccagaatttggaggaaagcagatctagttactgaggcaagtaggtaaactaggccagtagggtttctacagcttcacagatgctgagggtacccattcagaaagttagcatgagaactagaggacaatagcgatggatgtacttgtggtaaaggtgatgagatagtgaaaacagtgacagctgaagtcttacacatttgagggggtaattggttctgtttggattctggctttaaagcttatatttcacaggccacttattgaactttgataaacgttataaatcttgggagttgaaaaatactaatatgcttcctatggaccattcattattgccatgcaacaacaacaaaaaactatgtgcatatgtttgtacatgcactactcaagcttttcttttaaatgaatgttgcttttctatattaaaacatgtttgccatttcttggattataatatatcatgatttctgattcctatatttaatgatacaccatacattttaaaaatatctagtcattttatatggtcaccatatatttgagggaaaatgagtctcgaagtttattgtggaggaggtggagaaaaatcgccaaacagaagcctccagtaattatccctgttgcaggaacatcaaattgaacaactgtccacactagaaaagcaccttcataagagtgaaaaattaggtgcatgatcgtagtacctggtttttgggttgtatcacagaaagaggcacagaagagggtagtaaaggcaatattctatcacctataccagctctccctcatccatggcagcagtcacatggcatgaagagagagtctatgtgcttgcagaagggagattgcagtgattataggactttgcattgaaaatcagtgctgccctgtcacagtggaaaccgacaaagaacagaactcagccaaatcccgcagagggagcatttagatgaaccctagacagggaagaatcatccatcccagtgtttggaacctgagttccggcaagccttgtcatcatggattagagtgctctgtggttctaaataaacttcaaaggtagtctaggccacaaggactgcagttcctttgcaagtcctggtgctgtgccgggctcagagtcagtggacttgggatacatacaacctagtgagacatccgctggggcagctaagggactgcttgtgcttcccttcccccaaccccaggcagcacagctcacagctccaggaaagactccttccttccgcttatgaagaagagaggagacaagaaagagaactttgtcttgctgcttggataccagctcagacatacaataggatagggcaccaggcagagtcttgaggtccccattccaggccctagctcacagataacatttctgaacacaccctgggccagaagagagcctgtcaccttgaagagaaggaccccgtcctggcagaattcatgacatgctgaccaaagggacctagggccctgaataatcagcagctgtagccaggcagtacttgctgtgggtattgggtgagactcagagctgtgatggtttcaggtgtgacccagtacattcccagctgtggtggctacagggagagaatccttctgcttcaggaaaggagaggtgagagtaaaggggactttggcttgcagcttgggttccagtttgaccacagtggggcagagcatcaagtgggctcctagggtccctgattccagagtttggctcctggattccattttcttactgccctgaagggagagactcaggactgacagcattcaccacaggctggccaaagtggccttggcccttgagtgaacattggacctcagacagtactctctttggttcagtagtcgtcgtggccatgaggagagacatctctgtttgtggaaaggggagagaagagagggaaggactttatcttttgggtggggtgccagcttagccacagtagaatagagcaccaggtagatttcttaggttcttgagttgatatagtttggacatgtgtgcctgctcaaatctcacgttgaattgtagtaatctgcagtgtttgaggtagggcctagtgggagctcattggatcatgggggcaaatttttcataattggttgctactgtccttgcaatagtgagtaaattcttgcaagatctggttgtttaaaagcgtggcaccctccctctcactcttgctcctgctgtggccatgtgatgtacctgttcctccttcaccttctgccataattgtaagtttcctgaggcctccccagcagctgagcagatgccagcatcatatttcctgtacagcctgtagaactgtgagccaattaagcgtcttttctttataaattactcagtctcaggtatttcttgatagcaatgcgagagtggcctagtacagaaaattgttaccaagaagtggggctttgctgtcaagatacttgaaaatgtagaagctgctttgaaattgggtaacagacagaagttggatgagtttggagggctcagaagaagacagatgagggaaaatttggaatgtcttagagactggttaaatgattgttaccaaagtgctgatactgatatgcacagtgaagtccaagctgtcgaggtctcagatggaaagaatgaacttattggcaactggagtaaatgacatgtttgttatcccttagcaaagaagttggctgtattatgtccatgctctagatatctgtgaaagtttgaacttgagagtgatgatctcgtgtgtctgacggaatgaatttctaagcagcaaaatgttcaagacgttgtgtggccacttctaacaacctactctctgatgcaggagcaaagaaataagatggaatatttattattttattttattgtactttaagttctgagatacatgtgcagaacgtgcaggttttttacatatttatacatgtatatttaaaaggaaagcagaccataaaggttttcaaaatttgcaacatggatatgtggtagaaaataaaagcccattttcaggagaactcaagaaggcttctgagcaaccacttgctagaaaaatttgtatacctacaaagaaggcaagtgctgatagccaagacaatggggaaaaaggcctggaaggcatttcagagatctaaaaggcagcccctcccattatagatccggaggcctaagaggacagaatggtttcctgggccaggcccagggtcccagctgccctgttcaacctcgtacactgtgcccccgccccaacccctcccccccgcacccagcgtcctggccactgtagctccagctgtggctcagagtggcccaagtacagcttgggccacagctccagcgggtacaagccataagcctgcaggtgcacagagtgcaagagttgaggcttgggaacatccatctagattttagaggttgtatggaaaagcctgggtttccaggcagaagcctgctccaggggcagaaccctcacagagaacttctcctggggcaatgcagagggaaaatgtgggctttgatcccccacacgtagtccccactggggcattgcctagtggacctgtaagaagagggccactgtcctccagactccagaatggtagatccactgacagcttgacccttgtatctggaaatgaaacacacactcagcaccagaccataagagcagctttggaagctgaaccctagaaagccacaaagttggagtctgcccaaggccttgggagcacaccactcccaccagtttaccctggatgtaggacatggagtcaaagcagataattttggagttttaagatttaatgactaccctgctgggtttcagacttgcatgagacctttcttttgaccaatttcacccttttggaataggagtgttgactcaatgcttataatcccattgtatcttggaagtaactaattggtttttgattttacgggctcataggtagaagaaacttaccttgtctcagatgagactccggacttttgagttaattctggaataagtaaagaccttgggggactgtttggaagacatgattgtatgtttaaatgtgagaaggacttgagatttgggaggggccaggatggaatagtatggtttggatgtatgttcttgcccagatctcacattgaattacaatcctcactgtcagaggtggggcctgggtgggagccgaatgaatcatggcgttgaatttctcatgaatggtttagcactatcctcttagtgctgttttcatgatagtgggtgaattcttgtcagatccagttggttaaaagtgtgtggtaccctcccactcacctcttccctggccgtgtgacatgactgctcctccttcgcaatttgccatgattgtaaatctcctgaggcctccgcagaagcagagcagatgccagcatcatgtctcagggacaacctgcagaaccatgagccatttaagcctcttttcttcataaattacccagtatcagatatttctttatagcattgtgagaatggcctaatacatgaccccaggccctggcttacatataggatcttgcaaacccaccagggaaaaattgctaccctgaagtgaaaaacacaagcttcattggatttgccacctgccgattgtagagtccttgggccctgagtgaatgtaggtgatagccagtcagtggtcagtgtgggccttgatcaagacccagtgttgtactggctttaggagtgacccaacacaatcctagtcgtggtagctacaggggtgcttgtgtcacctctcctttagctccaggcagctcatcacagagagagactctctttgttgaggggaaggaaagagaaaaagattatctaccaggtaatacaggggattttcctgaatcttcccaaagatcaccaaggcagtacgtttaacagtctgcaagagtcacagcattactgggcttgggtgcaccccagtgcatatatggctgcagtgaccaaaggaataaatcacaacacccaagaacctttaaatacctggaaagccctcctgagaagtatggatacaaacaagccgatactgcaaagactacaataaataccaaagtcttcaatgcccagacattgatgaacatccggaagcatcaagaccatccaagaaaacatgatctcaccaactgaactaaataaggcatcgctgaccaatcttggagagacagatatgtgacctttcagacagagaattccaaatggctgatttgaggatgctcaataaaatccaagatagtacagagaaggaattcagaatcctacacataaatttaacaaagggattgaaataaaaagaatcgaacaaaaattctggagttgaaagatttaactgacatactgaagaatgcgtcagagacgagtaacagaagaattgatcaagcaggagaaagaattagcttgaagacaagctatttgtaaatacagtcagaggagacaaaaaagtcctaaaaagtttattgaagagggtaataacacagaacttcccccacctagagagagagattaaaattcaagtacaagaagataatagaacaccaaggagatataatataaataagactacctcagggcatttaaaaatcaaacttccaaaggtcaaggataaagaaaagatcttaaaagcggtaatcatataaaaaaaaaaatcacatagaaatagctccagtatgtctggcagcacaattttcagtggaaaacttccaggccaggagagtggcatgatacatttaaagtgctgaaggaaaagacttttattctagaatagtatatctatgaaaatcctcttcatacttgaaggagaaatgaagactttctaagacaaagaaaagctgacagatttcattaacaccaaaccttttctacaagaaatggtaaagggcgttcttcaatcttaaagaaaaggatgttaatgagcaatgagtcatcatctgaagtaacaaaactcactggtgatagtaaggtttgttactattctgttacaaagagaatattataacactgtgattatgatgtctcaactacccatatcttgagtaaaaagactaaaagacgaacctatcaaaaataactgcaacaacttttcaagacatagacactataataagatataaatagaaacaacaaaaagagtggggggatgaagttaaagtgtagcattttttttttttttagttttctctttgcttatttgtttatgcaaccagtgttgtcatgaatttcaaataatggattataacttattctttacaaacctcatagttaccacaaatcaaataatgtactcaggtacataaaaattaataagaatgtataacatatgaccagagaaaattactttcattaatagtaagacaggaaggaaagagagaatgaagagaaggccacaaaacaaccagaaaggaaatagcaaaatgggaagtgtttaagtccttaacgtaccaatgataacatggaatgtaaattgactaaactatccaatctaaatacattgagtgacagaatggataaaagaatatacaagacacaataatctgttacttacaagaaacacacttgaccaataaagataaagatagactgaaaataaagggatggaacaagtattccatgccaatcgaaaccaaaaaagaacaggattagctattcttttatcagacaaaataggtttcaagacaaaaactataaaaagggacaacgccggtcattgtagaatgataaaggggtcaattcagcaagaggacataacaattgtaaataaatatgtacccaacattggaacacccagacgtataaatcaaatattattagagttagagagatagaccccaaaacagtaatagccggtgatttcaattccccattttcagcagtggccagatagatcatccagacataaaatcaacaaagaaacatcagacttattatgcagtgtagaccaatttgaactaatagatatttacagaacattttatccaacagctgcagagtacatattcttcttctcagcacatggataattttcaaggacaagccatatgttctgccacgaaacaagtcttagaaaattcaaaaatcaaaataacataaattagcttttctgatcacaactgaatatatcaagatatcagtaggaagaattttggaaactatagagacacatggaaattaaacaatatgctcttgaattatcagtgggtcaaagaagaagttaagaaggaaactatagaatttcttgaaacgaatgaaaaaggaaacgcaatgtaaccaaaacctatgggaagcagtgaaagcagtactatgaggaaagtttataggtataaatacctacatcaaaaaagcagaagaactttcaaataattgaatgatacaccttaaagagctagaaaagaaggagcaaaccaaacccaaaattagtatgagaaaataaatattacagtaaggaacagagctgaaatacattaaagtacaacaaaatgatacaaaagatcaacaaaacaaaaagaaggtttttttgaaagggttgacaaaaatgacaagtcttaagcttgactaagaaagaatgagatccagtcacttacaacaacatggatggaactggaggacgttatgttgattaaaataagcccggcacagaaaaacaaactttgcatgttctcacttacttgtgagagcttaaaaaaaaaaaaaaaaaaaaaaaaaaaaaaaaaaaaattaaaacaactgaactcatggagatagagactagaatgatggttaccagaggatgggaatgctagtgggtcgggggcagtggggatcattaatgggtacaaaaatatagttagattgaatgaatgtgatgtagtatttgatagcacgacaggatgattactgtcaaacataatttgttgtacgttttaaaataacaaaaagtataattggaatgtttgtcacataaagaaatgataagtgctcgaggtgatggataccctattaaccctaatgtcatattatgcctgtatgcctgtatgaatatgtctcttgtatcccataaatataaacacatactatatacccaaaaaaataaaaatttaaaaaatagggtattgtggtttctatcattaaagtaaacatcatgctaagaacaattgtctcaagagtaacaactgtaattttcgttttggtgaaaataataaaattattaatgacaatctctgtataaaattccaccaaatgaacttctgttttctatttttttaatatttataatcagtgccataaatgactttataatagatataaagttaatctctaaaaagttaattttagttcaggcaatattgcatgattgtgaagcaggccccggagccaaactacctgagttcccactttgtcaccttcccttgtttgcgttttgacccaagtaagcctttgtttccccacctgtaaattggggctaatatcagttgctgaatcaataggattaattacaataatacctctttttttctgacacacaattattattttgtatttaaaaattatatttaaaagccccaaattctacaagatcaaaattactctttagtaagtcttcttttttatttgtaatttctgggggtacataatagatattttagtacttgtggaagtcatttataaataagtaaacgcatgtttgtgcatcctgatcctttgtctccatgttacctctgtgcatctggttcatgttaaccctaacaagtcatgttgtctggatacagctttccaggtatttgccacttgtgaggacccaagggctaaagtaaaaattatggctgtgtcctggggcgggggggggggcggggaagaggcacaatcgttctcaaccctggatgttcattcgaattacctggttggatagttttttacagaaccaatacctgggctccattcccagatattctgattgaattgttggggaatggggctgggacgtcattttgaaaagttctctcagtgattctaatcaattagtacctttttatattaaggcattatttatataaattccactaattcacctatctgtgatagtttgaataaaagccggacttaaacattacctcaattaataactttctgttttttaacctatcttggatttcttttcttttttctctccctcttttattattattattatactttaatttctaggatgcatgtgcacaactcgcaggtttgatacataggtatacatgtgccatgttggtttgctgcacccatcagctcatttacattaggtatttctcctaatgctattccttccccagcccccaatacctttcttaatagagaatgaaacaaaagctgaaacaaagttgattttaaaaattacttatttaagcagatgacagcattctagaagcatctagttgcatataaagaattgttaagctaaaaccaaaactaatctatctataagaaccaccttgctagaatttttgagccatcgttttgttatttttatctatttttttaagacggagttttgttctttcacccaggctggagtgaagtggtgtgatctcagctcactgcaacctctgtccccccgggttcaagtgattctcctgcctcagcctcctgagtagccgggattaaaaagtgcttgccaccacgcccagctaatttttgtatttttagtagagatggggtttctattggccaggctggtcttgaactcctgacctcaggtgatccagccacctcggcctcccaaaatgctgggattacaggcctgagccactgtgcccagcctgagccatcattttgaataagtaaataaatcaattccaattttcatcagtacaattttagtttctaaatggcgtgcatttaaaagtaaaaacatgcattaaaaattaagtttctctaatttgtactggtatctttcccttaaatcatattatacaggttttatttctgacttaaatcatgtaattgtattttacatgtaagacatgtcaattgaacatcactggtagttcttttctaatctagactttcattataatacattacctccttttattaggtgtatttttttaaattgaggattgcatatatgccagtaactgtgaattctagggaattgggcctgagagcctgtcttcctaaagagctcacacctcttggtaatttgtaagttttaattgtagtcctctaggttttataaagtctatccatttatgcctttattagttagtgcctagcatatgattatgttttcataatatatgtttatacattttataatgtatttccataaagcacaaaaaatgctattaggaccatcaaatacaggctgaaattaatgaaaacatgtactattttgcatttataaatttgtatatggaaaatgaaaattttaaaaaatgctattaatgtttattgctagattgctaaacttaggatgtcattcctcatagacattggaggacaaaataaattggtatggataagtacttgcaaataaggattcacggatattggtaatctaattatctgtcggtttatagctgtgctgtccaatattgcagccgctagctatgtgtaggtaaattataattattataattaaatatagttaaaaattcagtttctgagccttactagccatacatatttcaagtgttcattattcccacctgactagtgtccattatatatgtatacctatagtgcacacatagaatatttacatcattttagtaagttctggacaacactggttaaagaataattgccttcctacattctttcttttttgttttttgaaacggcgtttcactctgtcactcaggctggagtctaatggtgcgaactcagctcactgcaacctccgcctcccgggttcaagcaattgtcctgcctcagcctcctgagtagctgggactacaggcatgtgccaccactcccggctaatttttgtatttttagtggagatggggtttcaccatgttggccaggatgctttcgaactcctgaccttgtgatccgccgcctcagcctcccaaagtgatgagattacaggcgtgagccatcgcacccagccgccttcctacattctaacagagtttctgtaaagcaaagctggcattcccattgaattcctttatgttcatacagatacgttttcatgtccgggggtgggatgacagctctcgagtaaaatcatttgaaaaatactacgtcttagaatgccatttactgcaaatgacaaaaaggccaactcaaagtgacttataccattgctccttaaaatgtgattaatggatccgaagcattgatatcccttgggcagttgttagaaatgcagaatctcaggccccaacccaggcctactgacttagaatgcatagtttgacactctccaggtgattcatatgtacattaaagtttgagaaacactgggcacaatcataaggatgtctgttatctaacaatatatcaaaaatgtcgttgacgctagagaccattaggtctgtaactctatgttgccaaagttccaagttcttacaacttatctgttttgctagcccctctctattctcagatgatctgaacgattggaagtttaccgtagcagttcctagtatcatgtcctgatatgcttttgcctatacctactgtcaggaccaactcctgccctatactactttattctaattccactccctcggctctctattgccagtcatatatgtatactccattcaccttttgcttttactttcccgtctaaatgacgacttgaaggatataaaatgaaacctggaaaaatgcaaacattttttcctatctgtgcatggtagatttttattttgtgactttgacaatttttccaaatttatttacatctttagaatgttagctggaaataagaaactcctgtctcattttcatcatgttttaaattgaactatatgaagccattttcatcaacaaagaaattgaaatatcagaaatttcatatgatctaatacaatattttgcccatgaaaaaaataaaatagtgcacagtcttgggtcacacagggtttgtgatttctatactggcttcacatgccactgtgccagctctttaacctaccactatcctcagaaataaaataacagtagctaggtgcggtggctcacgcctgtaatcccagaactttgggaggtcgaggcaggaggatagctggagaccaggagttcaagactagcctgggcaacatagggagaccacatctatacaaaaagagttaaaaatttgccagggaaggtggtgcacctgtagtctcagctactcaggaggctgaggcaggaggatcatttgggcctgggaggtcaaggcttcagtgagttatgattgtgtcactgtactcgagcctgggtaacagaatgagaccctgtctcaaaaaaaaaaaaaaaaatactagtattataaatctttaccttggcaaggttatgttaaaaaaagttgaataaatgttagccagtgtattttacaactaatattaatgacattttaacccagaggttaacctccccactccctgaagtcacccctttatttaaaccatctttgggaaaaaggacatttgtgtcatgaaggctgttaaactcaccttctgatatcagtgcctccttcaattttgcttcttcctctggttcagccttgcaatggaccactactcacttccttgctaatcacccagaaaactctggcctataattcacctgcactttactgatgctcttttcacaggcctcagtgaaggaaggaagcgtcctcttcattactagttatttcaatctttagagtttttcacatatcagtactgtaataaagcccttccttactttactgaagggcatacttgggcattctgagtctgataccctttgatacttccctgccagtgtcacataaatctatatcttctgagttttagcagtagtaactaatagatcgaacacataccttaagtagactagcagtggttttcaaataaataatattcttacctggaatgttgtcattcaaagtgtgatccatgacccagcaacattggtttcacctggaagctggttagaactgaattcttcgacccaaccccgtgaatttaaatcagaatcaccaggtgggctgtatccatatttaagtttgagaagctgtgatcaagaccccggggggcaccaaatccaaatgcctattgtagaagccagaaacataacataaggaagtgagatgagttgcgtataaaaaaggatagggagtgatgaggactacagcaaactggagagcttatactttgtatatgaagtataattggatgcgaagtataattggatgtgaagtataattgatactcaattttgtcctataggaaggaaggtttagggttgctgaatcctattaaatatgatcaagagtggtcagatttgatatttgtagctaatatctcaaattttaactactggcaaaaatttcaatttattttcaattagtatgagaccaaatccagcatatggactactatttgctaatatctagtcaaggcctgtagtaaggaaaagaaatattttctcaattaaaacatctcagaatcctttccaacaatgggatgaatgctttttgttttcgtgcttattagtatcacacctccacaatccttaggttcttctgttttcaaacttgttctgaggttaatttcatgcttcagacacatgaaatcctgctttttggagcctcaggtagaacccattctttggcagttggcagtcacacttctctctgtaagtggaggtgaagtcaggaagagaatgtaaaagtctcatgtcaaaataattcatagtaatctcctggggattggcagttgtcctcctattaatgttaatatcttggtctctgcagaatttgggtgagttgtgtttgtagaataaagttacctagagcagtaattttcaagtgtgagtatgcatcagtcacctggaagtcctgttaaaatacacatttctagacctcatcccagagtttctgattcagtaagtgtgagtcttgcacacacttctagcaagttttgaatttgcacttctagcaagtttctaggggatgggctgatgctgttggtccagggtccagtaaccacactttcagaaccactaatgaagagagaaaaagcagggctctatttggctgggagacattgatgtgactgtaccagtcattaaaatattgagccatcccgtttgcacacacccagccattctggtccctaccccaaaaatccccaaccagatgtttctgtatcccacttataaagagaaaacacctggctgggttcggggactcgcgcctataatcccagcacttttgggaggccaaggggagaggattgcttgagctaaggagttgaagaccagcctgggcaacataatgagaccttgtctctattaagagaaaaaaaaaaaaagaagataaaacacttatgtgtacatctcttcttattggtcaatctctgagtccaagtttgtaaaatgaaaccacgatagaacatgaaagattactgggtgttcaaatttcagatttggggcagagctcaagaaatctctgtggacccacagattaaggtaggctatgatactgtacaaccatcctgcaccttgtgcgatcaagctgcactggatttccggttcctctgtgatgtgacagggcctttcacaggtctttctttccgtctagaaagagtttataccttctttttcactacttctgacttcagtcttcacagttgtccagtactgcactaaaggcccccctttacagactcaattcaattgctctcatttcatagtatgatcacattataaccaactaatggcctgttgagctatatgtattatctgtggccctcacccgccatccatataaactccaagatagcaaggggctgtgttggtcttccttgcctctccatccgtagtatccaggtactcaataattgtatatttcgtaaattaatgaatgaatttttcaagtctcaactcttaggctgtgtgttctgcgaggacactgttcccaatgactgcaggtcaatttgtatcctctccttactccctcaggaatgtatataaatctaattataatggatttcttatattctaattatttttgtatttatgtctctaatagtctctaagctacttgaaattgaagataggtattttgtccattcctaacaaatatgagtttcctgcatagatatgaaactcagtaaagatttgttgaaggaaatgtctgtccaaaagcaaaaagtaaatgatgctttcaaatactagcaactttcagtttttgcttccacttaaatggatatctcatctctgttgtttctcataaaaataaaatgtctactttttgtgtttgataaatgaaagtttattctcataacttctgattgcaatgttcctcatggtaaatgtgtctctaaaatgttaaaagtcaataaatagtgcaatctaaattattgtaaacactctcaaaaggaatatgaaatgcatattggaagaaagctctgataacaaccccaatacttcggaccagctatggagccattatcttttatattttattttactggtttacttcccctgtttccctgtaattttatatgaagagtgtgagtggtatgtaacattacatacaggttccatgttggggtttaaatagcctggcattagtgtatgaggataaagatgctgatggaattttgtatccttttgttttaaatacacttatactaatttaagtattttgatagttactctgtttagcagattcatttcacttttctccttcttgctctgttcaaagaggatgaagtctagattttctgttacccaggttcctcttggcctttggttgctaaagtacttcagccaatgggaggcactggcaagagggtgaaagcagagattgtggtacttttctcttcctcttctgtttcttactgtggagtggctggaattgtgttcctcttaaactacagctactgttggacagctcttgttccatgtctctaattctcactgagctccggcaacagctctcttccttttttcttccagttccggggatgctaggtcagttgtctttgttgttaggtcctggctccttcactatcgtttattatttttcccccgacccttcacataaatgtgtaagtagtctactgagcgaaacatatttgagtgtgttctatctttcctgccaatagtatgcagcatccacacacacactcaacagacccaacttttatattttattgtttgaaatgctatcaatttctaaacattgctttttaaaccctactttaaattgacagataaaattgtatattcatcatgtacaacgtgatgcttctgagtaaatatatattgtggaacagttgaatctagctaattaacatatgcattaccttacatatttatcatttttatggtgggaatatttaacgtcctctctctctacatttttcaagagtatattttcattagctgtagtcaccatgctgtaaaatacatcacttgaatattttgactgtgactatatatcccttgaaaagtatctccatacctcccccttccccataaccacctcagcctctggtaaccactattcattccctacttctgtgggatcagctcttttagattccacatataagtgaaattaggcagtggttttctttctttactggcttatttcacttaacataatatcctccaggttcatccatgttgttgcaaatgacagtattttattcttttttatggctgaatagtattccattgtatatatgtataccacattttctttatccgttcatatgttggtggatatttggattgattccatatcttggccatgaatagtgctgcaataaaaatggtagtgcagatatttctttgacatactgatttcatttcctttgtatatataattcatagtgggattttgtatcatattgtagttttgttgttcatatttcaaggagccttcatactgttttccatgatgcctgtactgattgccattcccatttacagtgtgtaaaggttttcttttttttaattagtaatttttaacttttgcaggtacgtaatacatgcctttttcctaaatcgttatcaacatttatctttttttgttttggatagtagccatgctaacaaaagtgaggtgataatctcttcttttttcttttgacaaagatatcgttaattactattatattttaacttttaggtgcaagggtacatgtgcagttttgttacatgggtaaacttgtgtcatggaagtttattgtacagattatttcatcaccaggtataagcttagtactcattagttattttttcctaattctttccttctgccaccctccaaactccaataggccccatgtctgttgtttccctctatgtgcccatgtgttctcatcatttagctcccacttataagtgagaacgtggtgtatttggttttctgtttctgcgttattttgctaaggataatggcctccagcttcatctacgtttctgcaaagaacataatcttactctttttcatggccgcatagtattccatggtatgtgtttaccacattttctttatccagtttaccactgataagcatttaggttgattgtctttgtgattgtgaatagtgctgccacgaacatatgtgtgcatgtgtctttttggtagaatgatttatattcctttaagtgtatacacaataataggattgctgggtccaatggtagttctgttttgaggtctttgtggaatcaccacactgttttcaacaatagttgaaataatttacactcccacaaacagtgtataagtgttcccttttctttgcaagtaagctgatacctcattgtggttttaatttgcatttcccagatgattagtgctgttgagcattttttcatatctgtgttatccatttgtcccttttatgataaatgtctattttggtcttttgcctatttttaatcaggttatttgttttcttgctatggagttggttgaatttcttccatatttttatatgaacccccatcagatatatagtttgcaaatatttttctcattctattggatatctctttactctgttaatttttaattttaattttaatttttttgctgtgcagaaatttttagtttggtataagtcctcagtctatttttgcttttgttgcttgtgcttttacagtcatattcaaaagttattgcccaaataattgtgatgaagcttgtcctctatgttttctactaatagattgagagttttgagtcttaaatttaagtttttaatccatttcaaattggtttttgtatgtggcaagggataagggtctaatttcattcttctgcatgtagattcttacttttcctggtagcatttgctgaagagggtgtcctgtcctcacggtgtgttcttgacacccatgtccaaaatcagttgaatgcaaatgcattaatttattcctgggttctctattatgttccactgatcagtttttatgctaatacaatgctgtcttggttactatggcagaatttcttctagttgcgtactttgaccttagtgggaaataaaaaacatccttccaaagaaccatattattagtgtttccatattgatcgagtatcttctgttttttttattggttaacactatcatatatgggtatactaagagactcctggcaaatgcccatagttttctaatgtagtactacttgccccgcattgtattgggtgaactcagttgaccatttgtgcttaggttctgtatggtaacccctttctctgtctgtggattcagcagcatgaggagccaaacatgaacagcggtcatctcaacttctagtttaaagaaatcatttttgagtttcttataactcaaaatgttgaagaggtagttcaaaaaaaagttgaagaggtagttcacagataaggaacagaagtcacaaggtggagagagatggataaattaatattaggttaatacagatgagataattatatatagaagtatttatgggtgagtacacactcacacatccacttctttatgtcaacccagaggtcctgtaagctacaacaccctagaagcaaggagcatacctagcaacaggatcttgggtttcagtaacattctttaaagaaaaaaaaaaaaaaaaaaaaaaaaaggaaccagaacactgtggagaaacagctgattctaacactaggaaagggaatatagaaaatgagcctggaacatttggtagtgccagatagtaagaacatgctaaactccacggtctcgctctaaacaaaaaacactgatgggatgtgtcaaagaagccaactaagagacttcccaatgtccaaagctggaactatttgagcaaaaatccaaagcaaaaactagtattggatttagcccaaagtatcaaataactatacatgagtccatgctatgtaaataaataatttcataaataaatggaggaatagagacaaatctccaatgcagaaaaaactccaaaaacttatgtaacttctctgccctcacggagagggaatgtaactccccactccacaggggctgtgtatagtgactttcttattaaaaaacagtgtgaaaagagggggaaagagtaactttatagtggataaacatgacacctattactttagccaggtggtcacatttaacattgataagtcacgttgagggtatatatgctttataaaatgtgcttaaaatggcccattacttctgtggtctttcaaaaaccccagtttaattatgaggaaaaaaaatcagacaaatccccactgagaggcatactacaaaataccagcctggccagcacttttaaaaactgccagaaaaattctgagaaactgtcatagccaaaagcagattaaggaaacaggacaattgagtgtaatatggaatccttggagagatactgaaatacaaaaaatagtttaaggaaatcagaatataataatagtctccagctaatgcacaaatattggttcattaattgtaagagatgttccataataacataagatgttaataaaacgggagactgagtgcaagttatatgataactctttgtattataatctcattaatttttcgtgaatctaaaacagccaaaaaattaaatctgttaaaaaacactctcagctatgtgtgcactttgtgtgtttaaatgtgatgattaatggaaacttccagtaaagattttagagtaaaattatgtattcaaaataacatattcctaattcaaattataagatcaatgttcagaatatagttttgaaaaatgctttaaacatgatgtttataaagagtatttcctttaaaataaccatcagcacttctcatttgcatctcaaattttggttgaattaatgaatgaacaataatgtgttttcatcctcaacataaagttgtgtaattaataggcaaaacattatcccatgtccctgatgctggaaatgtaattgagaacgtttaagaacctggttgtagagcttaccgctgggctgtgaacctaggcctttggactttaaattcattacccagcccactattttctatatctttgtggggaaaaagcaccctttctctagtctatttgtgtgtatcaaatgacgtccaaacttaatgggttaaaacaatttataattgcgtcatgatctgaagaccgagaatataagcagggctcagccaggttgtttttatattactagttttatagctgggggtcaccccttgggctgtgctgagctggaagctcacttctaatacagtattttatcctgcagaatcactcctatatggtctctaatgattcggtagtgtagcctggcctcctttacagcatggaatctaggcttcaagagaggaagaaatacaaatgctgccagttcttttatagcctacacttggaattggtgtggtgtcagttatgccacattctgtggtcaaaaaaaaaaacacaagtccagatcatattcacagggatggaaaatagacctcatctcttgaagggaaaagtgacaaagaatttgtggccatctttaaccaccacacatactaaataatgagaatgtaaacgaacaactgccaaaatatactacttagtcaattatcagatgctttgcacttcagttagcatgttcacatttagttgactatgtgaaagtttttagaaatcaggatttgtgaactattataagtctgagaaataatagttccggggtgactgatagtgggctttacttacatccttctcaatgtccaatagatgcccccaaatgcgaacattccatatattataaattctattgttttacattgtgatgttcagtaataagttgctttcaaagaggtcataataggcttctttcaaattttcagtttacatagagttttaatggatctccagaatcagaaactgaaagagttgaatgactggctaacaaaaacagaagaaagaacaaggaaaatggaggaagagcctcttggacctgatcttgaagacctaaaacgccaagtacaacaacataaggtaggtgtatcttatgttgcgtgctttctactagaaagcaaactctgtgtatagtacctatacacagtaacacagatgacatggttgatgggagagaattaaaacttaaagtcagccatattttaaaaattatttttacctaattgtttttgcaatctttgttgcaatggcttgaataagtcccctccaaaattcaggtgattgtattaggagatggaatatttaagggtgaataatccatcagggctcctcccttaagaataggatcaagtcccatataaaagaggcttcacacagtgttctcctatctcttgaccctccaccatgcaccaccatgtgaaaactctgtgaaaaggccctcaccagatgctaacatcttgatcttggatttcccaaactcgagaactgtgaaaaaataaaggtacattcttcctaaattacctcattctcagttatttttgttacagcagcacaaaatggattaagacatttgttgttgtttttttaaaaaatacagcatagctaggcttttcgtatttggaaaagaaatcaaacatatttgtggatgagaacaacgcagggtatgtgatttattaaaaatttgctttcctggaagacagacttcatagggattacttgtaatgcaaatttaaataataaggctacgattttttttaatgtaattttacattcaatttatagtaaattgaagctggccaagcttgatgataaatgagagtctgaagcattgcttttctatagaatatgacattttttaaatgttaatatttccatcttttttcttcagtttacttgtacatttccagttatgctccctcgctgccagaaagcatttttttttgtttctgttattgagacttctacaataatatttcttatccaaaattatgagggtgctttattttaataagtgccataaaatattacaattagctctgagttttattgttgaaataggctcctgctcaattcatgaggaaacacacacacacacaagatcctttgtaattgtcccaggattagggttgccacatttagcagacacaaataaaagaagcctacttaaatgtaaatttcagataaacaacaaataattttcttagtgtgtgtcccaaattgttcattgtttatctgaaattcacattttgctgagtgtcttttattttatctggcaactctacttatgatctgtggtttttggatttatggctttgaataggaatatctgctcctttacctcataccttcgaaatctgccttttgtcaaacttaattctctctttttataatattcagtcatatatagctttacagttcttccatgcaaatgaaagatacatttatttctaagttctagagttttttttaagtttaatgagcttcagttttgaatgacaaatggggccagcccttactattattgacccccaggagtcctctaagatctagcatttaagaagaactgtaactatggtaatccccgtctgctatgccatcaggaaaaaaacatcaactgtattgcaattatgtagaaattgtaactgtgattacttgtcatatagatactaattgagcacctgaagaagaagttaggtacagtgctagttctctaaccgtaccgcttttccgatgtggcacatttgcttctctcgttgacactatatctgccctctttcccttggcctacactggaagttacatgcagaaagtgtctatataaaccaggggtgtccaacccgttggcttccctgggcgacattggaagaattgtcttgggccacacataaaatatactaacactaatgatagctggtgaactaaaagaaataattgaaaaaatattttaagaaagtttacaaatttgtgttgggccacattgaaagccatcctgggtcatggattggacaaggttgatgtacagcaatggcttctctctaccggagggtatttctggtgcagaaccatttcagccagtttgaaggtggacaggaagtggaattagtgccaccagagctgcccttagccaatgaggagtaaaagttgatagagaaatcctgtagaatctttgtcccatagtgggacatttctaaggtatattctccacagtctttcagagattccccagtaagactgagctccaggtatccacagggtaacttcctgaacgtccccgtgctctcataatgccttacgagttcaccctccaaataaaccatttatttgttcacaaatcttttgttcaggatgtgtttttggaggaatctaacccaagacaaacttctcccactagaagccagaattcgagctccagttctaccactaactaaattgtcattttccaaacatcacttaatgtcccaggttctctgtatctttactttggaaataaaagagtgagtttgtttctagtgttccttccagtcacagtttaaatgtgtccaatacttttggaagttgaagtattttagaaaaggccaagattaggccacgtaacactgaacatcagaaggcaggacactgctgctggatgcctggagtgtaaagcgaaatccagggagaagagctccaaaagagcagtagaagaagaatgttagcatagctaagtacggataacctagggcagctatgaaggaagttcttagcttgggacgctgaacagactcttcattaaggtgagacaagctatccaggatcttaatattctgccaggtacctgaaatgttttgtagttttttctgaaagatataatgtgaatgaaatggaaaacgtttgacaaatattgtcataaaatttaaatatattattcattacttgaaagtatgccatttctaatgactatgaaattgccttgaagaaaaaatgtgaaacaaaagaaggcaacaggagtatatgcaagttgattatgtaacattttacctccaggcattatttatttatttaaagggcataaagaggccagaaggcattggttttctggctcagagagtaaggccaactcctacttttaactatttgagcactcttttttttgacagatttgacaatattttttgaaatatttgacagattttttttttataaaaattaagggaaagattcatattcaagtcctgaatattgataatgctcttttgtttcttggcaacaattttggcgagaagaaggtgacttaacatcaaacaatttagcaaagagttgactttatttaaacctgaaacatgtacattatattgtcttttaagactaaaaggagcatacatacagaattaaaggaacactgttttgttagtcttgccacacttcataaaacaaaagaaaataaatgttacttctttgggtaactgagttcaaactaaagccttatttatatagtcgttgaatcgctttgcagctttttttcccaagaattgtaaatcattgaaagtaaggaaatttctccttctgacaacaaaatgcatcagtaaccttagagtccccacaaaagcaactcccatctgctgcatcaccaaacttctaacctaatataatatttatttttagctttgtgtagatagacattaaatccttgtgccatcaccattttttcttaaagatgattgcagatgacaaaattaaagaaaagatacagattttattgctgggaattgatttaaattctgctcagatcagaggtcgcctgctctctctctctcaactggagggcaagattaaaatgtttgcaaatcttgcaagtacactgtgaatattacagatatgcttctgtatattctgtgacaggatcctttgctatcttcatttcaacagcattttattatgaggcaggctagaaattcagacactgtgaaatgtcaggaagataagtcacttttactgaacctggcaattaggtaaggtaaagcaattgatcctatatggtggttactattaaatctagccaaactctttactctgggtaaccaagaaaagttcaattggctgcaccatttgggagaaaccactcatccttcatagacattgctgtagggagagaatttagaggtttgctttagctttgaggcacccaagagtgagtctttctggggagtaaacaaatcgaacctctcattcccctgtgaaaaaatatatcacatataattctagctggtcttttttgtcttaaggggtagaatttattagtgatgttgacaaagaatgaaaggatttccctcgaaggagtggcatgatgctattgaggaggaaaagccttgagctttcattaatagtaaagaagtttgccattttggaggcatttttttcaaaaggaaaatatttaacagtgaaatcttttgtctcctggcacagtgagactgcgatgaagtttaaagctgagtttactagctaggttttccattcttttgagagatttagacttttgtgcatagatgcataaccttggtgacagcatcaacaaagactttacaaattacaagaatttgccgatgtgaatatatactctatattctgacttcagtgaaggttatatgtgaaatactgattaatacaaactaagtagcctcttagaaactcagtcacctatccttttcttgaaggttagttaaaggcagacatttgggttgccaagattgtgaaatatcctcatctggtgacctttaaaatgatctagatgttcatgttacagagaaggattaggtataattctgccaaaggatctgacatttcatttcattccattgcattctattccatatcactgaacaaaccctcattatagcacatgggtgctgtgaagaatgcagaaaccaatcatttacgatgtcttgtactatactgaatgctggaggatttaagcctgatcatggagggtgatcatgagtcttatataaaagactcaggcatttgcagtagtagttctatgagtaacaggaaaccattattcatgagaaattaaactagaaatagcagcaatttaggaaaacttatcttaatatttaagaagatattttttgaggataaataaaagagcagagaaacaggaggccggaaaacatgttaagaggatattgctgaaagtatatagagcctgaatgaaagcaatgacaacaaaaattgtaaacaggtacaaagcattctggatatcaaatcaaaaccaataggactagatttaggatatgaacaaaaagctcaaagtaatagattctgggactgggcaattgggacttgagattggtaattaagaaaataggcagtgaaaaagagaaatgcaatagttggaagaaggataagtgattcagttaagtttgacagtgccataggatcaagtggtgcttttagtggttagcaaactcactctcatatttagcaaggttaaaattacatgttgtttgtttctgctatgaagtttcattttatttcctgtcttttgccctcataagtgcttaatgaaagtttaatggttatgatggtaagggggataaacactataatctgaaaaaatactgtattataaccagagagccagatttcttttgtgttttcagagtgcttagtcaataattgatgctcagtaaatgtttttagaacacatgttctgattatattgactagttttattatccaaatcgtctccatcatggctaactttctgacaagggcatgaaagtttgataatttcaattaaaacgttgggcatacagcaaaaaaaaattcataaagctgtagaaaaatacatctgtaaagtggcttacctggtgatgttatctctggtgtcttcaatctctgactttccttttttccttctatctctgttgcattcccatatgcaaatatcttaatagtgctaaaccattgactatgaaattggtttgagtggtagtattattttgacataaatgattggaagtttatgtaaaaaagaacatcacacttttatagtctacgtagtagtatgtgcatgatattcagttacaatttttaaaatcgaattgagaagacatctaatatcccataagaattctattaacaagcatcatattccaagggtatatttgcacagtaatgctatagattattaaaataataataatataaaatccatgcccatattcttattttacaaatcaagtatttctagctatcagattattatttactttattagaaattactgagtattgattcagtaacattacttagaatgtcacagctttgtttgacagtatatcggtatagctacgaaaattatacctgatcaagactctgtcatcttagaggcactaacattagttattatacttcattactcttgtaatacttcctcatgagaagacactgacctctccaatggtgtttaaaggaaaaaaataagtaccctatttctaatttactgagttagtctcatgtaaaatgtctctctctctctgaaccagtactgtaacaatcaatttcagttctttcgtataggtaatacaaaattaataatgtagataaactaattataaaaaacattttaaaatgcattttagggaaaccttacaagaaagctaagacacacatgataacatgaattttaaggcaataattttccttatcaaatgtatgaccgtatcttataacaaaatgcatgtccgtaaatccaatcccgtgttaaaatataaggttgaatatgatactttttctgaagaatatggagaactatcctgtttaatatttctgttatgaacagaatttctagtggatttctaatactagtagatttctactggtacatctggtagtactctcttattcattggaagtaatgatactgtatcctttaacaattaaatttttatctaagtcatatctagtaagactaaaaaagcactaaactatttttacataatggtctacagttttggcacactgaggatatttaataatggaaatataatgtgattaccaagttattagaaataaatagtgatgctcaaaagggctatttccatgaatctcagtgtaagaatgcaaggataatgtgaatacgtcagaaatgaaagaaaataagcatttcctcaccacctaccaaatctaagcactgtacaagctgaagttaatgtattgtctcatttaactctagtaataagcatgtcttagaagaagttttaaaatagattgagggggtgcatgtgcaggtttgttacatggatatatcgtgtagtggtggagtctgggattttagtatatccataatctgaatagcgaacactatactcaataggtaatttttcacccctcacccccctaccagcctataatcttttgtagtttccagtttatattattccactctagatgtccgtgtgtaccctttgtttagtttcttcttataagcgagaacatgttgcatttaggtttctgtttccaagttacttcacttaggataatggcctatagttcctattcatgtaactgcaaaagacaggatttcatactttcttaggctgtgtagtgttctgtggtgtgtgtgtatatatgtgtgtatatatatgtatgtgtgtgtgtatatatatatatatatatatgcgtatatacacacatatatacatgtgcatatcacattttctttatccaatcatttactgatggacgcttaggttgattctttgctattgtaaatagtgctatgataaacatacaactgcaggtagctttttcatgtaacactttttgttgtttttgttgagtatatacccagtactaggattgcaggatccaatagttgtgttttaagttctttgagaaatctccatactgttttacataatgtttatattaacttacattcccaccaagagtgaataaacattttcttttctccacatccttgccaacacctgttgttgtttgacttttttaatgacaggtatccccttaaaaaaatgagatactgtcatttggaacaatgtggatggaactagagatcgttatgttaagtgaaataagccaggcacagaaagacaaacatctcttatgttctgacttatttgtgggatctaaaaattaaaacaattgaagtcatggaaatagagagtagaaggatggttatcagagactgggaagggtggtggaagggaggtggggatggttattgggtacaaaaattacagttagaaagaatgaaaagacataatatttgatcatatcatacagtaactatggtcaataataacttgtacattttacaataactgtgaaagcatataattaggttgcttgtaagacaaaggacaaatgcttaaggtgatagatactaaattctccatgatgtgattatttcactttgcatgcctgtatcaaaacatctcatgtaccccacaaatacacctactctgtacccacaaatttttaaatgacattgaaaaaaacaaataatagccatactgattggtgtgagatcatatctccttgtggttttaatttgcatttctctgatgattagtgatgttgagcattttctcatatgtttgttggccacttgtatatcttcttttaaaaaatgtctgctaatgtcctttgcctactttttaatggggttatctatttttcttcttgttgagttacttttagattctagatattagttttttgttagatgtatagttcggaattgttttccattctataagttgtctgttcattctgttgattgttttttgtttttttgtttgtttgtttttgctgttcagaagattttaaaattaagttccatttgtctacttttgtttttgagtacttagtcataaattctttgcccaagccagtgtcgagaagagtttttcctaggttttcttttaggatttttatattttcaggtcttacatttaagtctttaatacattttgagttaatttttgtatatggtgatttatgacccagtttcattcttctgcttatgactatccaatatttacagcacaatttactgaataggatgtcctttccccagtgtatatatacatttttttactttgttaaagatgtgttggtcatagatatgtggttttatatctgggttcttaatttggttaaatcaatctatatgtatctgtttttataccagtaccatactgttttggttactgtagccttttagtataatttgaagtcaggtaatgtgatgccttcaactttattcttcttgcttagcattgctttgactatttgggctcttttttgattctctatgtattttactatctttttctaattctgtgaaaaatgatgttggtaatttataaggactgtgttcaatctgtaaattgctttgagcagtgtggttattttaacaatattgatgctcccaatccatgagcagggaaagtttttccatttgtttgtgtcatctatgatttatttcatgggtgttttgtagttctccttgtagacacctttcacttttttgtttaaaggcattcctaggtattttttttttttgtagttgttgtaaatgagattgagttcttgatttggttctcagcttgatcattattggtgtatagaaatgctaccaattttgtacattgatttcatatcctgaaactttactgaagtcatttatcaaatatagggtccttttggaggagtcttaagggttttctagatgtaaaatcctatcatcagtgaagagaaatcatttgactttctttttcccaatttggatgccttttatttctttctcttgcctgattgctctagctaggacttccagtactatgttgaattggagcagtgaaaatgggtatccttgtcttgttgtagttcttgggggaggggggtgctctcaacatgttcctgtttagtatgatgttggctcttggtttgtcatatatgacttttgttattttgagatatgttctttcaatgcctagttgttgagggtctttatcttggggagaggctggattttatcaaatgccttttctgcatctattgagatgatcatatgttttttgtttttaattctttttatgtggtgaatcacatatattgctctgcatatattgcaccacacaaaacatatattgtgttatgtggtgaatcacagatattgctctgcatatatccctgcctacctggcataaagctcacgttattgtcatgtattatctttttgttatgcttttgggtttggtttgctagcattctgttgaggatttttgcatctatgttcatcagggatattggcctgtggtttcctttttgttgtgtccttacctgcctttggtatcatggtgatactggcttcgtagaattaattagggagaatttcctcttgtttgatattttgcaacagttacaataggattggtaccagttctttgcatgtctggtagaattcggctgtgaatacgtctggtcctgagctttattttattgggagatatttattactgattcagtttcactatttgttattggtctgtccaagatttttgcttcttgtggttcaattttgggagttgatatgtatccaggaatttattcatttcctccagattttctaatttgtgtacctagagatgcccatagtagtctgataatctttcgtatttctatggtatcagttgtaacgtcacatctatcatctctgactttgcttatttgattcttctgtttttttcttggttaatctagctagtggcctattaattttgtttatcttttcaaagaaaactctctaatttttttaattttttgtcttttattatctcagtttcatttagttctgctctgatcattgttatttcttatattctgctagctttggtttcggtttgttcttggttttctagttcattgaagtacaatattagtttgctaattttagatctttctatctttttggtgtaggcagttaatgctataaatttccatcttaggactgcttttgctgtatcccagaggtggaggtatgttgtatgtctctttttatttgtttcaaaaagttttaatttcttccttgatttcattgtccaaagatcattcaggagcaggttgtttaatttccatgtatttgtatagatttaaggagtcttcttggtactcatttctagtttttttccactgtggtgcaagaagatgcttgatatgattttgatttttttaaaaatgtgttaagaaccaccttgtggcctagcacattttcaatttttgataatgatccacgtgcagatgagaataatgtacattctgtggtggtagaatagaatgttctgtaagtgtctggcctggaaggatattaatacttgattttacagacaaatagatgtgttcaaagagtttaaggagttgttcaaggtaacttcagtattaattggtagattctgattttaactttgacctgtctgcctttgagaccatttctctccattttgagattccagtgaagcttgactccacctgagatcctagagactagagcagttgcagagaagtgacaaagagatttgaagatgttgtggcatttggattcccaggattgggaatgtctagatagaaggtacagagactgtgtgcatatgagtcttcaaacatagagtaagcagtagtggtagctacacattaaatactcagaatcaaaatgcttaatgaaataattcatcaccattactcctgtagttctttaaaatagaggaaaaagagactataagggaaacaggaatataggcttatgataagaatggcaataccgtctgagcaggaggataatcattggaactgaatttcacaactatattctgttagcagcacaatgcatagcatttcctctgtgctctgcctgaaactttccaccccaactctctcccaataatcttcttttctttttcaataattattttcagtaaaggcattttataattatttattcaatgttattggtttttaatctgattttaattctgtaactatatgcagaatgtatgggtgggtgcatgcatggattgtagaaagagtaggaaaggcaagagaattgagggctaccatttcgtgattagggactgtcctcactccatgacatatgtctgcccatgcaaatttttctgtgataaccatcagatgaggtagtttgaacctacttttattaatgtagtgtaaataaattggaagttcaggtattatttaaggatttaacacttactgtatatttctccagaccttaaaactttgctgtaacttcacttgttttcatgacttttcaaaaatcacattctcttcctgcacttatgatgtctattagaaaggatgatagtcagaatgtattagatgagggtaaaatagattagtattaggttaggtcattgcagtttagtttcaaaactttgatataaatatggctaaatatgaattctttcaactaattagatgctaatatttttggaatttatattgttttccaggcaaaatgcaaaacagttttaccttattcaatcttcttaaccacataaagaaataggcagttttattatcttagttttacaaattaggaagctgaggcttggtgtggttgatgactttctcaaagtcacgtgattggttattgatgcttccaggaattacacatagaaaatctgatttcagatgctacacttttgactacagttttactgtctcctcatagtcatgcacaagttttggtcaatctatttcatcctatgtccttttccatatgtaggagtacattaattgtctactttatttttaaaacagtttcttttcgtatttattgagtccccttcaggctattgagaagcatttagtgtgcttgtatagcctttcaaatctctccattgaaacagtctttcagaacccccatttggtagcttaggagttggcagaaacataaacattcatttctaacaaaaagataaaatcagtgtgttctgatataagaactaataaagatattcaatcacatttaagtaagtgaatatcaaaagcttttctagggtagcctgttgaggaagattatttaaaatattcagcaaatttataacaaagttatataccgtaaatagatcttcatggaaagctagacaatactgtgaccagccaggcttagcaaagtgaatatttcactgcaaataaaatcgaaagtcctttccagatcatatcattcaggccagcaagggatatagagcctagcccagtgtagaggtggtagaaggaatggggcatagaggaaaagagtgaaaaaaataaattacctaccaccccatcatttcccaagaaatcctaacactttctgatctgtacttgaagtttttatttgaaaaaaagtcaattcctgtccagatgtcttgaattaacatgatcattagtatctagggatttttttgttcatgagacagcttttttaagatacttctttcctggatgttagactcaactctattcctagaaccttctgaattcttaatgtcctttgcaaattttatgtttgctacaatttttttctcgttagtctttccttatgtgtgcatttattgagataaactacaaactactgaatatttgtaattaaacatctaaatatattaattttaaagtcatttttggagacaatagattgccttccaattcatgatgaacagcgttctgtgttgtttctaggggtgtgttttgtgtgtgtgtgtgtgtgtgtgtgtgcgtgtgcgtgtttgtgtgtgtgtgacctgcaagtaccggcaattagctgttgggtattcaatgaagtcggaggagtagttaaaaaaaaaaaaaactttacatataggtaacagctgttcttttcctgttctttccatagctgagtctatgctatggccaaaagaaatagacaagtaaaacaaaagcttctcccatcgaatttacaggatacccatccttgtttttgttttctattatactgcctttcgattaattattgctcttcacctttaaacatcaaatcaaaaatttccctagccttacataattccatgtctttatttcctaagtattattttacatgtgttctaagaaagggtaaaatagcatagatctagaataaacactgaagtggctctccagtggtttttctaagccacttttgaaaaccaacttgacatggacaagagccagaagaattcagtatcactgatggcatttaaaagaagtacaagaaaagtcaggtttaaataataaaattgggaacatgtactaagggagtaacaaattttgttaagccctttaactagagacttatttagaagaaatacaattattcacagaggtataacaaaaactgtttgtccaatctaggcattcttaatgttacatctcactgttggccttttctcttgtcataaagaaaaaaatacattatttgacatttgacaacaaacattggtaacatttgtatctaataatggtaatgaaatttaactaggaacatgatagatgtttgaaatctggtaagtgttacaaaagcattcctttaataaaataatgaaaataaatgcataataaagtacctagtatgtgtgtatatatgtgtatgtgtatgtacaatctggaagcttttaataaaggaaaacattttaacaatattatattacaatattttaatttgaaggtattattttctgacagacaaacatttttgtgtacttctctagggatgcatctatatttggaaactatttggctcatatttcaggcttaattagcaaatccaatataaatctccgttgtataaattcatctatgacaaattgaaatccataagaagtcagtatttaaaattgtaattaaatatagccttacaacactttagcatattattttttttaaatactcttgagaattcatttctttccaactggagaaacaggcaggcattctttaccccaatgatcaaggcctttattcatggattcctagtttggcagaacaattgaactttttaactccagctttttatgtctggcgtttctgctacttgtaagaatcagtgtaaaagtaaaccctgaacgttgcatagttcataatctgtattttgctgatattaaggagattagctaatacagttatattcactaatatttatttcgcatttgaagtctgagaaaataggagacgtgcttactgttttaccatagcttttgtcttacagctatttagtgtgctcaaaaaagtcagtttaaccttttttagtttaattcctaattagctgagaaagaagaaatacaattttaaaaagtcatagaggagaagagatactggaaataacattaaatcaaatgtaccttatgcaaatctactccagcactctggactcttcaacgttcttagtcactgtagagagcctttccccactcctttatttccttgtactcaccgtaagtccagagggttcttgtgttagattttaatgctatcatctcacaactctctttagtggtactttacgttagcacttctgccaagcataaaatataaacccttgatcaatatggcaagaatgccatttccaattataaaacaaatagatgaacgaaacaaaatcagaacaactaagtaatggagaatatagtacgtttgatcacatagactttaaaagactcaataagagttggattcattccatggatccaatgtttttcttacacttcttaagtaaaatatattaaaattgtgaaaaagcaatttacatgtaaaaatgaaaactggcattatttacttgtaattttgtaatatatgtaattatatatactcattgaaggacagaaaagaattgactaaattcagaaaaccaacttatgatacactggccaccaaattatcattttaattattatttgaaacattcccggctgacaccttcaaaatgttcccagtcctgtcttatataactcagaaaacacagactcaacatgactgtcaaggacaactctgaattttaatgtttccatttttggcctcatggcaaaaagagttttattaaccattataagctctggaatgtcaaaggcatgataggcagtatagattgcacacacaaaatagatgcatagtcattttattctaaattgcttcacttgaaaatgtagtatgaaaatctagagagacgaagtaaaaagaagtgattttatagtgttctaaaatgttgaggcttcgaaaataagaagcctaggataaaaatgctcatgcatttgagattgtgattcagccatcctaataagttcccttccacctgccatagagtttgaatacctaagagctagactgataggtgctaagcactgttgttttgcaagtagggacagcacgtttgccagaaagtaacgggaaatgtcccaaacttgtttctccactcttgtgttatgtaacaaaatgttctaagaaacaaagtagttgcctagaagtctcaaatagctattcagagaaatcccaataataaatagtgtaacagggtaaggtcttatgggatctggagcacccaggcaacataccttggttctagagcagcctcctttgtttacccctaatttattcctgtgtttacccctgttcatcattacaaaataattgtacatcatgtttttaaaaagattggaaatactgttttgtgacagcctcacttaatagggggaaatgattttttcagagccacatttgtaagttagaaaggcagtatttgaattattctggttttatcctagggttcagttgagaccaagtggttattttctgttgaggttagtgtaattgtgattacaccaaaaatcactaattcttcctattatattgtaatctttgtgcaatcaggaaggaacaaactcatctgtgcatgttttccccaaacccccacatggtaccatttatctgacaaatgtttattgatctttatttgcttgtaatacatagtgagaaggacagagggcatctctgttctagtggactgcctattatagtaagtagagacaaaaggactaagctgatacataagaaattattgagtagtgacaatactatgattaaaaaaatgacagaaatggtgaattactagggagcaacattggatagtttgctcatgaaaagctgctctaggtaggtgacacttacattgagtcctgaatgataaagaaatgatttaaacatctggaagaaaagcaatcctggtagagggaacagcttgacacatttttggaagagagacaaagcaagtcattctgaaacactgtgagggcgagaatggtatacaattagactggtgaggtagtcaggtgctagatcatataagaatttcaggtagagaagttaaattttctttcttagtatgatagaaatctattggtttttataaatcggactgacatctgatttgtagtttgagcggaagggaaaaaacgagtaaaggagctaaaaagtagtgtataggccaggcacagtggctcacgtttgtaatctcagcactttgggaggctgaggtgggtagattacctgaggtcaggagtttgagagcagcctggccaacgtggtgaaatcccgtctcaactgaaaatacaaaaaattagctgggcgtggtggtgtgcacctgtaatctcagctactcgggaggctgaggcaggagaatcccttgaacccggtaggtggagtttgcagtgagccgagatcatgccattggcattccaccctgggtgacacagtgagaatccgtctccaaaatagaaaaaaaaaataaaaaaagtagcacataggtaggagggtaatcaagagaaggtgtcaagaatgagggagtggccaattaggttagtaatcaacatgtcaagtaagacgctataacaaatggttattgaatttaggaacatgaaagttgatggtgtcctttacaaaagatatttcaatgggttagtgggcaaagtgaatagtaggataaatatgtaggcacagtaactataggatacatttgtttttttttttttcagtgaagaggaacacataataggacagtaggaggaccggtttgttggatcaagagtttgttttatttttatggtaatggagaagttcagtagagaagaagagcctgaaaatgccagaagtgctgatagttgtaggaaaaaagtccttgaaagggagaaagggggtgggatgagaaggagaacatcctgctgtacctttcttaacatttgtcttctctagatactttccagttaaattaacaatagaacatataaattttgctgagcgtcatagcagaaaattggcttggaatggttttaggttaataaaaaatgggagtacctgagatgtagcagaaataaatttcaccatttgagagcaaatcatttcaacacacatgtaagaatatcattttaatttcctttaaaacattttatctttcaggtgcttcaagaagatctagaacaagaacaagtcagggtcaattctctcactcacatggtggtggtagttgatgaatctagtggagatcacgcaactgctgctttggaagaacaacttaaggtcagattattttgcttagtaaactaaatatgtcctttaaaagaactataacttgaaaagtattttaaaaatttagaatgcaatttatatattaaaatacttagaatacaatatgtgtacaatatacacacactcataatcagctgaagtgctgtgatttaaagaattccataattctgatacaatagtaactaactgcggatgggtaaaatctaatactttaccagaaaatttcaattaatattaaataaggctgggaagcaggggttgaagggaggttactggttaaaaaaaatttaaatgcagacatttttctaaggcatggagtatttccatttaaaataacaattgaaagcacccatttcatcattagctgacccagtgtgaatagcttttcaatataattcatccaaggtgatgcttgtgtggttaaggcatcttgaaaaacagtccgtagaactcacagatggttgtatggtgggcctatactcttctgtatttgttttctacttgctttcattttcaccttattttctgcctttatttctttggcccaaagacatctactaaatatcggtaaatgtactgattatccctaatttgcttaaactctatctgcatttgtccatgattgcatacccctttaatggctactgccttccagcctcctcttttgtcttcaatcttctttcctcttttgatgttctcattttgcctctatatagctctgtagtgtcatgtgactttaagataatctagactagtatctaaaagggcagcattaaaaggaatcaagtggagagaaagcccttgctataacttttctttgattccatcccatcagttccttcagtcccaaaagaatccatgcttgagttctatactttatttaactattggctggaattgtcgtggaatgctctgcttccatttgactttgaaacagagatgattcttaggttctttgcaagtgatataatcttgtcttacctagtttactttttaaaagcaagaagaagaggacgagaagatggtacagaaggaggagtaaggagaaatcataaagtattaaaagattgataaagtataaaaacataaaaaaatttaacacaaataccctgggtatattataattctagggtagcttcagagactgtggactttaatatgtttaatactggactgagagggattctggtagacgtaattagaagaattacaggaaagagaaacaggtatttggatcccctaaaagaaaaacaatcatcaggactcagagaaggatcttagcaggctttttattagagcagagtctggctatccttaacttattcctcaaaacctattagtgttgagtgcccatctcacgccttctcttccttcgccctggcatccctcatcaccacaattccttcatccattgcactaaaattctgttgaaatgccatccagaggctcaaaaaggatagccagctgtctttggtaaagaggtacagatgggggaaagtaggaagggaagtccccatttagtccaataaggaagagagatgcatacttaacaccctgagttagaactctaaaaatacttccaataggatatatctgcatgtattgatttattctgtaaattctattatgatgatattttaggatttctctaactttaaaatacctttagagtcttctttggaaaaggtttgaagaaaaccaaagacaggtcagaatatatgcttagagtttctgaaagatgacatagcttatgaagtgtaatattctgaaaagtgtgctctccgataattagattctttctctcaaaggttcagcttgtccctcagcaatgttactgcagattagagtcttgtccttaactttagaggcttccaggatgtcagtgcgtagagagtctgtttcataggcagtgatgccagttaacttatttgattgagaaatatttttataaactaaattttataactaaaattggtcatttatatagtcttcagttttagaggtcattaccacatctctttctaagcattccacatcccatttgaatttttttcaacaagtactcgttatgttcttactatgtcccagggattgtgttgggtaaccaggtaagacagttaaaaaaaagaatttgtcactatctaccctggttgcgatgggtaatttgagagcctactgccttccttggaaccctggaacaatggtgactatatctcagtctccctctttgtagtagaatgctaattccttgtcatccatggtcactatgataggcaggtaggcatgggaactgcgctcttggtacatgcaatccagtataaaaatagacattaataaagtatttttaaaaatgagcaaatgttaaagaatggatgcaacttatttataaaggcaaaaaataagcttttgtgacaggaaattactctgacttagactgaactttgaacgcaacagatgattcctgaggaaagttttctttaagctaagatctaaatcatacattggaggaaaatggataaagtgtgcatgtaagtgtcatgggatccttgggtgtcactttgccagccagaaacctctgtggccggcagcacctctgtctgggttttgcttgtgcccgctgggctccttgcacccactcagcctggcaggctgtgcttggcttgcactactggcccggatccccatgcctgccaagggcaagccaggcacagagcagtaagaggtatgtgagcaagcgagcatgaggcctggccactgtgcacagacaggcatgccagctgcagcggaaggcagctacaggcaccagtactggtggcagctccatgtgaggctgtggctggaccagatgtaccacaagtagcttctgctgcaggcaccaatgtctggacaggggatcgcggtggcacctgaaagctcagagacaccaggaaccacagagccccaaggagcatgttacagcatgccacaaccctggcttgaggagccccaaggtctgggctctgcaaaaggccacagctcttctctgtttctcattgcccatagcatggtgagtggggggcatgtttcagccctgtttgtgttacagctctttttgtcctgccattcagcaagtcctgagttcttgtcccatgtccaggaagaatgaggtacatggacaactggagggtgagcaaggtgcagaggagcttcattgagcgagagaacagctctcaggataccacggtgggtagctcctttccacaggcaggtcgtcccagggagtgtgcagctgtgagtagagaggagacccatggtgggtggctcctttatgcaggcaggtcatcctgaagagtcaaggagacacaaagtaggtagctccttcctgcggctggtagtcccaatgtctaagtttgtctgagtctggggtttttatgggctcggaagggaggaggtacattctaattggtccatggacatccatggataggcccagaaaaagcaccataagttctcattctgggccacaaactccacccagaactggcagcccagcccccaggcttcaggccattcttggcttgaaggaggggtttctctgtggatctgctcctttctgcccaggagccagtctgcctcctgccaccatcaacatgccatccatgtagcctaggcagtttataccaaggggtacctgcaggcccacaccgaaccatcctcagtccccactcagcctctctcccatgctcatcagtgcccaaagtccagacgggcgcaaggcagcagggggctggcatgccagcactgtcccgagcacacacataaccagtcaggttgcgacaacacctggtcttggccgcaactttgcttctcccaggagccagtgcggggagcgaggagatgccagggagtgggagcaggcacttcttagtatgtggaggcaggggggcttcccaggcccccaagagcgcaggaatgcccaggtccggagctgtggctgggtggctgcagctgcacctggaagcatggggctcccaccctgccaactcagtagggagcagcgctcctgcttgttcctggcccttggtggctccacacagtgcacagccctggccacgcctcccttgctgcagctggcatctttgcagtggccgctccagacaggctgctgctgccatcataagtgagattggtggaggtgggtagagtttctaggatggataaatggtaaatcaagagagcgtggtttataaaaacttgcatgaaaaaagactataaaaagaccataaagaaagccttttgttcttgggagataactgtttctaataaagaaagaaggagaaacatggttaagcccatagcttatagaagatgctctaatgaaaatgtcttccaaagaaaaagcaaaaccattaaaaccctatttttaggtatgttattctgtacaagttaaaagttgagagccaactatagatgtattgaaggtctgtgtggtcatagaaccaggagaatttctgccatataaaaggcatttgaattattttgttaaaatactttaatattgaagttactgcctaatattttggagaattaaaagtatatgaaaagaatgaggctaggtacagtggctcacacctgtaatcccagcactttggaaggctggggagagaatattgcttgagcccagaagttcaaagattagcctgggcaacatagcaagactatcatatcgtattttgattttcctaataaaaataattataaagaatggataaagacagagtgtattaaggttctctagaaggacagaacccactggatggatggatggatggatagatagatgtatatatgtgtatataaaatatacatttaggagtttatcatggagaattggctcacatgattacaaggtgaagtcccatgatacgccatctgcaagctgggagaagagagaacctagtagcctggtgcagtccaagtccaaaagcctcaagaccagagaagctgacagtgcagctctcagtgtgaggccaaaggccttagagcccctgggaaatcactggtgtaagtcccccagtccaaagactggagaacctggagtcctggagtctgatgtccgagggcaggaggagaggaagccaactgccccgcagggcacaggaagagagtgagtaaacttaccaagcaagctactttatccctgttctcctggctttgttctagtctaactggcagctgattgggtggtgcccacccacattgagggtgggccttcctctcccagtccactggtccacatgtcagccttctttggctacactctcacagacacacccggaagaaacaatacttcatcagtgatctaggcatccctcaattccatgaagttgacacataatattaaccgtcacaacaagtattctattttcaagaaggaaaacctggaaaacacaattttggatcagattattaaacatgaggccatgctcactggtatggtttctcacttatctcatgcagttaataaacatatttattgcctgaaggaataatttttgcagatgagatagttttctaagaactaagctacattcgctaaaattgagtcatgtaaaccaactttatatcagatgacattaaacaatttgtagaaatactttgtggtagtattaagacaaattattttgttagacttattaaattggctgatccaatggaatggaatgaatttgaggtattctgattttcctgaaccttttagcaaagcctctgcgtgatactgtttattggtaaggtgagtctatctttctctatgagtgttcgtgggtgagtctgtgttttaatatattcctttctagtatctgatttacgtgctgaaaattctggggaaggaagccatttgaggatttagctggggctctgtgtaaagtgtgcccctgtaggagtggttaatggaatatttctgctcccatattaacttagaaggtttatagctatgtcctgaggagttagaatatcatatacaaatgttacatcctattgttttaagtcagaaaactcatgtttatagttcgaaatgttgctgctttttaaaaatgcaagtagtataaatcagttgaattagtttgagatacaaagggtctgacttcccatctatagatataaatgtaaatatatataaatgtaagtgtgtaaaaatacatgtaattttgtctatataaaaatatatgtataaatgtgtatatagttaaatttatatacatctctttatgtttctatatatatacatacgtacatctttgtgcatatgtatatatatgtatatacatacatatacataaacataagcacatatgagatagagtgcacatgcttactttgaaacaagcttgatattaaggatgatacagattcttagttaatgcaatcacagactgtgatatagtgtctagattacatgaactaataattatactctatgctgatttgaatacactgtattttacgcccacgattggtactctatcttagcaggattttctcagatggcagcatcctgtgaagaatatttgtagagtgggcgattatttaattaaaaaataactaatcatagggaaatggcacatgaacactattgtgatggtgaaaaaggaaggcactttctctatggtttttcaaaatgtcataatatcagaagcagacagaagttggtaactctggatgtcttctgcccagatctttcctgagtccattttcttctaattatcttctgaacacatccttgaagtccaaacaacacttcaaactcaacaagatgaaacttacctcactgtacattgccttcctttaaacctgctttccttactgaatttcttatttttgtcattgcactggcacttatcatgacacctgtaccagaaacctagagtcatccccaaattcatccctgtcctttcccttatgagccctttgcatgcaatgtcaaaatatttctcaaccttatcttgtatttattatttcatctttgttcttgtcaacatttctcaaggtataggccatatcataagcccccaaagtccttgccttcagtcttaccgctcttccatccaatctccacattgaagtcagtgtgggttcccaagagcctgtttaatcgttctcctttgcttaaaatcctgagtcactttccagattctgatactttggcctacaaggtatttgattacctgactcctaccagtctctatagacttgtctcatgttatctgctttatgtccctcaacctgcatttgattcatacaagctgtttctgataccctgtatgttacgacctctttgcacataccaccgggtttaaacagacgactctgcttcataagatctgctttgataatttcatctatgtatagaaaactcatttcaagttttcctccatgaaattggccactctacctagtgatgactactccctctttgtgccatgtctgtaccctaattgtgtctgtttgggcaccgatcatatacttttgcagttaatattaatgtgctttactcttttattagaatctaaattacatgagatgtgtcttacacattcttgcctgcattgtcagatacaagtaatcagtaattcttgtaagataactgaatgaacctatgaacagacggttggatataattccaagaaagatttttttgacttaaaagggagagctttttgttgtaaggtaattaagaggagaaactctagaaatagacccttcctgctctgttccttatctacagtatacctttgggcaagtcacttaaccatccttggctttagtttccccatctttaatatgaagattgtattagaacctacattatcagatatctgtaaagggtaaaagggtagttgagaagctaaagcatttaaaaatcactgaaatatagtaagcaataataatattagttactattattatcatcatcagcccagagcattcttacaatgcgataagagctgtggaaagtggtgagctgttcttcattaataatatttaacacaaactggaatctcatgttcaagtatgttttaaaagaggtgacatactgagtgggaagttagacttgatagcctccaatgtcccttccaatacaggtggagtgcaagaaaataaaaggaaatactgcccaatcttatctagtagaagcataattctccctcattctgtagagaacttcagctttaaaaagcatgattctcaaaattactttcataagaaaaaacaatctgaatataatggcaaaatataaagaagtcaaatactacattctgccaattattttgaccaacagtgataatttttaaaggtgacaaatctggataagtagacaataagaatgacagacatttaatggtaacatctctttggacattgctgttagtgtcgttaatagttttaacttgtgtaacatgagtatcacacaggttacaaagggaatgtgctatatctcagttacaaagagaatgttaaaataacaaagccacttggaaagaaaatgctatactgtgaaaggtagttgttcagaaagacgataaagtcagatttttctctcatcacctaaatgtcagttaggtaactgaaatttttatagtacatatcttcgggatagtatgagaaagaaaattttatagaatgttagaccctatcaaattaagaaatagaagttatttatgaagaggaatatggttgaaacattttgatgtttcgctctagttcctaattttatatttggtgaattaaatgcatttaaaaaaaactttaaatgtgatggaaataatccacaaagctaagcatcaacatttgttgcccaagaagcaataattataattattagattattatttttcaggagttttacatgctttgtatgtaatgccaaccctatatcacaaatgagaaagccaatgcataatgaagttaaatccaagttcatatagcttgcaggtggcaaggctgacactggtattcagatgtgtgacaactcaacctgagatttctcccaatctctcaaattcatagtagaaatttgctatgtggccttgtgaaaattatgtgatttttttcagttttggtttactaatcagcaacgggggaatacagaaacctatgtaacacagtaatgtattcgtacctgtaaatttaactcattcatgcaaatactatctatctgtataaaatgcaatatctattcatatatatatgaatagatatagcatttgcatgaatgagttaaatttacaagtacaaatatatataatataaacatatatatttatttattttagcacctgtcccactcaattgcattagtacataaatatttttctcttctagaacaacactgttctagaagagaatggtttatatatgtatatagtttatataagcagtatatatatattaacacctgtcacactcgattgcattagtatataaaatttttttcttttctagaacgacactgttcagtaaggaagttgctatacacctttggctattttgagcacttgaattgtgactggtatgcttgaggaactggattttttattttatttacttaaatataaaatggcacatgattcagttattagaaaacttttgagtatgttttgatcagctttgatatgtgcattgttttttcaactgcacattgtatcaagtataaataaatgttgaatattctaatgaaatttgaacatccaaagccaatgtgctgtaagtatacagttaacgctagatttcaatttatgttaatacacggtctgttgtaatacatttggccaatagggtgttaggtagatttgaaagaacacaatgtctggattactcaatctgttttctattctgactttataatttatgagttgaacaataaattctctcatgataaaaattatcaaatgaaactcaaagataacagtgatcataatacccaccatacaaaattacaggggaaatataagcaagtatgctggaacaataatattctttttttttttttttttttttttttttttttgagacggagtcctgctctgtcacccaggctggagtgcagtggcgcgatctcggctcactgtaagctctgcctcccgggttcatgccattctcctacctcagactcccgagtagctgggactgcaggcgcctgccaccacgcctggctaattttttgtattttctgtagagatgggtttcactgtgttagccaggttggtcttgatctcctgacctcgtgatccgccagcctcggcctcccaaagtgctgggattacaggcgtgagccaccacgcccggccacccggccaataatattctttatgaatgcaagtgttaatacatttacaaaaaatttttaagtttattgatacataatatttgtacatacttatagagtacatgtgatattttgttacactgttgtatataattatatagtcttcctactctgctatcgaacattagaacttattccttctatctaagcgtatgtacccattaaacaacctctcttcattccatccacacactcttcccagtctccagtatctatcattctaatctctagctctatgagatccaattttttagctcccacatgtgaatgagaacatgtggtatttgtctttctgtgcctgcttatttaacataatgacctccagttccatttatgttgttgcaaatagctatatttcattcctttttatggccaaataacattgcattatgtatatataacctgttatctgtttatctgttgatggttctgaaaaaaaaatgcaaactttatggtactttttaaattgaagtatcaagcaaaggacataagttataattatagcttaaagacttattacagaagtaacatactatgattccacatccagaaaaagatagtatgttaccagcaaccaggaaacctccatcaagccctatggtatcataaactcttcccatctcctcaaaggtaacatgtatcttgagttataatgctgcaggttagtcttgctatatttttaacttgatgtaaatgaaacttttatatatgcagttttttaactggcttttttcactggatactatatttgtgagattcactatgttgcatatagcattactttattaattttcatcgctggatagaattactttgtatgaatataccacattttacatattctgttcagaaaattggggttgtttccagttcggaagcattacaaataattcatctatcaacataaattgtacgtatatttttgtgtatatatgtaaacttttgtattaggtatttacctaagaatagcatttcttaatcattgggtatatgcatatttagctttcaagatattaacaaagggttttccaaagttgtataaattcatattctcaccagtagtaaatgaaagtacaaactgcttcatatcttcttgaatacttgtttgttaaactttttaatttgagcctttctggtgactttataatgtcatctctcatttttcatttgtatatactgatgaccagtgaggcggaatactatttcagttgttattggccatttaaatgaactcttctctgaaatgcctgtttttctactggattttctatatttctcttactgatttattttagtttaaaatatatatattctgggtattctttgctgtttatattacatttttctttttgaatgggtaccttgccttttcactccgtaatgatatatctcttcataaacagaagtttaaatttaacatagttcacttcaatattttctgttatgtttagtgtacttttgtcctcagtttaaaaataaaactctctactttaaaattctgaagctatggtcctgggttgctatataggaactgtttgttttacctttcgtattacaatccacctattattacaggtatgaggaagggatgaatgtccattttttcccatatagatccaactgaaacaacaagttggcactgtagaatattgaggaaaagatggtcttattgcaaagattttcaataagaccatcctttcctcaatattctgtggtgtcatctttgacgaaaatattagaaataaaatgcctatacgtgcatggatcagtttatggactctaatcagttttatttctctacttgcctgtcctcatgctaattccacattgttttaattactatagcattatgacaagttttaatatatggtaatatttttttgagatggagtttcgctgtttctacccaggctggagtgcagtggcaagatctcagctcaatgcaacatccgcctccctggttcaagcaattctcctgcctcaacctcctgaatagctgggtttgcaggtgcccaccatcatgcctggctaattttttttgtattttgagtagagacagggtttcaccatgttggtcaggttggtcttgaactcctgacctcaggtgatctgccagcctcggcctgccgaagtgttgggattgcaggcgtgagctaccaggcccagcctgtatctggtaatattgtaaaagaaaaaatgcaccagacaaacaggcaagaaagactttattcaagactactgaattatggatcaagactattgccataggagagagagatggaaatcatttctactgaaagaaagacaggagagaatttaagcactgaggagagctagtagaaaaatactggaagatattagggggttaggatggtgattaggcaatctgtgattgttaattggcacttaatgaagttaggctcctactgtcccacagagactgggagataggcgtgctatcattaacaattacatttcaaagagatggctcctaggtccttgagaaagatattcccggattgtagaagatttacatctcaaagaggcagagaatatgtttttggttgcaagtttccctaaagtaagcgctctaagaaaagagaggtcaggagcctatagtcaaataaaagcctgtctagagtttagtcacattaagtttgttttggtcagttggtcagtaaaagccattttattttcttcctttttaaagattatcttgactgcttttggccatttcgatctccatatgaattttaagaacagcttgtgaaccctgcccccaaaaagaatctgctgtggttttaattggatttcatctattctctggatcaacttgtacagaatcaacatttttattatgtaaagtctttcaatcctttcatttagttaggtctttattttctctcaataatgttttatagtttttaaagtaaaggctcttaaactttctctgagatttatttcttgggtttttatatttttgctgttatgaatatatttttgaaatttcattttctatttgtgctgatataaagaaatacagttgattttttttcttggtcttgtatccaggtaccatgctacatttacttaataatttgaatacattatctgtagtattattcagatgtacatatataggttgtttttgagtaatgacagttttctttctccctttccaattatttttcatgtcattaattttccctgacatattgtactgtataaatactctagtacaatgggagtattgtggatatttatttctcattttaagtctcagagggaagaactttaataaataatcattaagtatgatctttcctgtaggtttgttgtagataccttctgttcttaatattctaagaggttttatcactaccggatgccaaattttatcatatatttttccagaatcatttgagatggtcgtatttttcttctttattctgctatatgtcaaatcacatgacttagttttctaatgctaaaaaagcctttcttcctgtaataaactaaacctggataagacgtataatcttttttgtgtattgctagattttctttgattcatagtttttcctttacgtccatgaaagtgattggcctgttattttcctttcttgtaatatgcttgctaggtttaagtacctgattatgcaggcttggtaactggcttcataactggaatttgcaaatgggaaattttaaaattaaatttttatgtatttaatacacataaaaatgtccatttttaattggaatttcaacattacatttttccagattttccgttttggagtcagctcgaatcatttgtgtctttctaggaattggtctattgcatctaaaattacagatgtatttagataaagttctatttagtccctatggtatttaatagtagtttattagctaccattgtttgaaattgaaaaaaatgtgacatgaactaagaatttctaacctctctagagaaagcaaatgatctgatgatccttagtctgtttttctacatagtaaccagagcaggagtcaagttgccctgttttctctagcacaggctcttcatttagccacagtccccattactacctattctgttacacctacattatcttatgcattttattaggtatgtacgttagaatttgtgatttcttgtggatgaaaagttgtgatgtcaagagttggcatgagacatagagggatatttatcttctatgcacttgctttcaaataagataccttttggagcccgtgctcagtggctcacgcctgcaatcccagcactttgcgaggccgaggcgggcagatcacttgaggtcaggagtttgagatgagaccagccaacatggtgaaaccccatctctactaaaatacaaaaaagagccaggtgtggtgtctcacacctgtaatcccagctacttgggaaactgaggcacaagaatcccttgaacttgggtggtggaggttgcagtgagccgagatcgcgccactgctctccagcctaggggacagagaaagactctgtctcaaagaaaaagaaaaaaaggatacctattggaatatggccctgttgtttaaaattgtaaaggtaaaaattttcaattcttgtataaaacataagctttatcaagtatagaaaaaaatgcaaaaaaaattatcattaattgtccttctaaaatgtttcactgtgttctatattaaaattctatcatgctccagatttatcacatctggaataaaggctgatttttttatcgactgagctctaaatccttactatcacaagcatctcaataattcatcacagatttaagagcactttcacatttattgatctatctgaccctagcagttacctgtctaggagagtctgtactattatctctatttcactggtgagaaaactaaagcacagcaagattgagtttgttcacagatattacaaagttgggcaacagtagaactgaagtgggaatgcaggaagtttatactttatgtaatgattagcagattgaaagatccaaaaaagatggttctaagacaaaagttgggtggggaaagccacctattgataacgacagtagtagtattcagttttgggatatttgtgcaagacattaacctcaaaggtaaggagcccacctcaaggagctcagagtctgcgaggtataaaacgataaggaagaggaaacctcaagctaccaaggaatgcctgggaatgtgatgaatgctggaaggaacactgttacgctggaatgctccttagaactcctgctctttattttctggtatcccaattgaacagactggtgggagctggagagtacagagtttattaagctgccaaaaaaaaaaaaaaaagacattaaataatatcctgcaaagaataacagcagtgacaacaacaaaaggcttttccagatttattcattagcactttgtatactcacacaaataaataatataggaaactgactgaaatagcgtagagaagaacatgcttcttcgtgttaaaatctcactacactttcagcacaattgcaaaggcagaatttaatgaacaaatcagtcatacttaccttttaaaaataagtcctgcaaaggccacatgttcttaatctggaagtgcaagtatttgctgacgttttatgattaaacaaatacagagttacagtgtcaaatgtttttgaatcaaattataacattaagcttcacatccttgtgaagcagattagattaaatgttaaatctagtcaaacttctgctaaaacaaaatatgaaaagactccaaagggattcggcatctggatatctcactgtaggttgtgtagcacaaattagaaggcatatcttttataatgaatgccctactgaatgaataccattatgaacgagcatgaacttgtagccaaatggatctgaggtcaaatcccagacactcagtactgtggcttctgtgacctcagacaagttacttaacctatctgtcagtttcctcatctgtaacctgcccctttggaagtgacagctaaaaattccttgagttcagacaggagattattacaggatcatttaaatagaagtaagaattatacttttgaaaaaacttccagtagttgtttcataactcatcaaaataggtttatccgccctgtaccatatgttatacagtgaagatataaggtacaccattttatagtatggtgcttcagttcagtttgtagaaatgtgtaaaactgagaaccaagccatacccttggctaaacactattcagtaggactctgccacatttctgcctcataatggatttttgtttttttcaatggtttttgatgtgatttccatttcaacatcagtaagagtaagttgcttatacgttttaactgcatagttgttgataaagtaagagaaaaatcaagaaataagggattttcagagggctcattacacataaaattcatttagcagagaagtgtattatagggtcttaacctgcaataaaataagatgggttgttttctgcctccctctttcataaagccccgttgctgatgcattgtgtggtccatggcacataattgtttccgccttagtggatatacgcctgggaacactctatctcttaacgccaatactgatgggcacagtttaggtttcatattctatccctggctccagtaaattcaagggtcaccatacttaagatttacctcccaggcttgtcagattttcctcagttacctttatccaaatgttcttttagtagccatttttcacttttgaattgaaatagcaactcaaccaaacaaaggaattcagatgagaaatgtccttggcacgtacaacaatatgacatgtgaattaaatgggaggaaaaaatcctccccgttgtggatctgagcatggacgataatggagttgtgatttagtccatgaaaatgttagacgaagtgagctgacctttagcttcacttactgctgagacaaaatgagaatataaataaaaattaacttcttttaccattttgtgagactttgtaattcattggttttacatttatgtgtagaatgtttagctctataaaaatatgcattattgctaaaagctcaagggattcctatacgtaaatagaaactcagagaaacagagttgaagttacatattttttttttctctagagaagaggtttctaatcctaatacagtggttctttaaaaaatatatgtattagccccattttatccaatttcttacacttgtctaacaattttgttatagccattcaggcaatgataggaaccagcatctttgagtgattccagagctgagggatatagtcttccaattgctttgcttcattctttgtaattcaaattaaggccaatattgctaagcaataaataggtaaatccataaatttaaagcacttcgtgtattatctatttatacttgtgcatatggcatcacaaaaatgtatgggcagatgtttacagcgtatgagcaagtaatttctaattcacttttccgcttacactgagatcagtggaaagcactatgcctgccttgctacagaagtgacttagattcaattcattgagtattttctaagagtaagataggtttaagcaatagaatatgttactaaaggatatgtgttcatgctgtcttgtgttggaaacctttaaagaatatacttgaagactaaacatttattcgtaaagatttaatgggtgcctttctacagtgaatacagtaaaatagatgacccttggcagttcttagatttgatgtaagaaccatgatcaagcaaattgtaaacaacgaccaactcttaaataacttgtttcaaattaataatactttcccatacatactcttgtttaacatttgcaattctttaacgggttggtattattattcgacagacatttagccaagtatttcttgaaaaagaatccatctatcttaattgtcttttgtattactcctttgtgagggctatcattaaaaaataacatggactggtggcttaaacaatacaaacactttctcaccattctgggggccagaagttcaagaccaaggtactggcaaggattggtctcttgtgaggcctctctccttggattgcagatgaatgccttgttcctgtatcctcacgtggtctctcctctgtgttgcacatatccctggtgttttgctgtgtccaaatttcctcttctcataaggatacccatcatattggactagagtaaccctaatagactcattgtaacttaatggtctatttataggctctatctccaaatatgggcacattccgatgtagtaggtggggcatagggcttcaacatggatttcatgggacacaattgagcctgtaacatcttctcttaatatttggcatatccagatatttggtacatatttgttatataataaattcatgatcaatgaatgaatgcattgatggctgtcattaactgtaacctagatattagctgaatcataaacttgctccattatttggatataaagaacactttaagtggcattttttaaatagttatgttaaataggttgcctatgtacctaaaagagtgtttaattacagcaatccctccctccctccctccctccctccctcatccatggttttgctctccttggcttcaattactggcagtcaaccacagtcagaaaatattaaatgaaaaattccagaaataaacaattcataaattttaaattgcatgctgttttgagtagcataatgaaatcttgtgctatcccacctctgtctcacccaggactgaatcacccctttgtccagcgtcttcatgctgtcaatgttacccgcccattactcagtacctgtctaggttcttagaaacactgtcatggtatcgcagtgcttgtgttcaagtcaccctagttttacttagtcatggccccaaagtgcaagagtagttatggtggcagttcaaatatgccaaagaaaaactgtgaagggttttctttatgtgaaaaggttcccaacttaataaggcaagaaaaaaatcgcatgctggggttgctcaaaatctgtggtaagagcaagtctatccgtgaaattgcgaagaaagaaaaataaattcataaatactatatatagggttttgtactacctgcagttttaggcatccacctgaggattttgaagcatatcccctatggataaaggagaactactctattagttttttgtgactcatacagtgaacaaaactgcaatattaaatgcatcccattagtacatctcagaatttcaataaatttgaaaatgttatacaacctggaataggggatctttatttggatttgtattcccactaaaattaataaattatacatttccacctatggggttacaagcttaaaatgctgcttcagtggatactatatgtcttgtagcactagagagaagatgctatatatacttgaaagtcttttttgtttatgaatatgatgctatagcttgagtttgtcccttcttcccttgactgtcttcttcactggagttgatgggctacaataaatttcccacattttgactttgtagatctgcatcatcacgtcaggtagatggtgtagtttatacttaagagataagattttctccatttgaagcttttttctcccacaactaatctattaaccattttgttacgtgccattttacctgacatgcactgacagggtcactaggaagttagctaaaaaaatgcaagtatgttttagaaaaaacctatatatactgcttcgtaataattagatggttgaagtgactaaattcattgatttaagctcgcacatttcctgtgggtatctcgcatcactgtttgagcgctatggcttttattgtaaacataattcaaaataagttgagtagaaagtgaaactacaaaaaattaacagttacattatgctgaaagcaataacattgatatttatgaagaaaaactgaaaactcacttatgattgagctgcatataagtacatgattatgttaatactgtaggaaaatgttgactgccttctgtttacccatgcgtgtatttttttttaagtggtgatagattaaacaatttaagaaacgtgactctcctagtcacttagaaataggtggattagggccaggtgcagtggctcatgcctgtaatcccatcactttgggaggctgaggcaggtggatcacctgaggtcaggagttcgagagcagcctggccaagatggcgaaaccccgtgtctactaaaaatacaaaaattagccagacatggtggtggatgcctgtaatctcagctactggggaggctgaggcaggagaattccctgaatccaggaggtggaggttgcagtgagctgagatagtgccattgcactccagcctgggtgacaggagcaaaactctgtctacaaaaaaaaaaaaaataggtggattattttcatgatgctaatttcatttgcattgtttaaatcatgtgttaatatcctctaggtgggttaatacacatatgtagtataaagtaacatagaaattatgagaccttagacactgagtagatttttcaaaaatatgagttataaacatttttctaactctaattctatataaaataaagcacgtcaatattttatgatttctagctttaaaggtccaatatatatatgagaaaataagtttcttatttatatgaaaaagttacaaaaagttgaaaattcaggctataaagtgcatcataatgaggttgagctaactgccattttgaaatgcttcctttgcatagaaagcatcacaatatttgttttccttccaaaaatcattgatagttggtttatgttacatattaaaatagtgtgtgttcttagacattagtgacatgttaatgatatagtagtttttactcagagattgttagttttctcactagagtagtttagaaacagaaaattttaatacttttgtaataattgagaaaattgaaaaatctacatagtaatagaatttaagttactaagaattttcttctacaatccaaatggtaggcaattctcattatgcaagattgtttcaattaagagtcttttgaggcattctatttagtagttagacttttattctttagggtgtattttcaaacctaaggaaaatacaccttttacttgttctcactgcaaaatcctctctatatgtatgtctttgttatcttacatttgctatggagccattttatatagtggtataataaccacttcatattgcttgtctctttgcttttctatgaaaggtacaagacttggtgagataaagacaaatgacagtcacaccacttatttaaatgtaagcagatcagaaagagtgtcccttccaacttctagcgtacataggagactgagatactttggcaaattattcatgccatttttaataaaacgtagttaccaattgtttgctgatgctgtgcttgattgtctcttctccaggtattgggagatcgatgggcaaacatctgtagatggacagaagaccgctgggttcttttacaagacatccttctcaaatggcaacgtcttactgaagaacaggtgtgtcatgtgtgagaaactagctgtaaaagacacggggggatattaaattggaaaagtaaagatttatgtttatttattccttggaattctttaatgtcttgcagtgcctttttagtgcatggctttcagaaaaagaagatgcagtgaacaagattcacacaactggctttaaagatcaaaatgaaatgttatcaagtcttcaaaaactggccgtatgtactttctagctttcaatggtcttataaaaacccagtactgtatattatcactattatttagtctcttctatgctattgaatattaaatgtttatttttgcttggatcatagattattcaaagatgttatattgctacttttctgaattaaagtgggaaaaaactataggtggattttcaactttgtttttcaaagttgtactcttgataaaacatagcataccagaataagacttcaattaaaattaataaagtaatactaagaaatgtctgtgagcctttcataaagttctaagcagcatagttctaaaaaaatagactgacgttgattctcagaataatatgtgagagttacaagcgacggttatcctgacattgatggagtttaaccttagtttattataaaggggtacctgagactgggactgggtaacttatgaaataaagaggtttaactggctcatggttctgcaggctgtacaagaagcatgacaccagcatctgctcctggtaagtgcctcaggaagcttacaatcatggcagaaggagaaggggagccagtgtatatcacattgcaagagtggaaacaaaagagataagaggaaggtcccagactcttttaaacaaccagatttcatgtgaactaactgaatgggaactgactcatcatgaaagggattgtgctaagccattcatgagacatccgccctcatgagccaatcacctcccaccaggccctacctccaatgctgggaatcacatttcaacatgagatttggagaacagagatccaaacaatatcacctagtttttcaagcaaaaaaaaattaaagcctatcaaatgacattgattataaatacctcgagtgttttgagaatgagatttctttggcaataaatggatttcagaaaagacttcattgaagcatttggtttcagcaggaatttccaagatttaaaaaaaaaaaaaaaaactctaaagtttctcttactctgtgaattttatcatttctagtaaaagaggccggtctgatactatgagtttaatttttcacgtgacatattctactttatgatttcttaaaatttttgatagatttgattaaatgttcatttgatatgaacttttataaaacaaaatggttgtaagtagtgttccataatttcacctttattattgcattgtacttcataataatgcaataatttctaaacttaagtaaatttttccactcattttaaatacgtaccattttaccagctatttatttgtttcatacattttttttgctccataaatgctaaccctcattggtcttttaatttaaaatagattcacttatgtattacttgttattacaagctagcttattattgataagaaattattgctcaaagaatatggactttattaagtgatgtgactgccgaaaatagagttcagaaaagtaacctgtatatgtttgaaaacacgagtgcaaaaatatcagctgtatttgtagttttggcctgcagctgatggggagccattgagagtttgcaaaagaatcatatttgcatttttgtaattctttttggtaggaagatgtttgatggtacgaggactaatcagaagacctgaactaagtagcattgggcattaagataagaagagaaacattagaatgttaagatgtgatgaatgaaacttgtgataagaggcagaagtttgaaatggttcctagacatttcatttgggtgactgggttcctaggagggttattagccctaacaggagaatagaagaggaattgctggaatgacaaaaatgataattatttcagatttggatatattccgtgtaaaatgtctttgagacatccaagttaaaaatcctttccattaatcagttggtttacacaactagaatctcagaaaatggttcatgactagttattgattcagaagcaatcaaaatgcttctgagggattgtgtagagtgacacattaagtgaaacgaatagatttcagggaggaatgtctacaatcaaggagtaggcagaggataagatgttgaccaaaagattgagcagataccacaaggggaaagtggtatcacaaaagtgaggagaataaagatttcaaaaaagtaggaagtggtacacactgtcacatgccacagagaggagaggataaattcatgagggattctatcatatctagaggaatggatgcatggattacatctccttaaagcagaatattccttacaaacattgttcttctcaggcaaaatgtgaatcctttcagtaaataagtgagtgaccactgattatcaaaatgcagtcatgccctctgattaggagcgaagatatattgctagttaaatacagaatcatgtgcttcagacggtcaatcataatggtgatggtcagtcatattctgtgtgctgaaaaagtcacaagcctgcccagattcaaggaaaagggaattagatttcatttcctcatggagaaacaccaaggtcaagttatagcaaagcatctgagatgaggatattttacagccatctttggaaagtaccacatgccagaatagtacagttattttacatgatgataaattccaaatcttaatatctagtcaaagttcctgcatatattgttgactagatttaccaatcaagaaagttgttcttaggaagccacaaactgacaaaatccaaatatgttaaagctagatgagattttgcatctcatctagtgtttcttcaatctcattacacatgtaaagttcattaggaccatctactcagtttgtttccaagagaaaatcgagatcaagaaaaaacacaggatctgtatcctacaacattagtatcagacttaaaatgaacactaagacatccagactcaggtccaggcctttcaatctatttcagtagtcctcatatcagttgattccttggaaaaaataactgcaactgagaactgtcatttctaacaataatgtgcctctatgttaacatttttgtgagcagaaatcttggctagcctcagggccataaaaatgctcttttaagaaagtcaataattttccaataggattaaaatttgtgttatgtcaccttgcttgtgaacaaagagaaaatatgttttctataggtcttgtcatttgatagtttaagccaattaacaaaacctgacagctggtctagaatttgaggtaaaattcctttgctgactcaggcagtgaataagaatttaatgttcattaaaatatgtcacaatctgagacccaaaacaggtaccatctgtcaccagttttcactacatgtctaggtatagatacactgtgctaaactctcttctctttacaataagtgtaatttgtttcaaaatagtatcactgataacccatgggattgtgtcctgcttgccattgaggtgggaggtggggattatgacatttaatttgctctagatctttgggattcatatccaaatcatgtagatctattattttttataatcaaaactgatttaagttttaaactgatttggcatcagggataaaaatgaagggaaagaagaaacagtagcttttatgaggtgaattataagacttgtagaatcacgtaaattatcgtgggaagatccaagtcaagaagaaacctgttcctgagtaaatgtatttctgctgtggggactgttggcgtttgctggggaaggacagctctggggaagcagggtgatccaagagattatggtatataagggctacagaagtacttaggaattgaagatattctcaaatggctgtgggatcaaaggacatggatgaagtgctcatggtaactgagcaagttcctgtttgacttgctacctttacctcaactcctgggatggccctcaaataattaattcagacaggatcaatgcttctcaaaatgtgttcccccgaccggcagcatcagtatcaaggaaatttgttaggaatgcacattgttaggccatcttcagacctactgatttagaaactctggaagtggagcctagtcatctgcattctaacaagcctttcaggtaattctgatgttctttcaagatgagaacctctgtaatagatcaacctcccaaagtacaactggtgattagaatgaattggagcacatcttacatgtagataagtaactacacataatataggtggaaaactcaattttgccaatataggagaaattgtcttggcattattctcttatgcgtattcctgatgagagtgaggtgaaggtttcctgggccttttgtaaggatacattatcttttcacttcaaatcatcttgaacagcttatctgtctcttctccatatccactactgacccagtctgatttattgactgtaccttcctccctaccttggaggtaggtctacattcctggcttctataaaaataaagtctgtttattcttttactatcccagctggcctttgccttgtacacattctctagatcttccttttgccacctgaattttctagagctctatgggtctctggcactcatagacctatggttaattattgatatgtagaaatacatattttatgcaataattagtaacaaatcatagttatttaatatgcacatgtaagacctaagcttaaaagaatcagcatcaatggatagacaggacaaggtaattctaatgaattctatgatctaatgtatctggccccatcatggattttctttcttttcctccctcagttaataatcctgggggagttctggaactgggagatgactactgaaagacagaaaaagagagagaaactgagaccaaacaactaatctgccatcatcatttttgatactcatatctaaaatttactaggtataagtctgggttcagtgtttttgtcatacagacatataaaaattcatttattcaataatcacacaatgtaattataacattgattttactttaccttgagtgcacttttttcctaattggatttttttttttttcttgagatggagtcttgctctgttgcccaggctggagtgcagtggtgtgatctcggctcagggcaacctctgcctccctggttccagcgattccttgcctcagcttcctgagtcgctgggaccacaggcatgcaccaacattcccagctaattattgtatttttagtacagacgaggtttcactatgttggccaggctgatctggaactcctgacctcgtgatccgcccgcctcagcctcccaaagtgctgagattataggcgtgagccaccacctctaattttatttttaatggtgactttcactttcatttttgtaatgcttaccaaatgtttcttcatgtggcttaataataaaacaggaggcttattttcatttgtttaggtaccatgaggttactcataggtttttattgcaatcctcttctttaaacataattctcacactcctcttctgacatgtttccaaatcattacatattttgtttaaataatgggtagaccattcagccttacacatatggctatttaaaatagtttctaacattctgagtaagtaagtcaaagaggattgtacttagattttttttttatttttagatttgtgtctttgtgtatattgtgcctctttccatagtaaagaaaaaaaatgacactataactggaggaatatacattgaaattcaaatatggctctcagcttgggacaggtagcatcaacctttgttctagtactaatgcaaatattcacttaaatttaatggaaaactaacaagtgaattaaacaaaatgaatatgcaaaacctatctattgggctgggtatggtggctcatgcctgtaatcccagcactttgggaggccaaggcgggtggatcacttgaggtcaggagattgagaccagccaggccaacatgttgagactcctgtctcttctaaaaatttaaaaattagctgggcttagtggcatgtgcctataataccagctactcgtgaggctgacaggagaattgcttgaacctgggagacagaggctgcagtgagcagagatcatgccactgcactccagcctgggcgacagagttagactccaactcaaaacaaaaaagaaaaaccacctacctattgctaaacccccacaccgtgagttttattttgatttgaattcagtgtataatatcttaatttgtattttggtctattgcattctttcaaacttagaaaaatactgaacttattgttaaggaaaaattagagatgaaacttaaatcttgctttgtttccccttaaaaatggcatgaagactgaactataacatactccaggtgaagcagattctgagtaaaagacaaactaattgaaggagccactagagcattctgcagttcagagctatcaatgcaggtgccatgccaaaatgggctacttagattgtccttttcaggaaggtgtattgactgctctaggtttggggcactttgcttcatgggcaattggtgcatttgtgtcatgacaatttgctctgtggtatgttagttcttaaataaacttacatttgtttcggaaagacaggtatcgcgatttagtttacattcattgtatttgctgccaaatatggggttgttaagtggctgtaagataattttctcctttatttctcttccttcttctcctttgtttacagattaagtcagggagtaatgttcagtacccaggaattgaatttgtctgtgtatcaggcaaagttactgagtcaagtaaaagaaaaactgccctgatttactgatttcacataaaccacttattcctttcaaatcaaccaaagggagtttgtaaccctccacagctcacaggaactttggaaatataaatggtataaaaattgcttcataagacacataagtatttataaactctgaaaagagatgctgaagcatttatgtcatgcccagcgacttagttcttttacttaatgggctctacaattagttttaaaaaataattactcaaataaccagatgttaattgattaatggatgctacaaaaattttatggtcagtaaatcacataatgagattttatctccaaataatgaaccgaatgttaaaactgtggaaacaataatattgtaattttatccaaataatcacagcatttcagaatggcaagtttccttagccattctcattttctcagctcactagcttttcttcagtactcctggtacctgattgtcagttttcgtttgaattccgtcaggaattaaggggaaatccaagatccgtgccttctaatttccacatgttgatctctgttttgccttttgaagcaatattaccttttcacttggattttcttcaaatatttcaaggtagctcttaattacctctagtaggtctttattctacgtttgagtttcttttctcttcttttctcttcaaacttcttgggataattagatagattataactttctacctctatttttctgaacttttgatcctttgcgggcacgattgaaatattttcttatctatgcaaatgagcaaatacacgcaaaagcagattgaactatagtggtgtatggaatgcaacccaggcttattctgtgatctttcttgttttaacaggttttaaaagcggatctagaaaagaaaaagcaatccatgggcaaactgtattcactcaaacaagatcttctttcaacactgaagaataagtcagtgacccagaagacggaagcatggctggataactttgcccggtgttgggataatttagtccaaaaacttgaaaagagtacagcacaggttagtgataccaattatcatgctacagactatctcagagattttttaaacctgcattaagagagtgacattataaccctacaaaagaagcaaccagattagtttttgccctgtgtttagttaaataaaaacatgattcttttgcctgtcttgttgttggagaatggtggtgaggtagagtgctaattaactgaacttgttactgccctagagtgaatttcttccagcccaatagtaacggggaactgagtgacttagagcaggcgaacaaaatgctgggaactgtataatcacagtctaaccccaaatcagagattgctagaaccacgaggaacattagccaactccgttttactcttgagaaaaatgaaacttagggaagaaaagtaaatttttcaagagaagttagtggtaggagaactagggttcaggtcttttgatttcttggaaagttttttattagtgtagttaattatctgactattgtaccttttctgccatagactgctgatttcataaaattatgaatgtggcttagttatactaacacatacgggctgtagattatgaaaacatctcagctacatttggggtatgtggttttattataataatttttaaagatttagtcactaaaatggggtatcgttaaaagttgaacctctttttgtcttatgtagttggatggtagaataatgagtagtcattcaagatataaacattatatataatagtatttaacatattctgccacatagcctggcattataaggaataactttactcaaaattcatagctcaatgcacaggcatacacttccatattcaatagattttaggcaaatatttcctctatattgagacaagtacatggaatttgttttcttgagacctgacatctgataagtagcacttaggaaatgccttttggagacatgaagtttgtagtattgcctccaggaatacaatttaagacagcgtaataaaccagcctatatgattttcaatcacagttcaatgttacttttaatccaattttacgttaaaaaattataatttgaagaaatatgaatataaattgtaataatttcccacacaatcattacataataaaaactccatttgttttccattaaacatactttagcaattaattgacctaatagtagttttagtactatattatgattcctcctgttttatgtgatctgcccatggcttctttgcaatacattggtatttatgtaataaatacatgagacattagtcaatttgatactttttaacccaacactgagagtattcccatatgtacccattgcttccacagattattgctgccataaaatggtcagttgccgtgttaagaaagattgccattatttgataaagaaagttattttgacgtgcatcccttttaagggacatgtttagggagctgtaacagttaactgtaggtcatcttctagttcatttgcattgcatggagtggttctcaaacttgagtctgcatagtagccacctgaggagctaattaaaatgcatattcctaaacattttgctcagaaaatctcatccataagctgtgataaggacctaaaaatctacatctttactaagcctttgatacaatctgcagaccatagaggggatcaacatacactgggatctacttgaggtgggagggtgggaggaagtagatgagcagtaaataagactattggatactgggcttaatacctgggtgatgaaataattggtaagcaaacccctgtgacacacatttacctatgtaacaaaccttcatatgtactcctgagcctaaaataaatgtttaaagaaaatagacagtgatatgtgtgtgaatcccaacattctggttttccacaatgctccctgaaatgtgaaaagggagagcttcttgggaatacactatataaatatgctcattcccttggaatgggactactttttgatgaagtttgtacatgtcatcgaaatattactgatttgattattccaattggtagaaaagcatttgaagccttatttttaattccctagaaattatgagaccaccacctaggcaattgacgtgatgtcttccaacttgtataattctataataaaagaatactggttttgatttgcatggttctttatgaaataaagtccaacatgcattacagcatgtatctcttcacttgctcatagggatacaatgaagataaaatggaggcatagacaagaaagcatttgaggggaaaaaggttgagtttgatatgtaagtcatgtagttcagtgtgtctggagggctttttgtggttctctatctgcttttttttttttttttttttttgagatggagtctcactgtgtcacccaggctggagtgcagtggcacaatctcagctcactgcaagctctgcctcctgggttcacaccgttctcctgcctcagcctcccaagtagcagctgggactacaggtgcctaccatgacaccccactaattttttgtaattttagtagagatggggtttcaccatgttggccagggtggtctcgatctcctgaccttgtgatcctcccacttcggcctcccaaagtgctgagattacagacataagtcaccgcgcccggcccactatctccttttaattttattttcaaacagttacacgctcctattgtgggctagaaataaataaaaggacttaacatcatgtaagttgttttccagaacactaagcttgagtttttcttaagcttatgtttcagttttctctcattgcctttccaaaaattatgctgtcatgggattgatccaaatctttgctggctgtttttgagctcacaggaaggtagaaatggagctactcaggaaaagagaaattaaaaggaggtaaacagagacaacagcgaaatagtatcatataagagcaactgattttcttttatccatgttaaattgaccttgattaaaattacataaggagaattccaagaatatgagctgtaaggttgtgactttgaagaacaaagctcacttgtatgtacattttctataatgattgtgggagaaaaatgagtttcattaatgactactcacatgatatactcaattgtttcaaaaattcttttaaataattagtataaagaatgagcaaagttctcataatggttaaaacctattgtgaggcagggtgtggaaatcgtgattgagatgacaaggcacccagttgtactcatataaagaacactgcttgcgcgtatgattgctgttcaggtcagagctttgaggcatttttgaccttttgaagcagttgcatggcaagagatcaaaacgtgaaaaaataatcagctaggaggactgctctcttgcatttcaaactcagatttgacttgaataatacctggacacaagctgagggtatttaagttgattagaaggtagcctaagaagatagaaaatactttttttctaaatgttggagagataataactcttgctatctggaggcttacaatgagaaaagagggcaaatataccctggattgacttctttaaaaactcaaatgatcatgattccctgtaattttttataaacatacttgtaatttgtgcagttttttctaattgccttggccctgatcgatatatattttatcttgatcataattatgaaatacgatagtgacgaattccatcaacatttgcttgtctggaaaagattttattcttccttcacttatgaagcttactttgtctggatatgaaattctgccttggaaattcttttctttcacggtgttgaatattagcccccaatctctactggcttatagggtttctgctgagagatctgctgttaccctgatgggcttccctttgtaggtaacctggcctttctctctggctgtccttaacattttttctttcatttaaacctggagaattgtatgattacgtatgttggggttggtctgctcagtatcttgcattccctgaatttgaatgttgggctggcttctgctcagtgagtatcttgtatttcctgaatttgaatgtttggctggctttctagattggagaagttctcctggatgatatcctgaagtgtgatttccaacttggttccgttctccccgtctctttcaggttccccaaacagtctttgcttcagaatttacataatcccacatttgtcagacgttttgtacattcatttttattcttttctttttctctaatcttttctgcctgtcttatttcagcaagatagtcttcaagctctgagattctttcctctgcttggtctattcaggtattgacaatgtgatttcattgtggagttgtcgtattgcgtttctcagctctatcaggtcattcatgttcctctgtaaactggttattctggttatccgctcctgttacgttttatcgtggttgttagcttgtttgcattgggttagaacattctcctctagctcagggaagtttgttattatccacctttgaagcctacttctctcaattcatccatattagcctcagcacaccatctcacgccagacagaatggtgatttttaaaaagtcaagatacaacagacgctggcatggtttcagagaaatgggaatgcttttacactgttggtgggaatgtaaattagtttatccattgtggaagacagtgtggtggttcctcaaagaactagaaccagaaatacccagcaaggccgttactggatatatacccaaaggaatataaatcatcctattataaagatacatgcatttgtatgttaattgcagcactattcacaatagcaaagacatagaatcaacccaaatgcccatcaatgatagactggataaagaaaatgtgatacatatacaccatggaatagtatgcagccataaaaaggaatgagagtatgtcctttgcagagacatggatgtagctggaagctgttattctcagcaaactaatgcgggaacagaaaaccaaacactgcatgttctcacttataagtaggagctgaacaatgggaacacatgggcacagggaagagaacaacacacactggggcctgttgctgggagaggaggagagcatcaggaaaaatagctaacggatgctgggctcaatatctacctaatgggtctgtaggtgcaccataccaccgtggcacacatttacctccataacaaacctacacatccaatacgtgtaccctggaacttaaaaaaataaatgtgatagtaagaaatttattataattaatattttaaaatataatgtatgtgatttgaagcattactttcctcatttgactgaaatcacatgtgctgttgaaagggtatattagtcatatgctttacaatttggtatgctaattgtaattatcatattacgccataaattgtaattactgtatttaatatgtaatttatattaagtagtatataccaggtgctttggtgtaagcatatatatatatattttttttttcaagcgagtctaaaggttttgtagttttgtggatttttagtagaataaattgtcttctttctcaggaataaggaaagttgtatgacttattaaggttcaaatatctcattcccattttgtgaatattttgctatattgctaacaacaatttttgcaacattctcaactgtgagcacctctttaagataaaatacatatgctcagaatttgcctcttcttgtacatggcagttcatgtttatgctgtatatgtttgtgcctacattcaaggatgcccaaaaagagaaaatgattattatataattatgtgtaccttctatatcatctatatcctgatgagagatttattatgtgtgctgccgaagcaagcacctgatgggagatttaaaactcctatcaaatagtaatataaaacatagctgtaaatgataagccagtgctttttattatacccaaaatgcaaatagaaatatgccaatgtaccaagatgaaaatttctttacatgttcttcttttctgagttaattctcattctttaaagatcctctattttaacccttcataaaatattttatgttcacgttctggctgtacccattctcagagcatcattttgtagacctctttgtacaagggggatatagttgcaaatggtttgcctctcttcttttttggccagtaagtttaattaaaaatactctaaggctttttatttaaaagaccttttcattgcttcctgaaagctctccacgactagtaagcctgatgccaattaaaaaagaaaataattttttaaaatctggaattaaaataaaaataccttacttattttgtgtttccttcttacttaaggtcatagaattaactcccttaaatttgagaacatgttttgggtaattcctcaggttaaagttttattagaaaaatttgaagttgaccgagtgtggtggctcacacttgtaatcccagtactttgggaggacaaggcaggcaaatcatctgaggtcaggagtttgaaaccagcctggtcaacatggtgaaaccccatctttactaaaaatacaaaaaaagtagccaggcatggtggcaggcgcttgtaattgcagctacttgggaggctgaggcaggagaattgcttgaacccgggaggtggaggttgcagtgagccgagatcatgccactgcactccagccgggatgacagagcgagacttcgtctcaaaaaaaaaaaaaaaaaaaaaaaaaaaaaagaaaatttgaagttacatctcaaataactttggaaattaactgtatcattttgctatctccaactataataggtatttgagaatgggccttgtatatcagtgcaataggttttaccttgtaaatgcattgtctgtaacaatataaaatgtaagcactaaaaaatttaatacattcagtctgagttaactcttggaatctctcattctttatttataaatttaaaggaaaggtaagctaggcagatttctatagtggccatcgagttctaaatgtctttgatatgtttctctttgcttttatgtgaaactctggagtacttagtgaagaagattcctacttttgccactggaaaggcagctaaaaaataatgataataacatcctatccctattcaaaggagacttaattatgaaattattacactgtattcactgagtatgtcattaaaataccatacagacaaaatgctcagcatctgtatgatacgcctattatctcctgacaaaaaaatgaaataacacataaagacaaatacaagtctttttcctaagcctatacttgataatatccatccctaattatagaatgtgtttcattacttcagtgttagatggtatgtagaggaaggccagatggatcagaaaaattaaatctcattgctttgcaatttttgcaggtgcagttaattcacacagttgctcaaattccgtatttaatatgaatccagaagacaacatacatctcttctttctgatacaatttgtactaaagacaatttaaaatgaggaacaaaatacattaaattggacagacagttttacagaataaaccttcttaattatcatataatatttatttcgaagaaacaaatgacttatgatgccttctaagtatttgacaataattttgctcatgatttcaatgtcagtacttattcaagaaattttattaccttacagtaataaattaattattaatataaattaaattattattaaattattgtaataataaattaattacagtaattaatagtaaattttagttaccaggctactgtcctgaactttggcactcattgtatgctacattcagctatgggaagtcctctatacttcataagataaagcattttacatccttgtgattagtaactcagcttcctttgtgaccatctgatcttttgcccaaggattctcccaaagttcaacatataaatattttcttttgcttagagatgcaaatctttaccagatttttgtgccttgtgctaccatgcctgtggagttggtttttaagcatggctatcaattattatctaaagctgttgctatgattatgcagtatgttttaaactgcagaagtgcaattcctccatgcccattaaaacttattgatcactccaaagggttacatatacatagacagacaacgcaatgaaaagccttgatccacagttgtcaacctgattgtgtgtgtgtagtgtattttgactaattttgcacagatttcaatatagcatgtcaagagccaaacatatttaacattgagtaattcttcctatataatagttatgatgtgccattgtttacaatttcagtattctgaatttatatatgtgtgtgtatgcatacaaatacacaccccttaaaaggaaaccaccattcaaaaaagtgtacaagtgtaggagcaagtgagcatagctgataagagttggatgaatgaacattcagacttggatttatatctatgctttgctactaaaaagttttatctgcctcaacaaggtcactttcatctataaaataggaataatattagtacttactcttagggccattgtgaggtcataatagctaccatttattaaagctttacaacatagcaagggagtttttctagatcttttgaataagataatcaattcaaaacacttattgtaatgcctggatcatgcagaaagcttcataactggtacctgttattgcaagtattagtatttgcaaaataaagattttatgctaaattagtaactaatactttatagcttgaatctttctagtaagtatctaaatattcaaatactagaatatctcaaaaggcaagaagttgaaatctcttatcccagcataacaaaaaagttacaaaggcaataatatgtaaataattaaatggaaagttaaaagtttcaattaagaatatcagtcaaaaataaaaggaaaatttattagcctgttcttacactgctataaagacatacctgaaactgagtgatttatgaagaaaagaagtttgactcgttcgtgtttgtggcattatagtattccttggtgtaaatgtaccacattttctttatcttgtctatcattgatgagcattaaggttgattccatgtctttgctattgtgtatagtgttgcaatgatacacatgcatgtatctttataatagaatgatttatatttgggtatatacccagtaatgggattgctggcttaaatggtttttctgcctctaagtctttgagaaatctccgcattgtcttccacaagggttgaactaatttacactcccaccaagagtgtaaaagtgttcccttttctccacaacctcaccagcatctattgttctttgactttttaatagtaaccattctgactggcgtgagatgttatctcattgtggttttgatgtgcatttctctcatgatcaatgatgttgagttttctttcatatcgttttaggtcacatgtatgtcttcttttgagaagtgtttgtttatgtgctttgcccactttttaatgaggttatttgtttttttcttgtaaatttgtttaagttccttgtagactctggaccattgtcagatggatagatggcaaaacttttctcccattctgtaggctgtttatttactctgacggtagtttattttgctgtgcagaagttctttagtttaattagatcccctttgtcagtttttgcttttgttgcagttgcttttgccattttcctcatgaaacctttgcccatgcctatgtcctgaatcttattacctaggttttcttctaaggtttttattgtttggggttttgcatttaagtctttaatccatcttgagttaatttttgtatagattgtaaggaagaagtccactttcaattttctgcataggactatcccagcactatgtattaaataggcagtcctttccccattgcttgttttttcaggtttgtcgaagatcagatggttgtaggtgcgtggtcttatttctgagttctctattctgtttcattggtctatgtgtctgttcttgtaccagtaccctgcttttctggtgactgtaaccttgtagtatagtttgaagtcttagcttttgggctgagacaatgggggttttctggatataggttcatgtcatctgaatacaaaaataatttgacttcctctcttcctatgtgaataccctttatttctttctcttccctgattgccctggtcagaacttccaatactatgttgaaaaggagtggtgagagatggcatccttatcttgggccagttttcagggggaatgcttctagcttttgcccatttggatgtgggtttataatttatggctcttattattttgaggtatgttccttcgatacctagtttattgagaatttttaacatgaagggatgttgaattttattaaataccttttggttgtctattgagatagtcatgtggtttttgtctttagttctgtttatgtgatgaatcacatgtattgatttgcatgtgttaaactaaccttgcatgctagggatgaagcaaacttgattgtggtggataagctttttgatatgctactggatttggtttgctggtattgagaattgttgcatcagtgttcatcaatgatattagcctgaagtttgcttttctttctttctctctttctttctctctctctctctctctttctttctctctccctctctctctctttctttctttctttctttctttctttctttctttctttctttctttctttctttctttcttctttccttctctctctctctctctctctctctctctctctctctctccctccccctccctccctccctccctccctcccaggttttggcatcagggtgatgctgacctcataatataagtttgggagaaatcccttcttttcaatttttttggaatagtttcagtggaaatgataccagctcttctttgtaccgctagtagaattcagctatgattccatctggacctgggcttttgttggttggtgggatatttattattgcctcaatttcagaacgcattattgatctattcagcaattcatttcctttatggttcagtcttagaggggagaaatgtgttcaataatttatccatttcctctaggttttctagtttatgtgcatagaggtgtttatagtattccctgatggttgtttgtatttctgtagaattattggtgatattcctcttcaaatttttcattgtgtttatttgattcttctctcttttcttccttattagtctaactagaagtctaccttttttatttttatttttttccaaaaaccagctcctggattcatttagttttttggagggtttttcatgtctttatctccttcagttcagctctgatcttggttatttcttgtttgtttgctcttggtttgctagtttttttatttgagatgttaggctgttaagatctttctagctatttgatgtgagcatttagtgctataaatttccctcttaacactgctttagctgcgtcccagagattctgataaattgtctctttgttctcattagtttcaaagaactgcagaggtggcagctggtcttcctcccagaagctctgtcccagggagagatcagagctctatccattgaatcctgggtggaatggctgaagccccctcagggaggtcccacccagtgaggaggatggatcagggtcccacttaaagaagcagactggccacgatctggcaagggttgccacacactttcaaacaaacaaatctcatgagaactcttatcaggagagcagcaagggggaggtccacacccatgattcagtcccctcccaccaggcccttcctccaacactgaagacagaattcaacatgaggatttgggtggggacagagagccaaaccatatcataaaataacagcataaacaaaatgaatttaaaattaaagaatagctgaatagttcgtaattgcaactacagtcatatgctgcataacaacatttcagtcaacaatgaaccacatatatgacagtggtctcataatattattatactatattattttttacttttatttttgcttcagaggtacatgtggtggtttgtcatatagataaattgcatgtcacaggggtttgttgtacagattatttcatcacccaggtaataagcatagtacccaataagtagtttttttaatcctcaccctcctcttaccctccagcctcacatagaccaccgtgtctgttgtccccttctttgagtccgtgtgttctcaatgtttatctcccacttagaagtgagaaaatgtgatattttgtgttattgtgttagtttgcttaggataatggcctccagctccatccatgtttgctgcaaagaacacaatctcttttttcatggctgcatagaattccacagtgtatatgtaccacattttccttatccagtctaccactgatgggcatttaggctgattccatgtgtttgctattgtgaataatgcttcaataaaacatacatgtgcatgtgtctttagggttgagggatttatattcttcttggtatacccaataattgttattgctgggtcgaatggtaattctggttttcgttgtttgggaaatcaccaaactgctttccacggtggctgaactaatttacactaatatcagcagtgcaataaacgttcccttttctgtgcaaccttgccagcatctgtgattttttgacttcttaataatagccattctcactggtgtcaaatggtatcttattgtggttttgatctgcacttctctaatgattattgatgttcagcattttttcatatgaatgttttctgtatgtatgtctttttctggaaagggttcatgtcctttgcccactttttaatggtgatgtttggtttttgcttgtaaatttaagttccttgtagattccagatattagacccttgtcagatggaaagtttgcaaaatttttctcccattctgcaggttgtctgtttactctgttgatagtttcttttgttgtgtagaagttctttagtttaattaggtcccagttttcaatttttgtttttgtttcaattgtttttggtgtctttgttatgaagtctttgcagtttcaatgtccagagtggcattacctgggttatcttcttaggtttttatagttgttggttttagatttaagtctttaatccacctcgggttaatttttgtatatggtgtaaggaaggggtccaatgaataggcagtccttttcccattgcttgtttttgttgatttcattgaagaacagatggttgtaggtgtgcagccttatttctcgactctctattcttttccattggtttatgtgtctgttttttgtaccatgctgttttggttactatatccttgtagtatagtttgcagtcaggcaatgggatggttccagcttttttctttttgcttaggattaccttggctattctggctcttttagtggctccaactgaatttttaaatagtctttttcttattcagtgaagaatgttattggtagttttttgggaatagcattgaattaaaaagtgctttaggcattatggccattctgtcaatattgattcttccatgagcatagaatatttttccattttttgtgtgttatctctgagttacttgagcaatattttgtaattctcagtttagcagtgtttcacctccttgcttagctgtattcctaggtatcttatttctttttgacaattatgaatgggactgtgttcttcatttggccttagcttaaatgttgttggtgtgtaggaacactagtgatatttatacattgattttggatgctgaaactttgctgaggttgtgtatcagatcaatgagcttttgggcagagactatggccaaagtatagaacctcatcgtctgcaaacagggataatttgacttcctctcttcctatttggattgcctttatttctctttcctgattgctttggctaggatttctagtactatgttcaatgagatttgtaagagagggcccccttgtcttatgccagttttcaagcacaatgcttctggcttttgcacattcagtataatgttggctgtggactttttaaagatggttctaattactttgaaatatgttccttcagtgcctagtttgtcgaggatttttaacatgaaagggtgttgaattttataggatgccttttctatatctactgaaatgatcatgtggtttttgattttttgttctgtttatgtggtgaatcacatttattgacttgtgtatgttgaatcaacctcgcaaccctgggatagaagctccttgatcatggtggattagctttttgatgtgctgctggattgggtttgctggtattctgttgactatttttgcatctatgttcattagggacattggcctgaagttttcttttttggttgttgtgtgtctgccaggttttggtatcaggacaatgcttccctcatagaatgagttaggaaggagccgctcctcaatttttgggagtggtttcataggaatgataccagcttttccttctatatctgttagtattcaggtgtgaatctgtctggtcctgggctttttctggttggtgggctttttgttcctaatttaatttcggaactcattattggtctgttcaatgattccatttcttcctggttcaaacttggaaagttgtaagtttctagcaatttatccattgcttctaggttttctagcttgtgtgcataggggtgttcattatgaatagtctctaagggttttctctatttctgtggggtcaatggtaacatcccctttgtcattttttattgtgtttatttgagtcttctctctttttttctttattattctaggtagtggtctatctttattattaattatttcaaagaaacagctcctagattcattgaccttttctgtgcttttttgcatctcattttccttcagttcagctccgattttggttatttcctgtcttctagctttggggttagtttgctattgtttctcgttccttgtgatgttcgttttgtaattagagatccttctaactttttgatatgggtgtttcgtgccataagcttgcctcttaacgctgctttgtgtgtgtcccagagattctggtatgttacatctttttaaattttcattagtttcaaataatttcttgatttctgccttaattttattgtttacccagaggtcattcaggagcagtttgtttgatttccattttaatgtatggttttgagcaatttgcttaacattgatttctatttttattgcactgtggtccaagagtgttgttggtataattttgtgggttttaaaaaaattttctaaagattgttttatgcccaactctctatatcatatttttattgtacctttcgatatgtttggatacacaaatacttaccattgtgcctacactattcagtatagtcacatgctgtacaggtttgtagctaggagcaataagctgtaccacataggttggccgtatagtagtctgtaccatctaggtttgtgtaagtacactccacggcgttcgtacaaggacaaaattgtctaaggatgaatttctcagaatgtgtcccagttgttaagttatacatgacttgtagtgattcctaataaactggagacagtggtagaaaaaaagtattttattttattgtatgtccttttgtattctttaaatttgctttgatgtacttatgtttctttttttaaatgtgcattttttaaacaagtggaagagaagatggaaagaaagaacttcatttcttgagcatagtttgtttttcccaggcctatcaaaataacacaatcttactgcaagaagaggcacaccctggaataatatcaggatgctggcaaatgctcttccaatttttctcagaatgagaaaatgtaaattttaaagtttaaatctttttaacatatgtaatcttatgagtaagaaggttgagtatagaaaaattcttcaaatttccctgagcgtttagaaaagatagtggttactgctgatatttaccattatagagcacttattttattcagatattatatcatttaattctcaaaaccaggactggctacataatttgtgggcccagtgcaaactgaaaacaagggcttcctgttcaagacctaagaatttcaagacagtggaagcagagcttgaaaacaagcatggaagcctcctgagcaggggccctgggcaactgcataaattaccagcccatgaagctgtccttgcttgtaacacacctgtgaagaaatgtgttactcttactttaaagatgaagaaaataatgcatagatttgagataagaaccaaccagccccaaatgtcacagtgtataaactatggatctggtgtttaataattgtggagactggctccaatgcctctacttataaccactctaagaggaatcagctcccaaatgtaaagacaagtatttctaaactatttcccatttttactagggaaattaacttgcagttaaaatgaatagtattttaaaaagaaatgtattttcttttcatgatatcattttagagtcttaaatagactcataatcaaaatgaagaaaggtgactgggtaaaagtatagttagctagatacaaagattgttgaatataggtcaaactatattctattctagttttgactctgccatattaaacattttagtgaaggcactacgttattcttatcatgcttgaagttttcctcattctaatgcattgagtgacaggagtatgattccatagatcttaatatataaatagaaatgatagatttaaaacaaacagtttggcaaaactttcaaaatttttctttgcttacaaatgcaacattttgcagataatatcttatagaagaactttggaaactaaaggaatacagaaatatacactgtgcaacagaaattttctctactttctctgtcaaaaatcaaccaatgtttatgtctagcattgtttactcaatagtgtaaagcaaacgttttccaatgacattaaaatatttgaaatataatactccatccacattcatataccataatgtacttaaaccatcatctatgacatgaggttgtttccaaaagttactgttagaaagaccctataaacaaggataaatattatatctagccttcagcatcaaattaaatctaaatgttaaaatgctagctgagagaaatctgttttcataacatttaaagagaaaattacttgattactgtatgtttggtgtatgtaattattttgcatactggtatttttcacgtggcattcatcttcacaattatttgtgtgattatcatcgtccctattttgccgtaaggttcctaaatatggagtttctattttactcatttctgaatgtcctatagtgaatatatattcaataaacattagaattttatagaaaccttgtggttcagctgctgaataacttacacagttttagaattctttgattgactatggtgtccaaagccaagaaacattggttttggatgacgaatcaagttatatctacttctagcaaataactggcattatagagtttgaaaatgatatttatcagggtcatgattattagatttcaaatcttagaatatcaggtagaaatgatattcaatttactctgctttcattcagaactcaaaacaagttttaacaagaggaagtcttaatcaggcaggattcctctggttgttaagaacatctttcccaatggggaaagtttgcttgcatgctaagaaaggagctttctgtttcagggagtagtgagctctgtaataatcaggaggtcatgttaaatggccttcgtagtccctctcctgtctatatttcctaatgattctaacacataattaagtgtcaataatagttatagtcaataactataagccataaggaaatttagtacatgactgattgttttttattctgattgtatgaagtaggttttgagagtgattattaatttgttatatgtaatgagttctaccctatatttacagggtgaatgcacagttttcttatttctccatcccgaaggaaatgaagtagtatttttcaattacagtgtagtagtgattattatatagaacaattacagactcatgtcttactactcttttattaaaaatgattcatttttctttcttaaaaggttgagtatatttttaaatgccgcttcacagtatatcatgttgtcatttccctttaccctccatgggcacatgtatccaattttataagtagataccacgaaaatattaatattacagaaattaatttaagagtcaaatttttagtagcacaaatgttctatgagattggatataactgcatgaattagcttggtattttcagaatctctgcattctggtctgtatgtttaaaattaggtattttcttaatctgcaaaatattatcttctagcctccactgtatgcaaagaaagtgtgctcatggttaaaaaaatattcaaataaaaaaataaattatcttgggatcctactaaaaactgcattttctttgcaaagcaagttttctcatggttaaaaaatattcaaattacaaagtaaatgctcttggaatcctactaaaaactacattttctttttgactagaaataaaactaattttatcacgtaatggtcattttgtgttgggtgcaatgtttgagtttatattttaagctttttttagagctatgttgctttctgctttcatcttgacataacttgtcaacagacttataattaaagttgtttgaggttcagtgattcattctaaataatgaatctatggagatcctagagaagataaaacctgtgcttggcaaatgtagaaactgtaattcttagtatccttttagcctaccaaaatggaaatccttcagtccctcacataggtaaagatatgtctttaacaaaaggtagcctttttaagctatgtatgtcaaagcaatttttacttaagacatcatggaaaagattttattccttcactgttcattgccaatttggaagctgaaataagaagatcctgaggcttttcccatttcctcacatgaaaggaatcagtcctcgtgtatgaggcagggagattactacaaacccttcccttacctcttggcaaattcaggaaaattgctaaaatgaatcttgacccagccagatccctgctcctttgcttgtaaccagaggcagtttcaatgcaggcctcttgtgacttccttggaaacagaccttgcatataagttggattgccagaaggataatgattaccatcccaagaggtaacgttacaatcgtcatgagaggagctctgtgagacggagaatatgataaggaatgattgtctcaccattatatgacttgtctatctcgtaatgcccatgtattgaggtgatggcctctcatgtcttggctcacaaaatgtattattccaaagatggatgaactgttgcccccggcccgctgccaaaagtatgaacaggaggtaattgagattctaaaccaagaagtgtctccagtgatgaatatgggaactcaaatatttgaacataatcactaatttaaatcaaacaagagtagtgtgttttttagcatttgaataacattcaacataaagatatatatggactaatacatactttatgttaaccttttattgtaattttaaaagctgtttcacttatttgattaaagagtcgttcattaccaagttgaaataattttatttaaaaatgtataacataaaataatcaatgtgtatgataaccaaaaatgcattctacaaactattaataagcatttaaaatgttctaggcaatggaattggtactgatgtacgttagtaacattcatattaatgtaaacattttaaacagcatgtagaattaactatcagaatgaattatactctacatttttctcctctgcccccaccccttatttcctacagtttgaccaatatattgaaggggcgctaaattgactttcgatgttgagattactttcccttgctatttcagtgaaccaaacttaagtcagataaaacaattttatttggcttcaatatggtgctattttgatctgaaggtcaatctaccaacaagcaagaacagtttctcattattttcctttgccactccaagcagtctttactgaagtctttctagcaatgtctgacctctgtttcaatacttctcacagatttcacaggctgtcaccaccactcagccatcactaacacagacaactgtaatggaaacagtaactacggtgaccacaagggaacagatcctggtaaagcatgctcaagaggaacttccaccaccacctccccaaaagaagaggcagattactgtggattctgaaattaggaaaaggtgagagcatcttaagcttttatctgcaaatgaagtggagaaaactcatttacagcagttttgttggtggtgttttcacttcagcaatatttccagaatcctcgggtacctgtaatgtcagttaatgtagtgagaaaaattatgaagtacattttaaaactttcacaagaaatcactatcgcaacagaaagtaaatgcttaatggaaatggtgttttctggggtgaaagaagaaactatagaaactataggtgataaactactgtggtagcattttaatcctaaaagtttctttctttcttttttttttttcttccttataaagggcctgcttgttgagtccctagttttgcattaaatgtcttttttttccagtaacggaaagtgcattttcatgaagaagtacacctataatagatgggatccatcctggtagtttacgagaacatgatgtctcagtctgcgcatcctaaatcaggagtaattacagaacacatttcctgttctttgatatttataaagtcttatcttgaaggtgttagaatttttaactgatctttttgtgactattcagaattatgcattttagataagttaggtattatgtaaatcagtggatatattaaaatgatggcaataaaattttatgagtgcaaagctggcataaaaattattttaaaaggtacaatttccctttcattccagttattgtaattctaagattaagaaagaacgttaaaatctgccgtatgtttttaagcagcatatgtttagaaactcatggaacacttgacattagaatttgtgtataccagggtagagaagtttgaaaagaacacacatctaaaaataccatgtcagatgttctaagaaaaaaaataaatctagagaagttattcaaatatattatttgggatgtttagtacttctctattaactaatgacttatgacctactttgataattccaaagtaaatcactgggccttttctccctggttgtgtcagcttggctaagcaaatccactagtccaggggtcaccaaactaagacctgctaaccaaatttagcatgctgccagtttggtatggctcatcagccaagaagtgtttttacgttttcaaatggttgaaaataatcaaaagaaaaataatattttatgacatgtcaaaattacataaaattcaaatttcagtgttataaataatgttttagtggaacacagccaaactcatttatttatcacttatgattactttcgcattacaacggcagagtttgaatagttgtaacacaaactgtatagtccacaaagcctaaaatatttattacctatcctatcacagaaaaagtttggcgacccttgctccagtcaaatggctctcaaactctatgaatattagcattctttttgtggcaacaactttcaggaacttccaagcactctactcacgatggtaatagaaaatctaacaaaaattgatggagtgaaaagcataatggcacaaatccgtgaagcttttgatgaatttcttttattattcctagtaagatgtacattaacttgtttgttgtcacattaaacatgtgtttatagacaacgcttagtggacatacagatttatggatactttgcaacattccaacaaccctccaacagttctccaaacagagtaatagggacacctagttgcctaacacttttaatgtcttcaggacttgcctaatacagaaattaacagagcaagctgattcatgtcaatctctgtcttcaaaagcttattattggctcctgtttggagaatggattgtgttggaaaaaaaaaaaaagtgtgttctgacttctttttgttttcaggaaagagtggctagtggtgaaataccttctctccaaaatttgtttgtatcataagttttcggcaatttttgtatgtgcctaaatgagaagtcccattgggcacatacagaaagattcttcaaataaaagctaacataaattgaggatttattatgtgctcagtagtagattcagtgctttattggcatcgcatgtatttttcccagtaacctcccaaaataggtatggctataattactttataaaattatacacagctacagtgtacctcagacaggatttgaactgaggtagctacaaaacctgggctgtatagtaaaatgtctttttcatagatatatgactaaggtaatcctattgatttacctgaagccatcccagttacacctgttgtcccagcataattatatatagcatcaactttcactctcaagtgtgtcctgatttggacggcaaaattatctgaacacgctatatacgacacttgattgataaatttagactgaacgaagatagcaaaaaggcaaacatttaggaacaaattcattaattgataattgtctacagggtggaatcttgttaaagtattgtaatgattaaagaggcatcatgcaaatataaccataagctttatattagctagtgccccgtttttgtatcatctgaagcccactaatatttcactgaatattgaggtcttgaccatctgttgaatagtgttttatttaaatgatgtcctcttccagcttctgtgacacactaccagttgtcacccacgactctttacctgacttgttttattccttctgccttattcctatgggagtatcacacagatccatctctttgcctttctgacttcttttattttgagacagtgtcttgctctgtcacccaggctggagtgcagtggcgggatctcagcttactgcaacctccgcctcctggtttcaagcaattctctgcctcaacctcccgagtagctggaattacaggcaccctccaccacatccggctaattttttttgtattttttagtagagacagggtttcaccatcttggccaggctggtcttgagctcctgacctcgtgatccacccacttcagcctcccaaagtgctgggattacaggcatgagccaccatgcccggccttttgacttctttatctggattatctcctctcattgattcgagcctggctctaagtgactgactcccaaatcatgtagctccagatgtgacactctccctcaaattaaagctttatatctctaaagctatttccgcttgtgcatccagcaactgcctcaatgttcatcaaatgcaaacatttgttccttccaattaaccatacctacttatacattgcacacatattttagttataattcattgcctgtgtgtctagagaagtagcaaatatggaaaaaatcattgcttttggaatcagaattactgaggtttgaatgctgccctttttttttttcccaacttttagtttaggttcaaggggttaacgtgtaggtttgttacatgggtaaattgcgtgttgtggctgtttggtgtacagataattttgtctctcaggtaatcagcataatatctgataggtagttttcccatcctcacctgcctcccaccttccactctcaaataggccccagtgtctattattcccttctttgtgtccatgtgtactcagtgtttatctctcacttataggtaagaacctgtggtatttgtgaaacctgcctgttttaattactagcttatgagcgcaggcaaattacttgttatctgtgcctcagattccagtattctcactttataaaacaactgtcatgaggattaaataagcatttaatacattgcctttaaggtggtaaacattcaataaatgcagtggttcgattcttatttggtggtggagaccatagagatgatgaagatggaggaagattgtggtgggtaggaggagtagaagtgatggtgggagaggtaacgatagtagagatgatgatgatggtggtggaggtagtgatggagatggtagtcatctattatcgacagggaaaaattccataataaacattatctcaaacctaagaaatgtaaaattaccttcctgttttcctcttcaaaacagaatttaccacctgacatctctagttctgtgaatttttcttctactttcttttccttatttattataattagattgtattattgggcaagtgccatcatttccgtcatttcatgttcattcgaattgccaagtccataacctgagccatatacctcactgtggagagaactgccctcctttctaattgatttactaaaatgaatatatctaaaatgatgctttttgatgtctctccagacatgcgaattcccataaatccagatacctccaaaataaaacccaagtgcttcctatggcattcagtattattctcattctccactaattttatgtctaccttcccaataatcattattccacttcagccagtaaattacattacattcgttttgttgtatgccttcatgccactcacataaaatttctcattgcccgtcaaaacaaaggaagcctattattacacttctttatgttttacttagattccattgtagcaaataccgtggatacaataagtaaccaataaatgtttgttgagagagtgaatggtatataattcaaataattgcagtaactaaaatttgacatttcaatatcatttaaaaattctacctagctcttcctggaattgttcttaataataaacgtgaccatcctgatgatctttaataattccaattttacccattagggtatccttatttacccaaaacaattaagggatttaaaattcagctttctaccacatagtttcttaactatctaaggtacatttagtcgattcctaaataattatacagtttctacatatgttgtatttattgcataaatttttctctttacactgagatttgcaaaagtgtctgatgatcttgggtcacaagataattatttctaatagcaaattattcctgcaattcagtgatattattgtacacgtaggtaattatcagagtaaggaactcagcctagggtaaaactagatctattatctagttaattggtatttatccaggagattacttcctaatcatgtagcagttattttaagggatttttaaaaaaagctttaatttatacttttgtagcaaccaggcagaatgaatggcaaattgtttttaagtgaatgccatcttaataaagataatttcccccaagtaaagcgttcataaatgaatatctttgtcctcaaggataatgtagaggcattttgaaatgcctcagttcacctggtctgttttttccctccagggtaagcagacagaatgtaagcttgctttctcggctatttcctgcatcctaactacataggaggataaattgactgatctacatacctgaattattattatatattctacttttcagtttgtttctgttttttgtttgtttgattttctttttatggctgctgtccagatgaagttaaattgtgtcacatctctggaaagaaaatagataacagataagaccgctctgcagttttgtgagactcatgcctaaaacatttttgttttagatattgattataacttcagtttctaaactaaaatctgaaagttgtatggcaaaatataccaagttatttgaaggacctaattagataattaatgtgtccgtgaactttttttttttaatgttctatatgataaattgatcctaaaatatctgggatgttaaactcagtaatgacacttttgcctattggcacagcccatagaaacaaaacattttagatgatttgcttctttttttcctaaggagactagacttatgcatgtttacaggttaattgaggtccagaaaggttaaataacttgctttcagttgcaaaataaggactggtgctgactctcctaaatccattctagtgttatagttgcaatgtcatgttactttttatgtattaaaggaaaatgaccttggtcataaattcaaatttcgctttagacactattttttgttaaaaaaaaaaaaaaaagaaatagaaatcttgcataccatcttcacatcctcaaaaagataaccatctattaaatgttcttgagattatgttgtcttatgcatcaagaataaatcaatagcagtgttttgaagaatatagtaatgtgaattctagagaatgctatgggatcagagaatacttagaacagtaatattcaaactgcagtgcatgaaacagtatcatcacctgggaccttctttgaaatgcagatttggagggcccttcccaaacctgctgaatcagaaacactgctggtgggcccaaaaatattttacaagcactctcggtgatacttatacaccataaaatttgagaaccctcgcactggcatgacaacagtggttctcatgcttcagcatgcgtcggagtcaccagagtttctaattctaataggcgtggagtggtgcccaagaattttaatttctaacaaggtcccacgtgattctgctgctactgatttagggcccacactttggaaatcagttcactggagtgtcttgtcatttacagtctgacccctgattctctttccttatgacagcccccataaaggggctttcacgtatgtccgtgtgaagagaccaccaaacaggctttgtgtgagcaacaaggctgtctatttcacctgggtgcaggcaggctgagtctgaaaagagagtcacggaagggagataggggtggggccgttttataggatttgggtgggtagtggaaaattacagtcaaaggggatttttctcttgtgggcaggggcgggggtcacaaggtgctcagtgggggaggttttgagccaggagaaggaatttcacaaggttaatcgctcggttaaggtggggcaaaaacaaatcacaatggtggaatgtcatcagttaaggcagcaaccgggcattttcacttcttttgtgattcttcagttgcttcaggccatctggacgtaaaggtgcaggtcataggggaaaggatggcttagcttgggctcagaggcctgacaggggccatctattcctgggcaggttaagggatgctactgttgcatcttgtgacaccttactgctttatgatgaaatgatctatccatatgcttgtttcatccactagaattaaagcttccctgggccaggatccatttcttgttcgttacctgtgtgatgtcttctgtgtagtagatgctcaattcaagctgtgaatagaaatgcactatattgagaactggtcctatgagatactatatctttggatgtctggctacagtagctatgtgaaaatgtattcttccagaatgcaaggcgtaaaagaatatcaacacgaaagaagacaggatcacattcccagagctgttacatataattttgttcgttttttgagtgaagaaaatggtactcatacttattcatctaaaaggagaagcatagttgagtgcaaataaaagtcagtttttaatcagaagacctgaactatctgtattcccttacggactcctgattctttcctttaccctctcatactctacatcgagcactgaaactgctctcagcaaggtcgccagagagctccttaattgccagctccaaaggtcactcttcagttcttttccctttttgacctttgtcttgtgcttgacagaaatgattagtcccttcttgaaatttttctctcctgcagtttctgggacattgttctctcctgttttctttcagagtatatcttccctgtcttctattcctgccctttaatgtcagtctacataagactcaaattgtgattttattttcttcttatgatgctttattttttggggaaatatcatttataatctttatcatcacctatatttttgattcacaaattgatatttctacctctccctctctcctgatgttcatccctgtataattcaaatgcttataggctatgtattcctggatttctgactggaatctaaaatatagttttggagtttagatcgtataactctagagagggtcattcacatcatagtctctaagaatggtacatcctgaacttgtgcagtgagcaacctgtgcagccattcacagtggtcttgatatctgccacatcactaaatccctccaaatgtacctgttaaattctctttagtttgttatttttttctacatccttgctgccttcactctagttaaaactgaaatttttctgtatgaaatttttaactgatttctctgcctctgatctcacctctcttatccatgctttttacagcctcccgagggatatcttaaaatgcagttttaattagattattcccctgcccataaatcttgaaatgcatggcgtagaaattcttttgtgatctttagctgcctacctctccagcttcactcccttctcctctgctccttttttaaaaaaaataccagtgctactccaaataatctgcaaactttttagtaccagtccacaattgagataagaagcttgagccagaatataaatcaatgtactccttcctttgtcaagaaagttcggcaattaaaagcaaaataagatcaaatcgtttgttcagtgactcagttgatttatactctggtgaaaactcttttcttcttacagactaatagcaaacagttcactgtctgctaaagtctgaactttgttccgcactgccctatgctttagcttaaattaaccactctttgatctccaaatgctctgtgctttcttaagcttctgtttctttgtacctactgttttctctgcctaagattctctttagatacctttctttttcccattcccatgttacctgccaccgtgctactaaccaccttgtctttctggttatctaaccttgcagaggcagttctcagccatttgtgtgttttttttttttttttttttttttggagacggagtctcactctgttgccagtctggagtgcagtggcgcgatctcagcttactgcatcctctgccccgtgggttcaagcgattgtcctgcctcagcctcccaagtagctggcactacaggcaagggccaccatgcccagctaatttttgtatttttagtagagatggggtttcaccgtgttggctaggatgggcttgatctgttgacctcatgatccgactgctaaggcctcccaaagtactgggattagaggcatgagccacagtgccaggccacttctcagcctttttaacacttctattaaaacacttgccaaattgtatggtaatgactttatttttgcatgcctgtatctccagtaaacgccttgagggaagaaatcatttcttgtcatctgtacacctataatgcataaagcagaagtcagctcatagtaggtattgaataaatatttattggatgttgatgagggattttccaggttttgtgcgagtcttgtcagaaaaacaaaatcactgtgatttaaagagaggaaacgtaatataaggaattggctaagcaggtagtagaaaactgagacgcagcgcaggggatggagaggcaactcaaagcactagtaacgtaaggaagctgctaatatccctagagctggagaaacaatacagaaaaagtgatattaccagagctcagaagctggggctttctaacagagattaaactaaagttaggactgccaggcagaaaattggattgttgaagagggagctagctatccagagaaaacagaagccacagcagagatacatctgctctagaaatgccacccaaggtagttggagaagaaaaaagaccttggcttttctcttcctcccaccttccaatattctgccattgcctccaaatgaacaattaggagggcaagtggtgttgggaaatgtatatccctctaatacagaaagtacagaagaaatgtggggaatagatctgagagcagatgggcatattactgcacagatgggttctggccgtgcatcttctgctcataaactatgtgacttaagccacttaatctccccaagaatctatttcgtcacccctgaaatggaatgtatatggccttccctgtttgccctcacactgtggaaattatattacatgtgtttgtcttgaagaacgtttacatttaaaaaacaatgtctcctttccccaggagaaagttgagtttccaattattaattcagggatggtatcttcccatgaccacatttatatattattcttattctgacatcttctgagagtattcttagtaaagtcttccctggtcagaaacctgtctctttacaaatgaacacatattatgctaccacagagatataaaaatgatgccaggctgggatggcctgaattgtgtcctccctaaattcttatattgaagctctaatctccaatgtgatggaatttggaaatggagactttggaagataatttgatttagatgaggtcatgaagatagggctcttctgaggagattagggcccttataagaagacacaacaaagagcttgctggctctttctccctgccttgggaggacacagcaagaaggaggttgtcttaggctgttcttgcactgttataaagaaatacctgcaactgagtgacttacatgaaaattgatttaactggctcacggttctgcaagctgtagaggaagcatggtggcgtctgcttctggggaggtctcaggaagctttcaatcatgatggaaggcaaaggggaaacagtcacatcacatggaagaatgggacaaggagagtgagacagtgcagggggaggtggcacacatttgtaagtgagttctctcaggagaactcactatcgcaaagacagcactaagccgtgagggatccgctcccatgatccaaacacctgccaccaggccccatttccagcactggagtttacaattcagcataagatttgggaagggacgaatatccaaactataccagaggctgtctacaagccaggaagaaggctgtcaccaggaactgatcctgctggtaccttaattttggaattgtagcctatagaactgcgagaaataagtggctgttggttaagccacccagtctatggtattttgttatgtaagtgctagctgactaaaaaccggctttgttaagcaatgagtattacttctgttttgactaaagttcatagtgatgcttactaacacagtagatggattgaaacaggtcatgatgctggcagtggggcattaagtacacgtcagattgaaatggctttccacattgcactagatccttttggaacccgggttggaagttatttaaacttgaaagacccacaagcatgttgacttctcttaaactcaaggacctttcacactgagagagtttaaagtttaaattgcctcccacagggtccaagtcatcatccaatgcatggtgggtttctttgaacacttctgtagtcattatgagtccacatcatttcaagaaagaagagacagcaacattagttttcatgctaattttcctattcactcaactaatatctaatggattgctatggtatgtaaaacactccagttactttaactgtaaatctaagctttccctcaggaagcttgcacccagcataaactgtcatgaagaagtactaataaaatgttagaaaagttttaaggaagaaaagttcacttcctgcttgagaggcatggaagacttatgggaaaattagcatctgactggataattaaagagtagggaagcattgggctcaagatgaggaaagtgacaattcattgcaggggaaagcctgtatgcgaacaaaacttacatgggattaagtattcttgtttgcctccagcagaagtatgaagtaaaggaagtttagaagtaaggaatgaggttgaaaaggtaggttgagttcataataactaaaggtattcaataaaagattaaggcatgtagacttaaaccttctggtcatggggagccattgcatatttttgagagagagaaatatgatatggctactgtgaaccatatcattttgatctcacttgagagttgggagagagaggccatcttaccttggtttcatagactgggaagggggaaagaaaagttttctctaaagggccagagagtaaatattttaggttttgtgtatcataaaatttattttaaaactactcaactctgctgctatagctagaaagcagccataaacaatgtataaatgaatgagcatgactgagttccagtaaaattttatttaccaaattagatggcagaccatatttgtcccatagaacatactttggggattccggcactaatgggtaaaatgagactattttgctgttgatttttgtttatatgtttcattgtctttgttatagctgtgtttgcagtttttattcttgttattccaattgtggcttttactttatcagtcattaagaagacactaaaacaaatatgactactctcacacgtgagaaagtgagaaatggcatagggcttaaagccagttaaaaaaggatcatggaagatattaataacaatagctaatatgtatatggcttctaccaagtatttgctacatattaatgtatttcacacttaaaatagcattacgaagtaagttttattattgtcactctttgccaatgataacaatgtgtcatagaaatttcaagtgacttgctcatggtcacatagtttacaggaagcatcgcagctaggatttgaacccagacagcctagcttagggtgttgccttcggaaattcctcgccttgctatgttgtaataagttaaaggtgatttcatcaaattatttagctgaaataaaatgcttgactgggactccttaagaatttgccaaagtctatggaagctgcacttattctagattatgtctgttctacattctgaagtatcattgactctagtgtcccatggcaacacttgattatctttaaatacagagacctttttcactgaaaagatttctttaaaatttagatgtctttttcagcatcaaaaataagtggaatttccatataattgaacttttttttccaagtgcaagacttttggagctcaccatggtcttaaccacattatataataagtagtaacttttttcatctatgcttaatattttctctgatgtgagaaattgtatcatcagattagaaagttgaggattttaggaaattaagggaaattccaaggtaataataaattgggaaataaattattttatattgccattagggtacaaagtatacaactaaggatcatattttaatgaaaaatttcagaattaatatcctgatattagagacttcaatcaaattctcatataatccaagatagcgtagtcaaaaccactaaattactgtactgtgtagcaatgaacagtaattctatattgacttatccttattttttttttaagatgggtttctcgtttatttggaacaaaagaaaaatgtagtgttgtagaaatctttggattcagacagacctgttcttgagtcttgactcagtgcttcactgtgtattgaaactaaatgaagatcttcaacttttctattcatgatcaatctgcaaaaataaaagctattacagataacatacaaggtttcttgagcgattaagttttctttttgaaagcctgtgacctgattaagatgcttaaaatgatatatatgtctcttttctgttctttaaatttgaatgaaagtttggcattttaaaaaactttaggtgatttaggagtataattttaagcagatttttagagtacgagtgtccacatatttaactaaacattcaaaaattagttaaaatcaatgaacttgggaaggaaaactacttgctacataatccagaaaattttactaaattatttgaactaagcatgactctccaaactgtggacatattttctcaagggattctatgtattatggcttcaaggtacttttgtgtgtacctcaaaatggctgaaggcattttaacagtgcatctgagagtgtcttacttacatattatttgtacactattttatctatatctttggacattttatatttctgtgtaagtaaaacttccatgaaaatttcatttgtcaccatattttcgttatgcagataagaaaacgaaagaagccaaattgaagacaagctctgaaagggaatgtgcgccctctagtgacccacatttatttatcataaggacataggcagcttttgggtttcatcattttaaataaactttacatttgattttaaaatatatgactcaggattttcaacttgagtatattatattgtatgatcatagatttattactctgacaggatttcatctatcatttaagagaatatttctattaacctgtgttaaggtgattttcttgcacagaagtgtgtttcaaagggactttcaatttattgaaaatgaaaaataggctttaggcatctgtggcttagcagcattttatttcccatcctctgggtcatgcagtttttgcccacgtgttttcacactccttggctttataactaattcctctaatgtagcagtatctgacattttagaatttgtgggggtttcttaccttttaatttttaaggttgtttctctcaaagatatttaaacaaaacttataaatgtgacatctgttcaatcatgtcacactttagaaataaatattaccaatgaattttgaaatgattaagatttaataccaaattaaggtaggaagattattttaacatcatttctacctaccagacgtcaaaatattttaggtaagttttactttgtgcagagaagcaatattttacagcagttttattctcttcactgcaatcaacgattctatgggtgccaagatgaatatcaataccaaataactcagacatttttggcattaatagcttaaaacattaaatcattcaatttgtatgcaagggcatgtattttaaaaagcagaatttttaaacatactaagtatataattcggtatgccataattgataataaagaagatgtacaattttaaggacaatattttgtgcttggactagaattcagcttttgaggcacatgttaaataggcatattttaggacaaggtaaacgccacagaaattgattttttagtatcttttaaagatgcctttcagtgcaatctgaaatcattaaattttactgtactgaaacatattattttatgagtgatgtgcttaaaattacacatataaaactagaaatacatttgagaccatgcaaatataaggaaaaatagatttttgataggaatgttaatatagcagtttccactaactgaagacagagtcctctgtcatctgtcacattgttccaggtgctgtgtaaaccactgaagagtttataggctttttattataactgggaattataacatctttagattttatttaatttgattgctagatgaatagactaatgtaattggaatatgaaagccacaatataagcaaagctgatctcagtttttgtatcttgggtcaaaacctctttaattagagaggtaagtaaacatatttacaagtaatttttaaaaagcatttgtattgtagacccagaaaatctgagacaggtctcagttaatttagaaagttgattttgcctaatcctaggtactcgggaggctgaggcacgagaattgcttgtccccaggaggcgggggttgcagtgagattgtgccactgcactccagcctgggtgatagaatgagactttgtctcaaaaaaaaaaaaaaaaaaaaaaaaaaaaaaaaaaaaagttgatttttgccaaggtggaattcgcgcgcctgtgacacagcctcaggaagtcctgacgacatgtgcccaaggtggttggggtgcagcttggttttacacattttagggaggcatgagacatcaatcaagtacatttaagaaatacattggtttgacctggcgcggtggctcacacctgtaatcccagcactttgggaggctgagtcgggcggatcacaaggtcaggagatcgagaccatcctggctgaaacagtgaaaccccgtctctatgaaaaatagggaaaaaaaattagccagacgtggcggcaggcgcctgtagtcccagctactcgggaggctgaggcaggagaatggtgtgaacctgggaggcggaggttgcagtgagccaagattgtgtcactgcactccagcttgggcaacagagcgagactccgtctgaaaaaaataaaattaaaaaaaaaaaaaaaaaaaagaaatacattggtttggtccagaaaggcaggacaactgggtgggggtgggggcttccaggctgtaggtaaatttaaacattttctggttgacaattggttgagtttgtctaaagacctgggatcaatagaaaggaatgtttgggttgagataagacattgtggataccaaagttttatcatgtagatgaagcttttagctagcaggcttcagagagaagaggctgtagagtgcttcttatcagacttaaagtctgtgttgatgtaagtgtcagagaggtataatgaggcatgtctgacccccacttcccttcttggcctgaaccagtctttcaggttaaattttaagagccctggctgaggaggaagtccctttggagggggagttagccttttatttttggtttacagtatgtttttacttcaggaccagtttgataacagcttttaaatttttacaatttaaagcaagaagtcgctgaagatcgaagaaattaatttacccaagaaaataccagaaagataaaaattagggattaaaacctgtggtgcctgatttacacacacatatatagctatgttatttttttttcttttttgagactgagtctcgttctgttgcccaggctggaatgtagtggcacaatcttggctcactgcaacttctgcctccctggttcaagcaattctcctgcctcagcctcccgagtagctgggattacaggtgcccaccaccacagctggctaatttttgtatttttagtagagacggggtttcgtcatggtggccaggttggtcctgaactcctgacctcaagtgaactgcccgcctcggcctctcaaagtgctggaattacaggcatgagccgccacgcctggccctcagctcagtatatttttaaatgcacatttactttacatttaaagcaacttaaacatacacacaaacacacacgtatcacacatattacaaaatacaagacaatcatgtggccctatcttccccccttccacagagggagacacacttacactatacaaacgtgtatgtgttgtgtgtgtgtatacaaactatcttgatttggagagggaactatttatctaaatattagcttgttttcttttggttaaataggatttcccctttaataatattctgtaattccaaaaatataataattgccatgtagtcaatgcatctcaaagtcctaaaaatatttttagaactaataggatttatactgaatttcatttgatatttttataagatctatttgatgcaaattgaatttgtattctattactcgatttttttttaaagcaaatgccatgtggaaacaagcagagagggacaagttttcccagaaggaaagttgaaaggggaagagtagagagaggttgatcaagaaaaccttcacagatgatgtgcatcttgaactgagccttggaagatgaatagtaggtcatcttcaaatggttggggatttagggtcaggaaagtgcctgtatagtaatatggaattaaaatgtcttctcacttcggaaaactctgaagaagaaaggtgatttttaaaaatacagcaaagttggaaaatcttacctccaaaattatttcttctttaataccaacaaagaataattatagttttgttcctattaatgttaaaacttgcttcctagctaattaaaatgttcattaagaattggtttcataaattatctggtctaggcctagagccctgggaccctgcaatggttaacgtatttcacaggcatcagcattttcctttcaggtttctaaggatgaggcttataagtttttatgaaattctacatgctaagatgtttaaatatgtaaaatggccattcataaacctagttcactaatcaaattagttaagtctgggagcttggaggacttccactctcaaagtttacacatttgggaatgatgagttgcaacttgtatattgaaagtgactgaattaaaatttatgtaaatgtgtcatcttagtttaataggttatgtggcagtcactgtaaagaaaattaacagaacacagtgcccatcaggaggctcttctgacataattagcacagttatatagcactaattcatgtaatgttttactattgacaattcaaaattgacaacttcttaaatggcaaacatttctctagttctttgagatgtttgtatgtgtttttgcctttgaatttattttaaacatttatatacacaggtatctctcagtatttaccatatgggatgtaattaacctaatttacatcatttttatgggaaattcaactggatgaggctgagtctgtttgtacaatataatactgagaaaaattgtcactctctgaatatttggtatatatgccccaggcttttgatattttgaaacttccaaaaaatggaaggtctttttgaaaaattgtcttggtgtagtaatacacttttgccaagaaaaaaaaaaatcaaagacttacttgccctgtatgatgggactttacaagttttaatttcaggggtttctgatgagtatatttgtaaaggagaaaaaaattgtcgcttcactgctaaccataaataataacaaattgaggttttaagatatacttgaagaatagaggacagaatattcatcaataattatagaaataatcattttgtgaacagagaatgagaagttatttttttattagctaaaggagattttaagctaggtaaagttagactgcatttaagggatagagtctgataacattcggaagtacgttaagtacagagttaagtatatgaggaaagtaagttaagcactaaggaatatattagtggactgattccaaaggtgtagggacacattatgagcaacttatgatacataagttcattagcaatggttttatgtgagttgttaaagtggggaaaaaagaattattagaaacgagtaattttatgaagaagcaaaaatacatgtacagaatccaacgttgaatatggcattgaaaataagtcttcagtgttttccttgagggttttaaagaaggtaactgagttgcatctgaatgatatatttcgttcgtaattaaatacccaggctcacttagtgcaaagtatgatagaaaatgccatctgcaaagcactgggaagagtagatagcacccaatttaaagcatgaagacatttaaatcagaggtgtctgttcatttgccatgcatctcagcaaagatatctgaggaatatctagtagcagtgaaatacatgaaaactacacgacaaaccacaaaaagtgatgaagcgatagttgctaaattgataaggaataaaataaacgtgcaattgcttcttggaagccagggtctgagtaggatccgggaaggagactgagttcattgtgcattgaaaatgtcactgaacctaaaactaagcgttggatgtaggccattggcactcagggagagtacatgggaggccttgaaaccctgcctctgcttcctcttcacccttccatcctcattgctggcataaagagatgaggctatccactggcagaatattggagagaaaacaatgctagtagctgacagttaactcccagaactctaagagatggtggtacatgttaagtattagagtgtaggctgactgcacattatgtgtggacaaaaagagttttagcaaggaaatcagagatgtttgaaggaagaagtccaaatggaagcaacataaaataaatattaagattaggttaggaatagctcagagcttgaattgtgtaagaattgggttcagtgtccacctgtttcccatgaaatcaagatatcacaataatgatagaaatgaaagggaagaactccaacaggtgagaagagtccaaactcattaatatgtttctttgttccattttagaaaagaagtataacattaacctctgtgcttatgaataggttattttccttagacaaaacgctctcctcaccactgccctagtaaaatttgaaattgcctttttaaaaatctgtacatcaaaaaacgagcgtaatcactctccatacgatctttgtataaaagggaagttcacgcactgtatgtgacccctttccaaatttataaagtcagacaaaaaattgaatgaggaaagacctttctgtagaatttcacatcctgttgtttgaattgatttgaattatcagaactacgtgccaactggtgtccaggcctcccttaaaatcttcacagacagagaagcaaacagacagttaccatggtgttgactccacaaagccttctttgtgtggagataaccaatatacttggcagagcctctaggctagaagctgatttaatcctaatttacagagaaggtgttttttgattatcctcttaaaaagaccagtgtgagctgagccccagttctgtgtctaaaccatttttatcttgtcaaacaaatgcttcactaaaccaaattacttgataatgtggactaatgcattctcgtctctgttctttatggagttaatagcatgtctggcacatagtaagcacttagtatatgctttatgaaggggaaaaaaaggagacatttgaccgttttaaaaggaaacatacaattttgcctttttcaggaaaatacacctctaaaagtgttacaagatttcttctggggccgggcgcggtggctcacgcctgtaatcccagcactttgggaggccgaggcgggcggatctagaggtcaggagatcgagaccatcctggctaacacggtgaaaccacatctctactaaaaatacaaaaaaaattagccgggcgtggtggcgggcgcctgtggtcccagctactcgggaggctgaggcaggagaatggcgtgaacctgggaggcggagcttgcagtgagccgagatcgcgccactgcactccaggctgggtgacagagcaagactccgtctcaaaaaaaaaaaaaaaaaagatttcttttggaatgaaaattatttactttcaaactaaaaacaaacaactttgtttcttttttctgcagtgaattggaggtggtggtataacagttacatcaacatgcatgttataggagcagaaaggctgtgatccctttccttcctccttatacaggtcatagcagacattcctataacaaaagataggttaacaagagaaaagcatgagatatttatctaataaaagttttaggtgacatgggagccttcaaaaatgaagacccaatgacccaaaggaaaactgtttttatgcttagagttgataaagagtagacagccatgtaggaatgtgattggacaaaaagggaatgatctgatagtaatagactagggacaaccagccaggcctgtctgtgtagaattccttcctcctacacatggggtaggaccccacttgaatgagggtcttatgatctactatcaaacaaaagtatgtcagagaattttttatggctagctaatagagagaaaggtgggcaaaatacagagttataattctggcttttatggttggctttggaggagagggtttttggtttctatgacctaccttgaagaagaagaattctggttactatgactcacttcagggaagaatgtggagttaaagacaggaggggaggagaaggtcagagggaccttggttttgaggctgcttttgaggccttccagtgttctttagttcaaagtttcagcatgccaaagtgccatactttggggtatcgttttctgagcccctacagtgtgcaaacaagagcaatgtcaattcaacgcctagtagaaatctttctccaacataggcttcagcagatttctttcagctgtcatgccagcctagtaccttgaggcacgtttgagtttcagggacctctaagtagaagtgagcaatctttcttagagatagtctaaatcaaatgagggtgagactagagagattaagtttaaagcgtgaatttgaaagtgactggtggatattcctatctcatatttatgagtcagagggtatttgatgtataattgagtcagacaaataaatttcaccaaagtggcccaaatgcattatattaacaacccagttttcaaaatatttatggaagagtcagtgaaggattttattccattggaggaggaacaagaataaagaatagctctgaattactttagaaaatatgaagcgaaatttgtttctacaagtacttgaataaaagacaaagtagaatatacagttaagaggtctatgaaggccagattataaaggatcatgttgaaattttgttctttattctaagaaaaatgagaaagtctttgagtggttttacgaatgaaggtaacataatcagatatgtttttactaccgtatatttcaaagtagctagaagagaataatttgaatgtatctagcatagacaaatatttaagattatggatatcccaagtacactgatgcgatctttacaaattatacggatatgttaaattatcacatgtacccccaatctaagtacatctattatgcgtcaattaaaaaagatagaaatgataatttttccagtagtacataaaagagagagttccataaatactgcccagaggccaagtgaaaagctattgcggtatttttggtcacatttaatggcaacacagatttgggttctggctatggagacaggaagaagcatacatattcaggagacagagaatgtatgtgtgacagattagactttgcaatacattaaacatgggaaggaagagagagggttttagttggtttgctgtaacaaaataccataaactgggtagcttataaaccacagaaatttatgtctcccatttctggagtttgggaagtttaatatcaagtaactagcagatttagtgtcttttaagggcaggcttcctggttcatacttggtgctctctcactgtgccctcacacggtggaaaagaacactgatctcttcagatcattttaaggggactcatttcatgagggctctaccctcttgacctaattacctcccaaatgccccatcttttaatatcatcacattgggaattaggcttcaacatacgaacttttgtggggcacaaaattcagtccatagcggagatgaagataacaaatatgagggatggtgatgctaattactgatctggggaatactgatagagtactagtttgagggagaagatcaaactttaaaccttggcatataatgtttaaggagattttgcagcatgcaagtggagacatccaataggcagatggttatatagctgtggaattcagaacaagtgcctgaattagagatatacatatcagaatcattgataaatagattgcaattcaaggcatgatgactgatgtgttttctggtgagagatagtagagtagaagatgattggtaatgaactaggtcttgacatctagtacataatgatagggtggaggaggatggacctgcaaagaaaaaattaccaatggtcatagaaatagaaggcaaattagaatagagtggcatcatgaagccaaaggaagaaaaattacaaacggatagtatggtcaacagtgttaactgtagtcctagctacttgggaggctgaggcaggggaattccttgaacccgggaggcagaggttgtggtgagaccagattgcaccactgcactccagcctggtgacagagtgagactccgtctcaaaataaacaaatactagaaattggatggactcagatgcttgagcaaaagtaagagaataaagttcaaaatgtaggtagtgggaatgactttaattaaaagaagggaaactcaaatgtaaaagaagggaatgagaacggtggctacatatgcgggtctgatggtgtttggaaataggaagtgaaagaagttctactctgataattgcacttgtttctgtaaggtagggaacaagatcatctgagagagctgcagaaagaggatgggccagagctttgataaaaggttttaatagttcctgtagagacttagagcccaacttgggaaaaaaaaaaaaaaaaaaaagtatggcaggatgctaggttcatttgaggctgttgattattgccttagtttgggttgccccaagagtagatctgaagagaaggatttaggtgcaagcagtttatttggaaagtgatcccaggaaacaaagtagggaagtgaaataagaaaaataaagcagccaataaagtatggcacaaatatagggatcaggttactgctggaaggaactggggctcaatcatgcagggaaccccttgagacactgtgtatcatacttcaggattgtccaactgaggggcaagggagctgggaaattcaccaattccaagctctcactggttaagggacacccctaaagtattaacattccagcactccttctctgtccaatatactggcaaatagatgcttgcagatagagagacacaggaaattttatgttgggccaaagcaaaaataaaaatgttttaagacattatgatgataaatatgcataaaagatgattgaaatataattcactggtttgggtaggtaatcaaataaccatagtaggagagtatttaaggagttaacatcgctgaagagagtgtgaaagatttttacagcatataattgtactgtatattttaatcaacattatgaatgaagaaacaggaacctgatagtcaaacttgtggataaaaaatgtaggaaagataaaaatcatatatgacacaataaaaatccataaacatttgtaatgcatacacagataacttactgacattcagtgacatgggatttagaggaatcaggatccctagtctcttaatttcaagttggatagcctcgataaataacaactcaatctgtatgctatgaaccgtcaagtttctgacccatggtattgaggtcaattaacttaatttctctgaagctccatctcatcctatgggcagctggaattggtgatacctaaccaaagaattttgtgagaatataaaatgcgaatatgtttttctaagggctttgtgttccattaatttctgtatctgtttaatttttaaacaatagcctgcaacaaatgtgagaaattctaactggtttatatgattcaaagtcccaaaactggagttcaatagatcaggtcatatgtttgtgatagtaattaggttgtgatataactggtttaatgatagtttatgtgaaaaaattcctagaagttttaagtcaattgaattgcaatgtgagttgaaagtctaatattgaagtgaaaatatttattgaaatcatgggctatatcaatgaaagtattataaaccagaaagataattattcttccctgtttattttacacactgctgatatgttccctttaagtacccaatttaaggaaactaagataacaacaagccatagaatatccgttgaagtaattaagcatagggtaggctgatgatcaggtatctactgataaatttaaagagcggatttcaaatatttataattttgtatccttttgccaatatctttccaactactctccacccccaccagctcctggaaatgaacattgtcttctgtttcttttagtttgatttttttttttttttttttttagattccacttgtaagtgagatcatgtggtatttgtctttctacacctggcttatttcacttaacataatttcctccgggttcatacatgttgttgcaaatgaaaggctattcatagtcttaaaggcttaatactattccattagacacttgggttgattccatattttggctcttctatacctaaatcaccagattagaatgaataatttatccctggtggctccaaagatctcttccaaaaaaaaaaaaaaaaaaaaaaaaaaaggtttgaaaataacaggataggtgatctgatatttatggcagcataacaactcacaccaaaatgtagtggcttaaaacagcacctatttattatttctcctaattcttcaacgtaggcagtgccctttgggtatttcttttctctatgtggcatcaactggagcactcatttgtctgtcttcagctggcattgagatgggtcacagagggctttatttgcatgcctggtgccccatgcttcttcatgtggcctcttcacatggacagatcaagtttccttaaaacatgatcacctcaaggtcattgtacttcttatataattgttgtcttctcagaatgtgtgctctaaaaagtcaagctctgacatgcaagcacttctcaaaaccttacttgcagtactcttactattgtcccatttgtgatagaaagtcacgtggccaaacccagaggcagtatgattggagactacagaaaagcatgtgtttcaatggtgaccaccaacaggaattttttttttctcataaatactttccaaaaagaaaaggttatcgtgggaagtagtactttttcaaatagtggaaacattcaagcagaggctgggtaatagcttacaggatatattgtagaagtgatttttacattgaggtgaataaaatgacctctgtgatcataagactctagatcaaagctgactccaaatttgagtctacctaacagggaaaatagtgctgctattaatactaatagaggtgtcaggcaggagtctcagattgagaaaagaatgataaatgtggataaattgctttttttaatatagaagaaagagataatcaagaaataatgacttttattttttgctgtcttaggttggatgttgatataactgaacttcacagctggattactcgctcagaagctgtgttgcagagtcctgaatttgcaatctttcggaaggaaggcaacttctcagacttaaaagaaaaagtcaatgtaggttatgcattaatttttatatctgtactcattttgtgctgcttgtaaactccgtgctttgttatctgtgattctactagttgatagattaatgcgatatgataaaatgctgtttaatatgtcttaaaaatatattttagatagcaagcaaaatcaaagtttagcctagagaaatctttctggattcttctgtgactgactagggatgcctttcataaacttgccttaacttacatattatttaactataaattaacaattttatgacattaattcatgttgattcctttcatatattgttcagttacctcaaggctaggccttagcaagcttgcacaattgtgtagagtagaatagagtaaaatagaatagaataatataatagataccatacttaggactatgtctatattctcactgttatcaaaaagttattctttatagtcatcaatccctgtcatatattataagatatttaaatttcccagatatttgtgtattaccttatctaaaaggtgtccagcctttctcagtatttacatgtggtagcagatgctttgttgttgttattcccttctgagatggtataattttgaccttcacaaataggaagttttattaatttaatataaagtgtttcatctttagggaaattgtcaaggctttaatttttcaacttcaacaattataaaacatgcatctttgtatatgattggcaacagtttgtaaaataatttctaacaggcagagtaaataaaatgggcaagctaaggaagcagtgattatgaatgaaaagtaattttatccatgggaagatcacatctaaatgtgtatattagctctgctttttctctccaggattcaaatcatgaagttcaaaatccattgtatttttacaaatacgacattacctcagttacaagctaatgtttgctgttggggttggaacttttggagatcaacaaaagatatatatatattctggaaaaaaaatctattttttaggctgcttgaaaaagggaagacaattttgtcaccagttcttcttagagttaactacttataaattggaaagctattttaaattacttattagctttataagacatgctgttgtcagcattataatagactattctaaattgtttcaagaaatgggaaatatgaaaactgaaagataatatataattgtagaaaattagctaaatgtcttttttcaagtatacttctttgaaggtaaattgtttgctgtgatttttgagggaaattctcttagtagtagaaaattaattagagaacattaaactctaattttcaaacatcatgttacatatttgaccactgaaagtatgaatcacctttagcattttattagctaattaaaaatgattattgatctgattctcacaggtttctgtctgatactctgtttctttatcttaagacagctttgatcaggcaggaaaattgagtttcagtatttcaggaatataaattttaaaagttcctgttatcatgtggttacctatgaacgatttgcattttatcaatagcgggagcatgacagactaaaagtgctcaaaaatgtacagtgttttataactggttttctgataccttgtgagtcccctttatcaacctgaactctcattttctgaaataacaacatcattcttaattgcctactaaaatgggacatgaaatgatttaccttgatgtttccctcaggctaaatacaatgtatatgtattaaaaatccttgagagaaatacataattacgatgatggatattcagtttaggtatccattaattttcttactacatcacctgtcggtttatataggttattttaaactcatggcaggctcgtgtcatgaacttgagtggtattaatccatttttaggctttcattaaaaatggctaaatattaccaactcttttttttttcacttgatttcttcatttactcctttcaaatgcttttagccagttagcatatcataggccattatcagttcaatttcacatattttaaaaaatgcaacttttaaacctaagcataattttttccttgtatattcaccatgtgttttattcatataattaacaaaatgcacttatttaaaagctgacttctgggggacctttctaatcaaaatgtccctggaccaccaatattgacattatctgggagcttgtcagaaatatagaatctcagaactagtaaatcaaaatttgcctttgaacattttccaggagtgattcctatgcacataaaggctcgagaatcaatattctaggacacaatcttgggctttacgtagcagttacctctcacattcttttagtatcactgcagttcagactttttagctgaattaacagattctaacaactcgaattttttccgtgagcacatggtaacgcaaattggtaatgaaacaaacaaaaaaaatagcctcctttgatcacaaggggatttgataaggtgtctgaaaatctggagcttctgtgaggttctcttgaaaccctccctatcaagtcgttatggtcatctggctttgggctcttcctcggatctgcacttgattaccctctttcagaatcaactttttaccaactcccgctggaaatcatcaagccagttaatgcttccaatttctcctatctctgttatctgtgtttactacccagagtataggtacctcgagtctatattttcttctatctttctctctctgctctattgcactttcttttccttgcttcacttcctctgctttcccacactctcactcggcaggctcaaacactttttcaagacaagccttctatatacttattctactcatacgtggaaaccaattttaccctcgaaaacagcactatgactcatccctcttttgtacccccactactttagaatgactgactccctcacctaacagagacaattccaaagatactgctctcttcatgtaaaaatacctctttccttgcagttaatgacttctggccatctcttatctaccattttatcatattttctcattgaagactttggcactaggttagtagattttttcaaccaatttgttctttcattcttagttatttcagcatccctgtgggctctcctgctatcactaaaagctgttgtttctctcatctcctcaattcagctacctgctgtcatgattgtatgtatgtagatgttgtcattgtcaggcattactccatttctttaataagattatttttttgagacggagtctcgctctgtcccaggcgggagtgcagtggcgcgatctcggctcactgcaagctctgcctcccgggttcacgccgttctcctgcctcagcctcctgagtagctgggactacaggcgcccgccaccacacccggctaagtttttgtatttttagtagagacggggtttcaccgtgttagccaggatggtctcgatctcctgacctcgtgatccgcccgcctcggcctcccaaagtgctgggattacaggcgtgagccaccgcgcccggcactaacaacatattttaacaaaaccagcagttcttcataagctttccgtgcatcctaagtatattttcaacttagtttctctcaacaattatttcaagcttttgtggggtacctaaactttccccatcattcacagtaaatgatttcatctcctactttagtcgaaataatatttctcaaattgtgggtatttgtgctcatagtatcttttttttttttttttttccacctgccttagtggaagaggctatccttcacctggttgaggctcatctctgggtgtgtgttctcagcagcatcactgactatgtattaagccacctggttccattcagctgtatatccagattgtcaaaaatctacatcccaggtctttatcattagcttttaaaccggttgtgttttcatcttttagaacgtgtcctctcctataaacatgcatgtgaatacttaacgtgccttatcttactcaatccctctgtagaactagaacctattaacctcttttccctcatgaaattctttcctcgcttggcttatgggatactgctttctcctgattaattctttcacattcttggccatttgttccaattcagtttttctttaatattgatattcttcagagtccttgtgtttcttctctggatatcctcattcattcccattcaaatagtgtctattttcaaatgaacccttctcccatatgtatctttagctcatctctttcttaaaacccagggtgatatatctgactgcctaatagacaattttaattgatgtttgcctgatatcttaaatctcattatttccccagacctcctttattctttctccttcctttcaccctgcaaacagcctaatccagaaacctgaaagtgaactgggtcacctagatttttcttctaccattcacaagtccaatctttgacaggttcaattaatcctgctcccttaacagctcttgaaaatgtccagttctctctattcccatcaccaaaaccctgattaaagctaatatcatggcttacttctatttaagatgacaatcctgtagctggtcttccctgctactaatgttatattcctttagaagtttccacatcacctctgccaaagcgaacatattaaaacctcagtatgatcttgttatgtctgtgtttataatcatttgagaaagataaaatcagctactgatagccaggagctggcttggcacttcagttaggctttggaactgctagatgttgccttggtacttgcagccagtctgatgttctctggttgaatataaataattgctagggatgccagcatcatacagggacacgctatggttgtgatgaatcaagataaaagcaagaccactttgtaatcatatcttaatacagtaaaaaagaatagcattgtccaaaccacgcctaatgaccaaatatccctcatcttcattaatgtgacacattatgcttctttactaaacacagctttagcctctctgcattcctcctgccatctagataaaaattttaggacactcaacatagaattaccctacttccttacaacatccaatcaaaacaaagccccacttccttgatgccccctatcatgtaacacaagcccacatcttaaaataagctttttctaacatactcttagagacagccccatagttccctgtgatgcgctgtctctctcgttgcagcgtgtaaatcaggttaactttgataacctacaaatatgttccagtggtctttgtctgaagagtgttgacaaagtccatgtcttcatattgccctcttaaagcctacaatgatctaatttttgtttacttgcacaaactaatttctagccattttcatttcaattccattgttggtttctagaaatcaggacttgaacgtgaagtggctttggttttatgtgtgtgtgttttgtttttggtgtccccatgcctaacacacaaaccaataaatgtttaactatatggatatgtgatttttttcagttctgcagttgcatttaagataggatctattaccaatatgaaggatagaacaacttctgaataaacatttgagtgaataagttactcttcagtcaaagggtaaaacttcattatagaatgttaaatgagtagattcttaattacttctaatgtcggagtaggactgatagagatccataacttattttcataatgttagagaagatacagaaagaggaggcttttaagaggtgctaataaagaaggaggaacagaggtctgaaagaggttttaatcaacttattgaggaatttgtgaacttccctgtgttgtattctttgcttcaaattattttacttttcttccttttattgaatattatataacttagttgccttttattttgcatttaggttacccattttagtatttataattcttcatgatctctaagaattttcatgagcccacaataatcactcatttctgatacattgatttactgatgccttttttagcttctgtatactttacttgaaattatgtgtactaaataatttagaatccgagtagtggcttctaaacatgtgatcatatattaagcatatattgagtaaagtatttagtattctatatgttaatagcataatttaaaaactgtatgttatgaaatatagatcctttcaagattaaaaatgtatatgcatgtagacacatatatgataaacagctctatagaaaaacacacatacagaaaagctggatgacttcatgaggacgaaatttaagagaaagataatattgtcaagggcagaggtatttttatgaacatggcaatttcgaggaggtaattgtagtttttatcagtactgaatgttgtaagaagcatttttcctaacaagaagaaaattaatgactttcttttctttttttttttttttttttttttcccgagacggagcctcgctctgtcacccaggctggagtgcagtggcgcaatcttggctcactgcaacttctgtctcccgggttcaagcgattctcctgcctcagcctcccgagtagctgggactacaggcacgtgccaccacgtccagctaattttttgtatttttagtagagacggggtttcaactgttggccaggatggtctccatctcctgaccttgtgatccacctgccttggcctcccaaagtgctgggattacaggcgtgagcccctgcgcccggccaaattaatgactttcacaaaataactttttgtacagtagtgaaggctgaagtctgactgtaggtatttggagtaatattgaaatactggaatttggactaatatggtaatattagtccaaatttcattgaagatgaaatatataaaagaaaatgaagactgtggttgaagagtattcagatgatacccttggtcttgaaaacatgggaaaggggtatatatacagtatgtatgtgtatgtacatatatgtacatacacacacatagagagaggaggtggaagatcagagccatgaaataaaaacagagaggtaagattctaccaagttttgactcatggattgtatatggtactctttcttttctacttaggtattggtttattaccagtatcaggacttgagctgaagaaaagatggatgtgcccaactccctaactaatatgcagtttctagaatactttgatttaatccatccttcctttactgagcttgcagcacctgtccccatgtactggttttatggccactttatataaagctattagagttcgttatgaatttgcactttaagagagcattgtgggtaaggggagagaccataatattgtatatggacgcgttacgctaaaatagagctcgccttattatgtacctataatgtaccagccactttcatggagacttgggatagagtagagaaggatatagataaggatacctgaccttatatagtttacattctagtgggaaagatggaaatgaagcaagactaatatgtaaagcatgtggaatgttagtgataagttccaaggagcagaataaaatgagagggtatgcatgtgcttgtagacagagtggcactaaaaggcctagctgaaaaagtggcatttgatgggggaaaatgtccaagtaagtaatttagggcctttttaggcatggggaaaaataaatgcacagccgtgtaacagcagcatgcctgtagcatcagggaaaaggtaagcgtgtggctgcagcagaaaaatcacgatgtttagcagcagaagaattcagaaaggttaaggaagttaattaagatcagaccatggtaaggacttgagcttttattcagctgtcagcgagttgagctgaatcctgttgtctctgtctgctgtgttgataatatataatcagagaacaaagggtgaaatataaagacctttagtatcctattttgaaacattcatacccctcagagatgatggggtactttgtctaatgtggtagtagtgagcaccatgataactcactttctggctatgttttgaggttagagccaacaggactttgtgatggattgaatgtgaggcttgagagagagaggggagtggaggattctgtttttggcctaaacaaaggaaaacacagattgaggcctaggacactccaaagtgcgagctcagggacatgattaggaacctgcaaaggagatggaggaaaggtgacctctgaagttggaggaaaactgtgttcaagtagtacgtgaagccaaattagcaaatacttctaagaagaaaaaggaatcctctcaatcaaatcatggtgataggtaaagtgagaactgaacatcagtcattgaatgcagtagcttgggggccaatggtgagactgataagagcagttttgatgggactgagtaagagaatagatgtgagagccagtttttgtttttgttttgaaccagtttttactttgcaagatagacctgtggaaggcctatgttcctctttgttgatacacagtcacttaaaatgaggacagttatcttcctttttcagcaaaatatatctctttagactttgtttttggtttttgtgcttttctgtgctttttaatgtatatttctgtgagttaatgggagacggtagaaattttaggaactactgatccaacctacctgaaaacagaagttcatatatttcatttgaggacgaacgtatgggtggccagatcccaggagaaatggcgattttcagtgatgtttatttacttaacctttttttttttttttttttaacactttttatatgtggttatttggacatttccacgaacaaggtactctcatcatctcttgtgtcaaaaatgtttccgtggccaggcacggtggctcacgcctgtaatctcagcactttgggaggtcgaggcgggtggatcatgaagtcaggagatcaagaccatcatggttgacaccatgaagcctcgtctctactaaaaatacaaaaaattagccgggcatggttgcgggcgcctgtagtcccagctactcaggaggctgaggaaggagaatggcgtgaacccgggaggcggagcttgcagtgagccaagattgcgccactgcactccagcctgggcgacagagcgagactccgtctcaaaaagaaaaaaaaaaaaagtttcctaaatttctttttaagattattgaagttacctttaagtagaatgagcacatatttcagtttgtcgggtatagtcttagcttatgtcaaaccatttttctcagcttaattattcctagctccccattttactataaaaactatctcattttgggaaataaatagcgagcttcctttaatcccctcagaagtcccacatggtaggtatctttattgctattttacataggaaatactgaggttcagaaaggtcgaagtactttattagggacagatagtaagcagtagagacagaactgataacagcagagcaaaaagggtgactgcaggcccttttgttgtagtatcttctttaacatctctttgttatactaaattttattatttttaatcaactatctacagctgtgtctgaaatgaaatgttttctgggctcttcactgtctcattcacactcttcaaggcatacttgtatgcatattcctcttcattttgcaatgttcctcttgaaagtaatgtgccctaacagaacccagatatcgtctgaacattgacaaatatgcagataccattgactgcttctttctggggtctatgtgtctctttatgcaccagttattcagtttatttgagctgtatacagagttggtaatcagcctatagactgtcagagaccattctgagtgacccggcattccttgtgatatcttgttggccctgctgaattaatagttaaatatgttgaacatccctaatacatccaaactataagctctgtttgctctgatatatattctgatacgctcacacctttttgaataatatccattgaaatacccctagcaacagcagagcatgtctgaaagaaagctgaaattataagtagaagagcagggttctaatattgaatctaaaacttcctaatatgatgacctttgatatacgatttaatcttactgatgctcagttttctcttgtataaaatggtatacaacaatgctgatttcttctttcttacaattattatgacatacatatggaaattatgtacataaactataatttggtagtataaggaatcttattttcaatgtggctattgcattgttttcaaaattttcacaaacctctctgtgcctcacttccctcctctgtcaaaatgggaaagtaatagtacctactttatagattattgtttttgttgtagttgtggtggttgttactgagactatttatattagaataactggaacaatgtggttaacaagatattaaaggtcaaatatgattcctgagatattcaaatataagttttgttctctgttagtaatattaattgattctagtaagcttagaataaagagattatgatgataacatttagagggctattgataatttattttcaatatttataaagaccacatagtgttctcattctactttttatatcatttcacaaaaactaaagcaaaagctcaatgtagataaaatagaaacccctctgataggagaagataactctaaaagtaactcaaagaacatcactttactcagcttgttgtcattgttcctttatgtgttgtattgtggtatatattttttctttcatctgtatattgttttctggataaagttcaaattctggacaccccaaatcctcctgtctttcttgatatttacattacatatttacttaaatgtgcttattttttctcctctaagatgctcagggtgctttccatataacatttaccttttaatggagaataaatgtaagtagtgaaaaacaagtatgccataagctgctaaggacagataacttagatcacaaaaactaataagttgagaaaatagaaatattggagcttcatctaggatcttacttttaactagatgttgtagctactctattttcatggacttttcagttcaaccaacaaattagaaccatccatgattgtgcacgttcctggaaacaattcaatactgtctttgtgaaactgaatttcaagacaactcagaagttttacctgctaattggaaagggatcctgggaacataaaatcacaaaataccacaaactgggtgctttgaaattttcaagtggaatgtaagatattaaaaagtgtctgtcactttcagagtttcttaactaattagacaaaactgagttttcatttgttgcccttcagagcaccatgtaaaatgtgtatctttcagctaagagataggtatttaagaaaataaaacaaaattactaccttatagattttttttaaattttactcttaatttattctcagttttaattagtattttatatattacagctattcctgatggagtttattctgtgaatgattggcttttttttttttttttagcattttgtactcttgatattgaatccagtattcctaattcatgaaacctttttttgtgattttaatagactccatttttagagtaattataggttcacagcacaattgaacagaaggtacaaaaatttcccatataacccggctcccacagatacatagcctgccccactgtcaacatttcccactagagtggtatatttgtttcaacagatgaacttacattgacacatcattatctcccaaagttcatagtttatacattagctttccctattggtgccacacattctgtgagtttaaacaaatttacaatgacatgtatttatctttagagtgttatgcggtgtaatttcactgccataaaaatcctcaatacttttcccgttcatctacacttctctcctaatctctagaaaccactgattgttttgtagtttacatagttttaccttttccagactatcatatattcggaattggaatctagggtgaaatcctgcggtaaaatatatagccttttcagattatcttctttaacttagtaacatgcatttaagttcttccatgtctttttatggcttgatagctcatttttaagcactgaataatattccattgtctggatgtctcacagtttatttatccattcatctactgaagaacatcttgattgtttccaagtcttggcaaatacaaacaaagctgctgcagcattcatgtgcaggaatttgagtggacatatgactcctttgtgtaaatgcctaagtgcatgattgctggatcatatagtagaatgtttacttttgtaagaaacctccaaactgtcttccaaagtggctgtgccattttgcattgccaccagaaatgaatgagagttcccattgccccatttctctgtcggcttttggttttgtcagtgttcttggattttggccattctaataggtgtgtagtggtatctcattgtttaatttgtaattccctggtaacatatgatgtgaaacatattttcatttgcttatttgccatctgtatacttcctttggtgaggtgtctgttaaggatttttgcccatgttttagtttgtttgtttttgttactgagttttaagagttctttgtgtatttcggataagaattctctaccagatatgtctttcgtaaatattttctttgagcctgtggcttttcttttcgttcttttggcagcatctttcacagagcagaaccttttaacttagtactattcaacttattaattctttctttcatggatcatccctttggtggtgtatctaaaaaactatcaacaaactcaaagtcacctctgttttctccactgctatctgctaggagttttatagttttacattttactctagagtctgtgattgattcattattaattaactttatgaattatatgaacaccacaattactttcaagcagttacacaaatttctaaattcagtggaaatgtatttatttttggtatgtttatttttcatttttattttattttttataatttcaacttttggattcaagagtaaatgtgcaggtttgttacgtgtgtatattgtgtgacactgaggtttggtgctgagcatagtatccaatagctactattttggaccttttcccctcactccctccccactctagtagtccgcagtgtttcttgttcccatctttatatccatgtgtatccaagaaaacatggttttcaaccataatgctgtgttccacaaaaatatatgttcatgttattttattttatttatttatttttgagacagagtcttactctgtcacccaggctggagtgcaatggtgtgatctcggctcactgcaacctctgcctcccgggttcaagggattttcctgcctcagcctccagagtagctgggattataggtgcctgccaccatgcccagataattatgtttgtatttttagtagagacagggtttcaccatgttggccaggctggtctcgaactcccgacctcaggtgatccacccgcgttggccccccaaagtgctgggattacaggtgtgagccactgcacccagcccatgttatcatttgtacagatatattcaatgttgaaattttaaagtgaatttgtgataaaattcacaataatgtcagatatttcaccatcaaaagtataaacttccaatgaagttgatccagtgaataacatgaaagtaaataaattggaattaaataattgtaattaaaacaaaagaagggtgtaaggtttatgcctagataaacttttttgcatgtagatgttgtgttgttcaggaccatttgtttaaagactttttctccactgtattgccttggttcctttgccaaaaatcaattgattatatttatgtggatctgtttctgagctttctattctgttccattgatttacctgtctgttcttttgccaatattactctgtcttgattactgcagttttatatcaagccttgaagtcagatatcgtcaggtctcccacttaggaaactctttaaaataaatttttaagaaaacctttattcaggccaggcacggtggctcacacctgtaatccccccgccccaccccagcactgagctgggcggatgatgaggtcaggagtttgagaccagcctggccaacatggtgaaaccctgtctctactaaaaatacaaaaattagctgggcgtggtggtgcacgcctgtaatcccggctactcgggaggctgaagcaggagagttgcttgaacccgggaggcagaggttgcagtgagctgagatcatgccactgcactccagcctgggcgacagagtgagactctgtctcaaagagaaacaaaaacaaaaagctttacatttgtagctatttctttaaattagatagtcttttcagatacataaaaatatgtggattattgtataagcatttacataatttaatgtgcttagtaaatagtgttgtctagatgattactttttctctgcaactatttctgatattgccatattatatgaaagagtttccctctgtcgcccaggctggagtacagtggcgcaatgatagttcgttgcagcctactcagactactgtgctcaagcagtccttctgcctcagattcctgagtagctgggactacaggctcctgtcaccacgcctgactaattttttaaaattgtttgtttagagatggaggtctctcgattttgcctaggctgatctcaaatccctggactgaagcagtcttcctgcccaggccttctgagtagctcggattacaggcctatctcttaactatttgcttttaaaggaatgtattagatctgcgctgtacaatcacagttaacactggtcacatgtaacctttaaattttaaattatttaaaataaataaaattagattaaattaaatattcttttattttcaagtcatgctgaccacctttcaagtgctgaatacccacatgtggttattggctatcatattggatgacacagatacagatcatttccatccctgcacaaatttatactcaacagtggtgcagactgtccatgtatctgttatttgccctcccatctgtactccagtattttacctggaaatatttttttaaatgcctgtggatgtaaatgaagtcttaaaaaatagtctcatgtagaataaccttctgcctcaaattcaagagaaatctttgttataatatgattgttaagtcacaggtgtgttgttcttactatattttaattgcgttatagttatttgaatagttatgttttaggacatacacattgttatagtcaacacttcttgatgattatagtaatgtagttctactctgtcatagtttaaaatttatgtctccataggaatattattagctaaactcaatagtatgaaattctggctattgttaactgaaataattttgcatttgtggttcaaaatgtaactcttaagggaaataaaggaattcagaaagttttttgaaactcaatcttgtcttccttggaaataggagtactttgattatttttgaaagaaaaattagcctacagcctggtatttaaatatatatgtacatatattatatatttctgctaaattatttatggtagtttattttttccatcttatatacatactggattctcaatttgatttttaataccgcctatatacttattagtaatttcaatggtgtatctttaaaagataaatttcattttagttatgtgacactttatctttcattgttatgaattgcctttttactttttgcagtcttgcgttgaaatgtatcagaaactataatgtaaaaaaaagctgagtagaaatcttataattaaaagttgtagcaagtcatgaaaatggctcatgcttttattgccattttgatgtttttgatggcaaaagtgttgagaaaaagtctttagattcacgtgataagctgacagagtgaaacatcttaaggcttgaaagggcaagtagaagttataattattgtgtagattcacagtccttgtattgaattactcatctttgctctcatgctgcaggccatagagcgagaaaaagctgagaagttcagaaaactgcaagatgccagcagatcagctcaggccctggtggaacagatggtgaatggtaattacacgagttgatttagataatcttcttagggatttgataaacacataggttcatatttatcagctgaattatatcagacaagcacttgttaaatacaaatttaaattaaaaggtgtttgtatgttttttattattctttttttaatgctaaggaaattattaggagaaattcaactttgagttcattggaagaaaatgggatgtggtagaatattttatcagtctgtagcagagaaataaattttaatgcaaatctgctagaatttatccaaataatttaagaaaataaggttaacagaaatttgaaaacattaacagtcatgttatatgtgtaaaactgatcatcatctgattttaaatcatttttgcaatatgtttttccaaacactaaaattatatggaatgttttaccgtcattcctgttttgtaataatatatatgacattttctgtgttactttttatcacttcctctcatttaaaaaagaagtctcttcgggataacctttacttttaagtaacttttttagagtgagataaaagcacaaagctagccaagtttttgtctttctttttcaagaataaattaaaattaatcttttctaatactcagtgcctcaaaagttatgtgtaccaaatgtgtcattgacatgatatgtaaacaaccttctttcaaattatcattgctatactactatatttccagataaaattttacgaaaatcagggataatgctatttccaaataagattatttttcattttgtagaagacgtttacaagaacatcataaataaatacaacaaatgtttttgttgtgcatgtcagcttttttcagaatctgcctgcattttggggcataaattctgtgtataagttattttttgccttaattgcaaatttggcattcaaaagttcagtggtcttcctagaaaatcaattcattttcttcttctaatgagtcccatgactgactgtatttggttaaaaatgaaaacaaacaaatataacaggtgagacttgagtgaacaagtttaagaacaggtaatgaaaataccagtagatttttatttagatgtatgttgcttggtaattttaactgatcaacttaacagcatattcatgttaaataaaattatgtgatctaaaaatattctcctagttgttatgtaagttccccctagaaactgtattatcactttttcattttaataagctgatgcaagagctatactttaaatggtctcatgtcatagttatatatcaagcttacctacactgaattaatcagaaataatttaaacatttagaaattacgggaatgatttttaatttttggtaagtaaaactacatgcaggatttaaatgatcgtgtgactagtgagaatattaattttcttgattatttccctcatagttctaatttttggaggcatgtagaaaagtcaggacacatagtaggtgcttagtaaatattaattgaccagattctgtttagaaaagcaaaattaaggcagtcgttgaggtaataacgttggtaattttggtgtgaaaataataatccatctgaaggaaaatgctaactttggcagataccagggaacactggggggtaggggtgtgatttgagacattcctgtttggttgactgtgttaatcaaattttatgctacccttttgttctaccagtaaagatatggtcgaactgatacgtcattaggctcaagtttgggccataactaggatgactacttaaaatgaccatagctctgtttccccattaaataaaataatttatgaaattacttaaaggctcaaatattctaacttatctatttgttccgtttttgtcgttcaaggaacaaattgcataatatttattttctgtgattgtgcaaattgtgagataagctagacacatattaagtgcctgaagtaccccttcaggtgtatttcagagggactgctaccctaaatcataatagctcctttagtatagagcccaaaagtacagttgagtggtgtagctcatgaagctgaaagacaaatgaagctttctgtaaactaggagtccagcaattattgcattaaagctcttaaatttataagtccagaatcttccttcccaagcttaggctatggagatataataaatctcacaaccacgtaagacacatacattcttgccctttttgtatagaaaggaaaatgagagctgaatcagtgtgcttcatttaggacctcatgtaaatggctgttcctcttaaccacgtatagtttcctcagaagttaagataaagatgaaccactcttgtataaaccactcatattattatgccactaataaaaatatgtgcgtatatatttataaatttgatgtgtgcttaccacagtgaaaatatttaacatatattcatagtgtaaaaatatgtagaatagcataagtatagctattatagattttaaaaaattctgtgaactatattttatatgtatctatactggtatatgcatagcaaactgaattttctacttaaaataatttgccctaagattaaactactttttaaaaatttagaataattttgtaattcatcagtttgcttttagaatgaaattccaagatggaaaaaataatttctcataacttaaattttacttcagttttgacctgaaatggtacatcagacatatttccaaatgatttctgtccgtttctaaatgtctatgaagcattgaagattcaacatcacttaagtaatgcagaaaacaaaatctgtttgtcctgaaggcaatttgttgaaggaatttaagacatatgctgagaagacaggatagggtgttaaggttgttgaaagtacaaaatttaccatggttacaatgtagaagggaacctcatttgatggtgcaaagtattgttaaaaatcagttgtacgttctagaaacagtatgtctagtaacatatgtacagtttttcagtgtcacatacaagttttatgatcaattggaagatactttttattttcactgtattttatcaaatgtgaagagttgtatgcagaattttaaaacagttaatattaaccatatcattaattttacagcaataatttgtatattaagagtttattgaccgtaagagattcttactaatttatttggaatttttaaccaaagaaatgagttggccaaattccttgcctgctttaaaactatacatggacgttttccttatggatgttccagttcttttggtcagagtagaagtgatctttcacgatcatagactaaaaagagaagctactaaaaggagagtgttaactaaaaaaaaaaatcacgtttctggcattttggcatgaaattttggtataatttttaactgatttatctctatcttagctgtattttttgtttgaactaacattaaaattaatttactgttcttatgtcagcattaattggttggataaatgtgacagaatattggatggtgcaaagtacctctttttactagagacatttttggatagctgtaattttcatgcagcttaccgtcaatatgtaagctttggatcataaccctggtctcaggaaactgttaacttaatgagggcaagtgagaggctagaccaggtatctagtgatgtatttatatattcatgtagctgtgcatattgaaaagggagtttccaaattctttattttactttttaagaaagatgtgatataactttaaggtttatttttacatttcttaatttaaatacaaaatgttataaataatttagaaatttagaaaaatttagccattaaatatagtaagtaatctttctaatgctttaataatattgctaactaataatggttttctaagattttaatttgaacagtctttaaactgatgcctttcatgaccaaggcctttcagtgtattattgagattgtggagttttaggacaacctagggctaaaataatatacatatgattatacctaaacatatgtctgtttttatctatttaggattagacgtaatcctttttgtaaaacagtgttctcgcatgagtacatacagtctcatcaatcaggcataacacaaaaaagcctagtttagataaactggttttccatattaatactgaaattaccaaaagatgaccatatcaaaacatttatttgaaaacatatgtaggcgtagctcaggttctcgttctttagtctctaagatcctttcaccataatttctagaggagatactataattatgtaatagggttagttaaattgtgattcattttcaatttctatttgtagttttctgtgtgttaattaagagtctaaggacagtcacatcaaggacatgtttaaataaaagtagtaattattagtatattagactaaagaacatctcaaaactatcattccctgagtgctagattatagtgtttaaggtgatacctgataataagtatgctaactgttgtaattaaatggcacagaatgataacactgacgagagctcttcttatccataacattaaccaagtaactatctttttttcttgtattttggttcatagctcattagataatttcacatgaattatgttatttgaggtgggcaaccagattttgtcagatgggtgagggtagggattatggtcagtctggctcatctcaaagctaaaactctcatgatcactggaaaaactttcagtagcagcaagtcttctaatcatatattttaatggcaagacatattgcaaatagtctgtatacaaatgtggcatggagactgtaccacttgtagtagcccagccccttcatcatgaatgagtagccttccacagttgcatatatttcctcttctcttattccttcctcagtactgggcagtttgatttatatttcttctttctccacatgacacttagtataatgctctacacagagttcacattcaataaatgtttttaattgacaggcacatttttcttcgtttaagtctaatctccaaaaggaagagcctctgtgggtgtgtgtgagcacggcgtgcatgcacgggtgaactcgcatgcgcagacatgtgcgtgtgtgtgtccatgtgtgtgaaagaaagagactgttgttgtcactgttgttgtgggaaatgagtggccaaaacaaatatgagtaaaaatctgactttttttaattttatgatgtttgaaaataaaaacgcaaaagggctatattagtaaaatttatattgccctcactaggggtattacttttatatatactattaatttttaaaagctattactttaagtcagtgtggtcacagaaacctctaaaatttagcctcagaacttgtcttcacaggttttgaatatctctatattacattttagactattacattgaatgctaaatggacttgtaataaccctcacttaaagttcagcaaaaataggagactgtttattagcagctttattttaagtttctattccaaatattcttttaattcaagagctctggaaacacttgttttgtgttattctaccctggcttcatggctaatgatgaatatacttgatgaggaatacttcactttaagtggcagttctgaagtacttgcatggaaggtggtgcacatttaacattattctaacagtctgttatgcactgtacacaagtaataaaattaatggatacacttcaagtaatgatccatttcctctgggtgcaatatatttattcacagactatttcaggggttgtttagaatatgagatgtgaatggattatgatccattatccctgagattctaatgtgctacaacaaaatggtttccataagtattgctcataatgcctggtgtgttagtatttgtattcttaaatagctaacacaaaattagaaaacagatgctcagatgattgatacttaaaacttttcagatatttacacttacaaactcttagaaaagttaaaattttccattgagtcaaggagcataattctatggaatacatataaaacaattatatataataataaaatccatatgcaaatatttacttggataacgctttgaaccctttttcattctagaaaggttttaatggactttcttagaaaatcaacagtagttctggcatttagatggtcaattaattcataaagttgaagtaatagcatttctcattttaattgaagagaggtacattaagtaatgtgacagtgtcggttattaacgtgacagtgtcagtaagtaacgtgaccatcctctccatcccctgcccaagtattttaaagcaaatttgatacaagagagattgtgtgcttgtttgtgtatggcttttggcttcagtgtacattggtctcataatttttatattcatatagagtacactattgatttggtattgaatgagttcatgagtacagtgtagttatactctttctactccaagctgagaattctattagatactgccagtggagacatttcctataggagtttatagtttagaaggacagtttatgcccttgttgagcaggcagcatattcacaatgaattaatacaatgtttgcatacaaatccttcatagcaagacttctgattttctgtgcccaacattatgtcttttctagtaacatctagaaatttccacgttttttttgaaatgttttcgtttctttataacttcaatctcacatgattataaatgtggcagaatattccaggattcccaaataaactctttttatttttattttagttggtgacaggctcttgctctgttgcccaggctagaatacagtgatgcaatcatagctcagtgcagcctcgaactcctggtctcaaaggatccctggttattgataaaacttctttaaaaaatgtataaatacaccttctatatcccatattagtcatatattatataaaattaggactaattttaaaatagtattattaactttttatacatgtcctgtttcagtcattaagaagacttcctctccccctaattttcacacaagagagctggtcccttgttttctgaatattctttttcatttcctctatatggcattgtctaatatgtctttgttgcctagtatgtgtcagcatttgttataagtaagttatatatgttaactcagaactttggtaagtatcctatgaggtcgattctatttttaatcctcatttcatggatgagaaaaacaagatccagtgaaattaagtaactgaacccatttcacacatctagtaaggggcatcaaatttgaactccggtctctttaacgccagaattctcaccggtcatttctctgcctttctgcctgcctccccctttttgctattatagatgtcgttcttttacctatcactgcattttcattgcctgcattcagttataaagatcaatatgcaaataaatagagcgtattataaatttcagtgttatgaatttgtacaaagctgacttttcttcaccatttaaatttcttttacagtgatatattgcaacattttttggggggcaaaacatagagttttgtgtaatgatcaacaatgactcattaaaacctgtccctagattttaacggatactgcagagcctattggtacttcactgtagttttatcatttaacaaaattaacatatccatattgaaaatcaacttatagtttcattttttcatttgctacgatttgtatggttgacctttctcagggacacaaagtgatttctctctgtgttcccgtctcatttagacaaatgttgaataagactcaatccagcatcagtctatcggtccctttaatttagcatttcttttttgcctgtttaatacctggttcatgttgacgtttcacccttcatggacttctaactgcttgttcaagttcaacatatgctgaaaatatttctcctaaatatctgatcatttagatccatgccacattttttgttattaacataatttaaaaattctgtccagtatattttctaattatctttttattttccagaaatgttaacgttttatcataatacttttttcaaacggagtgctcatacgattgaagtttcatattcttctcttacactttataccaaatgtggtcattttataacaacagttacttaatcgcatcgcttaacaaatattttggtacaatttttgatcactcctcaaaatctaacgatcaaaaacagcatgtcacaattgcttccttaagcattaggaggatattagaatatgtagctcctgtaggccacggacttcttttatacttagatatatggagccatgtatatattctttttacattctattatttccattgtatctcattaaaaatatatcagggaagaaggaggggaaaatagttgacgataatatttgcaaagtttgtctccttcaccgccatcctgagtagcattatgctttgaaattagtgaagttacagttgtgtttcaaatgaattgagggacatggtttggcagcattaatatcattatgacaaatagaacattagactatcagggcagagggaagtgaaagaggataaaataatatagttgttgaattcacatctatattttttttagtctttaaaaaggataaagtgggaggcatgtgcaagttagcaaaaccacaggccttatgtttctagagacgttcttcagactttttaagaacttagcttccctttaactaaattatattaccagaaaattaagtaaaatgaacatttataaaagtagattatcttaggcaacctactcttctaccaaactactcttcgaacttttaggtattttaacctagagaaagaaccttacagtgagtttatgttcttttgagatctctgtaggtacatgagggaacataaaacatttaaatattcagtatttccaaagtataagaaagttatcagtgctaatgtagctatgtttaaaaatgcatgatatcatatgtaatatattttctcttttatattctgtcattaagaaaactatataagctaataaatctaagaaagtctaaattttgtaaactaactttagagagtttgaatattttaacccatagcacagcgtgatgttgccatgctttcatgctatgtatggaataatatgtacttggactggcgttcgtcatatatgaaatgacatagcatattccatggtacatagtaggtactccagaatggtaatggtgataatgatatgcttgtgtttccatttttcccttgataaagttttctgggtttggtattactacagatgattttaaaactttgagatcaacttctacatttataaatttaaaaatgtttcacattagaaagattatttttcctagtacttgtttttcttcctcgcatccatggacaatatgagacagagtctcgctctgtcacccaggctggagtgcagtggcgcgatctccgctcactgcaagctccgcctcccgggttcacgccattctcctgcctcagcctcccgagtagctggaaccccaggcgcccgccaccacgcccggctaattttttgtatttttagtagagacggggtttcaccgtgttagccaggatggtcttgatctcccgatgccgtgatcccccacctcggcctcccaaagtgttggaattataggcatgagccaccgtgcccagccgacaatctgtttatttctaatcttctgtaaatgaaataaagaataatcttggattttttttcctctttttaaaactatgaaaatactatttaaactaatttccaagcccatttttaaaattaaaaatgtaagttagtttggggaagtatatttgagtaatatgtatgatatgtaaaatgtatctgaaaacatccaaaatgttacttgttcatgcagccttccagctcccatcagagctttgagcacttttgtttttatttaagtttttatttaatattttatttacatatattctaattttctacatcttatgtcttattacttgatggcattgatattcattgttgtgacgcaagtctgataattcacattgaataatctgaaatcatatttacacatttatatcttagaaaataattgatctggtttgaaatcattcatgtggtgaatacttttataattaggatgtgttggctttcagatcatttctttcagtctgtgggttcaggggatatatttaattatttttttctttctagagggtgttaatgcagatagcatcaaacaagcctcagaacaactgaacagccggtggatcgaattctgccagttgctaagtgagagacttaactggctggagtatcagaacaacatcatcgctttctataatcagctacaacaattggagcagatgacaactactgctgaaaactggttgaaaatccaacccaccaccccatcagagccaacagcaattaaaagtcagttaaaaatttgtaaggtaagaatctcttctccttccatttggagcataatcaataggtatttcttggcaatttccaagaagacagtaacaaattatttagtaatgaaacgttcaccttctaaggatttagctaagcgcaataaagttcaaaatgtaagcaacagaaatctgtttaaatatgtaagacgtagatacccggattctaaaattgtatttggcgtagttacacagcgctaattgattgtgtcggtttgcgtaagcatgaggcagtttaggagtgtggaaaccacatgtatcctgtaaaaaatggcctctcactttggaactctttctttgtgacgagtgaaacatagtcattttgaaaaagtggaatccatggaaatagttagaaacacgggtcaacaacaagcttggatgcagtataactagatacataaggaaaatatttaaaactgatggacctctcaaattacgataatttgaggaaggtttctttacaaaaagatatttttaaaatgtagctggagtacagaggaaccacaccggatagtgtagtaacccagcatcagagttcttaccccttttagtccagaaaggatcagtgagagagcagttatagaaactcagaaggagacagtcagatcctcatggtaaaagcagcatggccggcttaaggaatcctcatagaaatggagtcagacaaataaacaccccacttcacttttttccctgcctccagaatcttgtcagggctcctcactgactaaacttaatcgtaagacaaaggacaaggaaccgtcatctgtaaatatcagtctcctgggtaacaggagaagagcggacagtggatctggaggggcaaacaagatgtaagtggacaaaagggcctgagaaagagatgaaaggattatgccttcaagtgtaagaaaacaagagctgtataataatgaaaatagcctaaactgttttcattgttactatgagctatgtgcttttcgcggggaatgagaaactgattagaggatggactaaaacgtttccaggatgaacgtttagtgatagatcgagatgattacatttaatacaaaaggcaaggagtggagattcatttgcatactgtaaaaaagaatggcttaaataaaggtagaatagacatggaaaggtgacaaggttgatttagaaaaggtattggacccaaaaagtgatgagaaattcaaagctattttgaagagaaaaacaattgaaggacttaatggttcttcaaatatcggacctgtagcattattaggttttctgttcttgtgttagtttgctgaggaaataaactcagaaagtatacttttggataaagaataccttggataaggcacttgacttgttaggcaaatacacacatctaaggaatttctacattgagatgcattttgtaatttaagaatagaaccaatgccgcttttcctgtgaatcagaggaataatccaaatacattatttcttgccacaaaaatctgatgttaccttatccgattcttgagattcagatatagtagttagtaatagtacctacacagtacattcatgcataaaatatatacattaagtgtctctaatgtgtttaagaatgctactgagtgtattaatcagctgagtctgccacaataaataccacagactcggtggcttaaacaacacaggtttattttctgagagttctagaagtgagagaaagtccaggatcaaggtttggtagggttcagcttcatcttctggtgaaggctgtcttcctggcttgcagataaccaacttctcactctgtcctcacatggctttcctctgtgtgtatacatgcagagagagagaatgagggctatttttctttctctctctctttatctctgcctccttttataaagccaccaatccctaagggattagccccccaccccgccacccttacccaaccctgatgacgtcatataaacatcattacctcttaaaagtcctatcaccaaatagtctcaccaatggttaggacttcaacatgtgaattttggaagacacaattcagcccatagcactaagttttgggaatattagagtgggcattcatggactctgcttttattgtatttacggaaagcagagaagagagatatgaaacaatggaatcaatatttttaaatttcctgctaggaacagtggtttaaactaagatgcaaagctttgggagaatgagtaacagggaaaaacgaacctgatacagccaccaagggcatcttccttgagggaggaacatttgagttgagacttttgtgataagttagaattaggtaagagaacagttaagcaagattccaggcagaaggaacatggcaagagggagcaataaaggccaagcacctgaatgaagaccattgtaaatgctgaacatagaggggcagatgaatgagaggagagacaaacaggaatcagtcaggtatataggagacaaaccaatgacttctgggacctgctagtatcttggtcttgatttgaggaacaaatggagatcaccagaggttttatatattaaatattgtctggaggttgaggaagtcatcctaagggaaaatacttctcttactgcatccaaattccgttgtcacctccttatcaccccttactctttctctcagacccattggtgtctattaatttgaagaatcactttaggtaaaatatttagcaagataagcttaatattattcatacaagggcaaatatatatactgttctgctgagattagtgataggtaaataaattataacatgtttctcagcgttttattttatttggagaagttttataacattagagcgcatatttagctcatattctaatgatcggcagaactggtttttaatattgtgggggttagagagccttatcagaattggaaaaaattcatgaaccctttcctgtgaaaaatacaaaagcttccatgagataagcatataattttaaagaataaacagactcaaaggagataccatactctggaggaccaactaaaccaaatccttttatggaaataatggctaattgttcacatctttttaaacacagaatacttcagttgaaaagtatctcttctatgatttattctcagaacattaaggtctcaactgaacatttgcccaaatgttttattagtttcaaagtcccctttgtttttcagagcacacttggctataatgttggctctttctatagccccctgaacgggaaaaatggcagccctccatctggccaaatataaatcaggttcttaatggttcacagtagatgccaatgctgccatttgtaaatctagcatacaaattatttgtatatatttctgtactataaatacagaatattaccctttacctcttgtcttatttcttatccatggatatataccaactttctagcactggtttgagaggatttatatttgaaagagaaatataggtcaccttccattttgctaaacgtctttaatcttcacccaccaaaacgattgaatcgtcagagattattttacctgaatcagctcataccattataaccacataaacacattcctctgaaagctgtatttatgtttttttaatgagaataagtggcattgtacattagtcttgcaaccatgacagaatttatgtgataaatttctcagcctctcctaatacaaaagttactctctcccaaagagtatgaatgcctccataaatattaactttttttttgccttttcactttgattttcaggaagctcagatttcaattcgttcagaattggtataattctttccattttctctttcttctaatgggctcatgttccaatttttaaatttcaattttcctgttgttacatattaaatagtaactaaccctcaagtatttttttctaaagacagcatatatatgaattgtaagtaagcagccatgataataacacttttaaaaagggcagtgaaaactttgagttcaaattatatatgtattaaatacgaaacaattccaacttcactggaaacaagaacatgaaaacatttatgtagagaatagcatgcccttcgcccactttttgatggggttgtttgtttttttcttgtaaatttttttgagttcgttgtagattctggatattagccctttgtcagatgagtaggttgcaaaaattttctcccattttgtaggttgcctgttcactctgatggtagtttcttttgctgtgcagaagctctttagtttaattagatcccatttgtcaatttgtcttttgttgccattgcttttggtgttttggacatgaagtccttgcccatgcctatgccctgaatggtattgcctaggttttcttctagggtttttatggttttaggtctaacgtttaaatctttaatccatcttgaattgatttttgtataagttgtaaggaagggatccagtttcagctttctacatatggctagccagttttcccagcaccatttattaaatagggaatcctttccccattgcttgtttttgtcaggtttgtcaaagatcagatagttgtaggtatgcggcgttatttctgagggctctgttctgttccattgatctatatctctgttttggtaccagtaccatgctgttttggttactgtagccttgtagtatagtttgaagtcaggtagtgtgatgcctccagctttgtcctgttggcttaggattgacttggcgatgcgggctcttttttggttccatatgaactttaaagtagttttttccaattctgtgaagaaagtcattgtccaaaagaaatacagtgctagccacaaattcaagccacatatgtaatttaaaatggtctagaaactatattaggaaaggaaaaagaaacggtaattgaatttcaatagtacattttatttaacctgattcatcaaaaatattatttgaaagtgtaatcagtatttaaaaactttgagattatgttcttagcttttcttaatcttcagaattaaacatattttggtaatttcatgcatctaaatttggaccagccacatttcaggtgcccagttgccacatgagctagtgacagtacagcagtgttcatgtgattttatcatacaaaccagggtactactgagagtgaaacagggtgctactaataattatgccaggacaacaagaggaaacctggacagccaccgtaatttaaaaagtggcaattggctgggcgcggtggctcacacctgtaatcccagcactttgggaggccaaggtgggtggatcatgaggtcagcagtttgagaccagcctggccaacagtgaaactccatctctactaaaaataaaaaaaatttgctggacacggtagcgggcacctgtaatcccagctactcaggaggctgaggcagaagaatcgcttgaacctggaatgtgaaggttgcatttggccaagatcgcgtcattgcactccagcctgggcaacaagagcgagactctgtcccaaaaaaaaaaaaaaaaaaaaaaaaaagcagtggttgcctgtttggtcaggagaagtaatgagaccatacaaaacatagaagattatagatatatttttatatttgggtgtgtacatacatatgtataagtattatatagattttatatgtgtgtatataatctatataattgtatcaaaatatatttataattatagtatacacatatacatatatgtaggtatatatgtaatttatattttgcagaaatgaaagagaaaatattgttcattgagtgagcttaaaatttgaagcaagcgcacatcattttgatataagaggggtgcagccaaacacctatatttgatttatggaaaggatttaaggtcatgcatagtatttttccactgtacgcattcatacccattaatgctctaaattatgtcatcttgaaatttaaatatcattatataggatgatacatattgaacaaagagccaaggtatccttaaatgtatggctggtgatagaggcttgtctatactgtcatggatgtttcttatcagatatttgtgaagggtattaagctaaacttgccttactgctttttaataccttcttttgcaaaatgtaatgtatgcaaagtaaacgtgttacttactttccatactctatggcacaggatgaagtcaaccggctatcagatcttcaacctcaaattgaacgattaaaaattcaaagcatagccctgaaagagaaaggacaaggacccatgttcctggatgcagactttgtggcctttacaaatcattttaagcaagtcttttctgatgtgcaggccagagagaaagagctacagacaagtaagtaaaaagcctaaaatggctaacttgacattttccaaaatggttatttgtggggaaatccagaaggtactaacatgaaacaataatttctgtaaatggaaccattctccctacaacctgtattaacaaggaacgaaatactggtgtaacagataagctgtctgtagatttttttgtcctcataataattttgtgactttgagaaacaaaacatgttttgtatgggaatagcttctccttgggggattgtagatttcaaaatcagatgttttgaatatagaagaaaataaaagagcagttgaggtcatatgaatacacttcaattaagtctggctcgctgtatatacaaggatatttgctaggcatcttctaatatttctgtcaatttatctgaagagtattatagctttagcatacatgtggcaactgaaactcagcaaaggacaaattattctttgggctacattttactactggatcactataattacataaatcctattttttcctttgatgataaaagataaaagtggagcaattatgcaaattcatgccatgcgactagcaaatttttcaagatgtttcttttgtctcttcctgaattgctttaataagatgatgttaatacatagtatctgctccaaaatatctctactcatcaacttagttttaagacaaaaattcttttcagagacagatgaatgaccacctttaagaaatagtaaatggggttttgattcactatatacatgcatatatgtgttcatgtgcacacaaaaggaattattgagtaaaatcgggtttgaaggcattaagataaaagtatttttctgaaaaaatctctgtcccaaatttgtcatgagaagcacaggaacatgtgtttgtttactactaaaacttaaattagttggaaaatatattatcctattgcttttctttgtaaatatttaaagaattcaccatataatatcatttccagaattaatgtagtgatacacaacgcttttctcatttcccagcttttcattttttacaaaaatgaaatgagctaaataaagcaaaggataaatactttttttttttttttttttttttgtacttcagagtcgtttttgctaaggggtttattttcctgtacaggtagtaaaactttataaatagtatcagctccctctagtggatttcagtatacttgttactgtgcctctgcaaaatcaatttgggaaaatattttaaatgtcctagattttcaaatattgacatatttaacaataatgtattttcacttgtcattacatacataactcccccttaaagttaaatacatttagtggctatgcagcaattgttgtgcaaaggagccatttcactggaaatttactttaatctgtatatacctcttaatcatattaaagttcaactttttatcatttactttaaagatgttcagaatagcaatgtttgataactgagatttgtctatgatgttacaatataaatacgtaataatatatagtctctattcatacagctctccatccatccatccatccctatcatctttcttctcttttttaaatttcatacctacaaacgatgattgtttataaaacttcctaactttttcactgctattatatgtaaacaaattgtccccacttccactgtagctacacatctttaattttactattcacccttttggaatgcttgtctagattaataaataaccctttaattaaatatggtgtatatatatatatatatatggaatgaaaaatgtagcatatgaaattacatagcagttgattttgttaatttgaaattaattcaaataattgcacatgtgtatgcattatatccgaactggcaccagggagtaaatctcatttcttgtattcctccacagtactttggacgtattaagtatgcaggaaataagagctaacagaagtgcctaggcatccatactgacttttatttcctctttacttttttaaacttgctttttcacacaaaaacctggcttttaaaatatactatcagtgttggaaaatggcataaggaattggtagttgttacctgacataagtgatagaagaaaataatataaaaagataaaattctattttcaaagcactttttactctatgcataactaatttatacatcattttacctaaccctcagagagaaacacattgagtatttgttattacaactatatcacaagtaagctaatggggtttgaataactaaaagcatggatatgggatgctgtaagaactagatcgtatacacgaatgtccataacaacattattcataatagccaaaacgtagaagaaacccacatgtccatccagtgatgactatatgaagaaaatgggcacatccatacaaggcagtgttactgagcaataaaaagggagaaagtactgatacatgctacagcatggagtacccttgaagacattatgctgagtgaaagaagccagtcacaaaagatcatatgttatatgagtctcttgatataaaatggccacaataggcaaatctgtacaggcagaaataagattagtggttgcctaggtctgggaggatgagggggtggaattgtttcccatgacagttgataaaatacttttctagagactgaaaaccagtaaactcatgttatatgctagatgaatatagaaacacagcatctagtctgttgtagataattgtttcaacaaagaaaaaaatgaaaccttatttcttaatgtaaagaaggaaaaagattggtcatataatttgagtttatttcattaacaatttggaaatcatgttaaaataattattagggattttattggtttggtttagttttgcaaaaatggagaaagtgacattattagttatgacaaagccagtgttttgactgttctaaagtttcaaaatgattctcttctgttctacaccattagattgctttcagaacagagtcttgctcactttttcactaataaattcaagaaatatttttgaacacctggtatatgccgtaaaagtgctgggcactaggtaatatacatggtggagaaaatcaagagcaatatgtcttcatggagcttattgaaagaaagataataaaattgaatatctgaatattattgcagattataattactttggcgtctgaaaccgtgattctggggagatgatgttagaaccaaacctggagaatgtgcaggtgccagctatatgataagttggagaaaggacattaggagaaatgaaaagaaacacaaattgccaaaggtgaagaatgagggcttggcatgtccagaagacataagggaggccagaaaggctggaatgtaacaaatcaatgaaagattaggacaagatgagggtagaattgctcttatagaacttctataacaggtttggattttaagagcagtagacatttccgaaagaatttcaattgaggaaattaagtacccttagttgtattttttcaaaactcaccctctagctggtatgtgaagaagaaatgcaatacaagtctgaggagaagcaggaagacttgtggaaagaatagccacacagaggagagtccattgaaccttaaactacagttgtgataagataaagaaaaatcatttcaacccttgaagaggtgatgatctggggaggtgtagcacagaagatattcttgccagaattgaaagaaaataacttttacctcttacagagacagtagaagaaaattttaagggtagccagcaaggatgctctccatggccacaatttcaagctctatggttagtctctacccctccctgttaggatgctgagactgggaattaaaacaaagtttgatgtgaggtaactcttctagctgcagttcaggaaattgacctaatttactttattaaaattttaaattttttattttaaaattttatttttaatacatctaggcaaaggaatgttttgttccagtagacacataatctgttgcattgctccttcactccagaaactaggtaaactgtttgtaaatgttccttttaaaaattgtgttatttttatcaataccatcaagagcaagcatagcagacatgtttatttaagcaagctatgtgcttattgtgagataaaagaattgttccctgacctcaagaatcatgggaaaactcgctaaatgccaagttaaagctatacatatatatatacacacgctgtgtgtacatatacgtatatgtacacaagttgtgtgtgcatatacgtatgtacatatatacacatactgtgtatgtacacacacagacacatactgtgtaaatactcacgtaggcaaatattgtgtatatacacacgtagacacatactgtgtatatacacacgtagacacattctgtgtatataaacacgtagacacatactgtgtatgtacacacgtagacacatactgtgtatgtacacacatagacacatactgtgtatatacacatgtagacatatacacacacacacacacacacacacacatttataaaatttatgtgacaggaacctcatactattttccaaaatggctgtactaatttacattcccaccaacaatgtgtaagtgtacttttctccacagcctctccaacatttatctttcatcattttgaaagtagccgttctaattttaacatgtgtaaggtgacacatcattgtggttttcacatttttctgatgtttagagatgttgagcattttttcacatatctgttggccattggtgcctcttattgcgagaaatgtctgttcatatcccttgcccatttttaaatcaggttatttgttttcttgctgttgagttttttgaggtttctatatattttggatattaactccttaccagatatttggtttgcaaatattttctcttgatctgtgagctgcctcttcactctgttaatagtttcctttcctgtgcaggagctttttagtttgatgcaatctaatttgtctatttttgcttttgttgcccatgccatatccatttgagcattattcataacagccaagatacggaaacaacctaaatgtctattacaggacgaatggataaagaaaatgtgatatatatagtgatatatgcatagtggtagatatatatagtgatttatatatactgatatatagagatatatatactgatatatatagtgacatatatatatagtgataaatatattccagtgtctatatatgatatatatatgcaatggaatactatacagtctttaaaaggaaggaatttctgtcatttgccaccatgtagatagaactggcggacattaggctagctgaaatgagccaggcaaagaaagacaaatactgtatgatctcacttatatgagaaatccaaaaaaaagtcaaattatagaaacagaaaatagaaaggtagttaccagagactggggggaagaggaaggttgggaaagggaaggtgttgatcaaatgatagaaagtttcagttagactggaggaataaattgtagcgatctctagtactgcgtggtggacacagttaataaaaatctatgtttcaaaattggtaaaagaatagattttaatatccgcatcacaaaaaaagataagttggtgaggtgattaatatgttaattaacctgagtgaatattttacaatgcatacatagatcaaaacatcacatgataccccataaatacacataattattatttgttagttaaatatgaaatagtttaacatgatattttgaaaataggattgctaagtggatagagctgcttttagaaaaagggaaaattcagcaaaagaaaaaaactcttaaattctaataaatatttctgtagtgtggtagtttatacttacacaaagttggtcagaaaaatgagacttacctggaaaataaatcagttgtccaggaggtgaataatagagcagtatttatgaaaatgaccccaatttcagttggttcattggagttttatgacttataaaacaaattctatggtgatcttagataaaattcctataaacccatctatttcactcatgtcagaccacaccaagtgccctttgtgagaatggagcctgagcagcagcgactttcagcagagcaagttgcataagcaaaaaggcgtgaagtaattaaaaggcatattttgactggaggatagaatattgattttgataggaaattgggctaaaatgttgattgaattcccaatcacaaagatccttgtatttcaaactaaggaaacaacttatatattgacattagaaattcaagttatactcagacttccttgcacttgtaattatctgaaggaccattcctagtatgttaatcatcatatatcatgcatgggtcctgttgtatttcttgacacctttgtcagtgttcacattttagagaaatgcttacttttgtcatggtctatgttatttaataaagtttggagcctttgctgattgcattatctccttgactttagattgatcatggggaatgaggaaaaaggtgggatctggttggcatggaattaaaggctcaagttgagcattttgccgaagtaggtatatgtcattagttcagcttcttcacacatgtgcagtgcatttttttccccacaggtaataatggggaattcaaattggactcgatttcatattcacaacaggacttctaatgtttttaaatgctgtcaatattaagactactaacatatcatctctttctccccctaaatggattacatgggtgccttttccagcttctatctaagcactatccaacagaaaaataatgtgagccatatatttaattttaaatgttctagaaaccacattaacagatcaacaggtaaaagtcatttgaaaatattgtttcatcttagaattaaaattttaaaatgtggaaatagctttacattctttttgtatgaactgtccaatatctggtgtgtctttatatatacaaaacatctcaactcaaactggccacgtttcaagtgcttaacggacgggtagccagttgctaccttattggttggcacagttacgtcttccttctctctattgtacattctctgatgcttaagtgcctattttctgagtagttctatttttcaagaggagagattttttttttcagtaaagtgttatatataaccgattgctctggtatctctttatctcgatagttatgtctctcagaattttcaatatacttctctgtttactttgctttccagttaaagtggtttgcccttgacatagactcatgtgtattagaaaatgtagcatctaatttcatacttagctcttttgttatcacaaaagaatcttgctttgcctctcttggtctgtcctttgctctccttttttctctcttcttttccctttagcccctccctcttttaagagttaaagacaagcagtttttaaacaaaaggtgcagaaaacttcttttttgtattcctttactataattttagatgtcagtttgcctatactttatcacttccatccctcacatggctatattaaatgtctagatattaatggaatttttttttttacttttcaagataaacagtagtgcaggataggagcccttaatttttattttcccaataatttacagcacgtgcttccaagcttgcaatcacttatattgattttcattttgttgaatatatttcactaataaaaccaaaaagatatctgcatttttaaagtggtcctttagcagccgaatagtagaaactgtcataggaatactttctttagagaaaaaagttacatatttataagcaatatattggctaaacgttaaatcttcaggccatatttttcctgagtctgtgctgagtctaatgatgtcagtagaactctcgaggtcttttaagatggtaggttattagattggatatgtttattgtcttattgctgtcagtaaagataaacttatctgttggattattaatctctatttctacataaaaggaaaaaaagtgagtttccgtagatggagctggtctatttctgctcctatgttgggatcacaagggcagcatctacagatatctcaccagctagtaggtggggcagctcatactgtgtttgcccttgggtacattagcttctgtataagactttttctttcttcttatctgaaacagatttagaattcttcactggcattccctggcctgcatggtttaaatgagatactctataccgttgcaaatttgtcaagcatttcctgaaccttgatagcaattactgctgtcattacatagtgtcattacattccacataagaaaatcagaaaaagaaattgtgatatttatgttagtaggtgtgtatttttttttccagcttgcctcacaaactatattagatggacaagttcccaaaccaatctttggaagtttatttcttaaagctacaaaagaatttccaagagattagattttttgaaatgaccagtttcaaatgaatttaatacaaaactaggatgagggttggaatgcaaggaggaattaaaatatgcatgttttaattatagtttaccaatatgaagtgattcctgtgagattcagttgttggacagatcagaagttatacagaaaaagatcaataattcagagactgaagtgtttcagttttcattaaacagaaagaccagaaagaagttaaagaggagacatgttcaagttcaattaaaccaaattttatgaagcttatgattcatccaacataccgccatgtgtctgcccatagtcccctctccttctagatcatttgctgaaatgacatctcagacacaatcatttgcttcattgtaactaaatacctctttacttcactgctatttataaggtcccttttggattttgtttattaataatcatctagaattcaaataaatgcatatgccactcttgccactcctcttcagcatagtactagaagtcctagccagagcagtcagacaagagaaagaaataaagggcatccaaatcggtaaagaggaagtcaaactgtcagtgtttgccgactatatgatcatttaccttcaaaaccctaaggattcctccagaaagtttctagaactgataaaataattcagcaacatttccagatacaagattaatgtacaaaaatcagtagctcttctgtataccaacaacgaccaagcagagaatcaaattaagaactcaaccccttttacaatagctgcaaaaaataaaataaaataacaacaacaacaacaaaaaacttaggaatatacctaaccaaggagtcgaaagacctctccaaggaaaactaccaaacactgctgaaagaaatcatagatgacacaaacaaatgaaaacacatcccatagtcgtggatgggtacaatcagtattgtgaaaatgaccatactgccaaaggcaatctacaaattcagtgcaatccccatcaaaataacagcatcattcttcacagaattagaaaaaaaattctaaaattaatatggaaccaaaaaggagcctgcacagccaaagcaagactaagcaaaaagaacaaatctggaggcatcacactacctgatttcaaactatactataaggccatagtcaccaaaacagcatggtactggtataaatataggcacatagaccaacagaacagaatagagaacccagaaataaaccaaaatacttacacaaactgatcttcaacaaagcaaacaaaaacatacagtaaagaaaggacacccttttcatcaaatggtgctgggataattggctagccacatgtgggagactgaaattggctcctcatctctcacattatacaaaaaccaactaaagatggtttaaagacttaaacctaagacctgaaactataaaaattctagaagataacattggaaaaaactttctagacattggcttaggcaaggatttcatgaccaggaacccaaaagcaaatgtaataaaaacaaagataaatagctggtacctaatttaaattaaaaagcttttgcacagcaaaaggaacaatcagcacagcaaacaggcaacccatggagtgggataaaatcttcacaatctatacatctgacaaaggactaatatccagaatctacaacaaactcaaatcagtaagaaaaatacaatcccatcaaaaagtgggctaaggacatgaatagacagttctcaaaaggagatatacaaatggtcaacaaacttatgaaaaaatgctaacattatgaatgatcagggaaatgcaaatcaaaaccaccatgtgataccaccttactcttgcaagaatgaccataatcaaaaaaattttaaaaagtacatgtttgcgtggatgtggtgatcaggtaacacttctacactgctgatggggatttaaacaagtacagccactatggaaaagagtgtggagattccttaactaaaagtagaactaccactcgatccagcaatcccattactgggtatctacccagaggaaaaaaagtcattattcaaaaaagatacttgcacatgcatgtttatagcagcacagttcacaccagcacaatcgtggaaccaatccaaatgcccatcactgaatgagtggttaaagaaactgtggtgagtgtgtgtgtgtgtgtgtgtgtgtgtgtatgtatgtatgtatatatgatggaatactactcagtcataaaaatgaatgaattaacagcatttgcagtgacctgaatgagattggagactattattctaagtgaagtaactcaggaatggaaaaccaaacattgtatgttctcactgatatgtgggagataatctatgaggacacacaggcattagaatgatataatggactttgggaacttgtggggaaggttggggggagagagaaaagactacaaatagggtacagtgtatactgcttaggtgatgggtgcaccaaaatctcacaaatcaccactaaagaacttactcatgtaaccaaataccacctttacccccaataacttatggaaaaataaaaaataaatgcatcaggttaatagagaaacatattatttatgtaaattaaaacagattttaagtactacaaatatcttttaataagaaatcagaagtgctcagattaaatataatctcttaacatttttatgagttcccaaataaatgcaatataaacatattgaaaaaaattatccatttctaacatttcagcatccattgccaacacactctctaagattatcgcaaccatctgaatactacattaaatacatgcaaaatactttcctatattcttctcatttagtgtagaaggaattggtatattgaaatgacattcatatcccagcaattaaaataatatgatttagataatgttatttgatgtggtgatataaaccaggactttgcagtgtgatttcatgtatttagaaacattattagccattatctgtttaaatatggcttctgccacattctgggatgcatatatattagaccgttttactgtgttctctatctttttgtgtctccatgcttcattccaggtatttccttctgaatcttaagatttagtaattttctatttacccctgtcaaatttgctgttaaacccatgcacttaattcttatttttcacttactgtatttttaattctagaatttcttttggattatccctaaaatatgttatgtcctttttatggtttacagttctctgcagcgttctcaatcttgtgtctaatctctttcaatatagtccatgtggctgcttaagtcacatttcatatatatacatatacacatacatactttaaaacgtataaacttgtttgtatatacatactgtatatctctatataatactttccctaatataattatacatataaaagtatatacatacacatatgcctctttaatagcctgttttctcaattgcaattgggattaacaatgtatatgtctcacaggtttattataagaattaagaatgataatatttatggggttattactagagttcttgatacatatactaagcatgcgtacatgggtgttctttcagtaaaattagacatgacatgatataatttaaaaatcaaggtcttcggataatgatactattttttttccaaggcaaatgataacactgagagagagtagcctttcagtatcagatacaattggaccctgctcggtttctgcaaataccatctgtatcaccttgggcaatttacttagcttctctgtttttctgtttcctgcccttatctgtttttctgtttcctgaccttataaaacgaattgaacaatatagattttacaggctgatttgtgaatttaatgtaatatgtgtaaggtccctggcatattacacatgtagcaggaatgtatcttcataatcatattaaatatatttttcagattttctaattttgttaatatttgaaactagtaatataattgagtttgctgacaatttaggaaaacatggcaaagtgtgaaacaattaagtgattctcattcttttttcccttttgataaagtttttgacactttgccaccaatgcgctatcaggagaccatgagtgccatcaggacatgggtccagcagtcagaaaccaaactctccatacctcaacttagtgtcaccgactatgaaatcatggagcagagactcggggaattgcaggtctgtgaatatttgaatgtcaaaacaataaagcacgcttatcaagcattcacattgatataacctttaaataatattagaatttaagtcattctgacaagtatggtagtttgcccattgagcaaatgaaaatgagactttacagtattatttatgcatatactctatctatggatatatatgtatgggcatatatacatgctgtttttgaaaacaattgtatgatctatttatgaagtatatttttaatttagcatgcattttcagatgtattgattttgattattagaaaaaccattgttttattccccacctttgcttctttatttgtaactcctgtcacattctcaaactggtgggtaaaatcagtgtacagtcatcccttcgtatccatggggaagtggttccaggaactcctatgaatatcagaattcacagatgttcaagtcctttatatgaatggtgtaatatttgcatataacttatgaacatgctcccatatactttaactcatctctggattacttataatgcctaatacaatgtaaatattatgaaaatatgtgttatactgtattatttaggaagtagtgacaatgaaaaagtcttacatgtttagtacagatgtagttatttttgtcaaatattatctattagtagttgactgaatccactcattcagaatccacaaatatggagggctggctatatttataaaattggtttaaatttaaacattaattttctgtaatgtaatgagacatttgaattctaatagctacatttttttaacatccttctatcaggaaagatatactaatatgggaaatgaaagaaataatttgtaagagattttataatacttttcctactttattttatttttagacggagtttcattcttgttgcccaggctggagtgcagcagtgctatctcggctcactgcaacctacgcctcccgggttcaagtgattctcctgccttagcctcctgagtagctgggattatagtgcgtgccatcacgcctggctaatttttgtatttttaaagtaaagatggggtttcaccatcttggccatgctggtctcaaactcctgacctcagatgatctgcctgcctcagcctcccaaagtgctgggattacaggtgtgagccactgcgcccagcccttttcctacttattataaaatactacattatatgttcaataactttttatttctgaagacatgaaaacgtattagttatatttagaagctgagataatatgtgcattttaagaaaaatgtttaaaaattcaaatttaaactttatcacatagaattttttttggataattaaatatttttttgaagtaatgtattcaaagaaaaatacatttaaacaactttcattatgtattgtcctatttagatatttattctactacaataccaaatggtagctgtttcaccttttttgtttccttttgttgtggtttttaatgcttggcataatgattccaaagtctatctggaaaaatgtgttgcctaatagaactagtaaacttttaaacataagaataaaaatgtgcaagaataagagtggagaaaacacaagaaaaggcagttagatgagcagaagagactatttccactgaaaaagataggaaagaaaataattgttcataaatattattgggaaatgtattaactaactaaaaaaaaagatatgaacatttcccccaaagttacaccaaaataaaaaccacatacaataaaatgttcaaaaaatgtggggaagcccaaattttggaaaatatttaaaataataatgttataaaaatttaggtggagaagcataaaaatcgatggaaacaatcacaaacattgtaaaaacaccagagacaattttaaagaaatatgataccaaggaatctttttttttctgtgagtaaggaagaaagtcttgagtaaggtatcctccaaaaagagacatatatgaataataaacctatgaataattgtaacttaaattgtaaaggaagaagtaaaaaaattacaagatgagaattttttttgcatactaaattgcatacacacaaaagatataagtaccaatttgcaagtggtgaaataaaaattgtctcttactgctggaaatgtaaattcaatatgaattttactgaggttaactcttcagtgcatcctaataacatacaacattaatataatttccatgaaatctgtatctgatggaaataatcagaatacactcaaagatgtaaatggaactggagatagataggatattgattgattgagggatggatggatggattagataggtaggtagatagagataaacataatttacaggagtggaaaactagaaatgaatgtgtagaactaataatggaaattgttgaactagaaaagccattacaatttttgtttttgaaaaaataattatttgacatgggcaaatgctcacactaaaacacctagctcaaagtgtagttatatgctagatattgtctaaataatcagtcataggggaacaatttgaaaaagtgaaataaacttaaaaaagtaaagtaaaaaaacaaattaagtaccaccaaataggcataggatactatgaaactataaaacttagatatttgacaaattttgggttgatataggtcacattataggggaaagaataactgtttatatgtgcatacatgatcatatatttaatatttagctatacatagaacaaattgaaaatttatataaagtactagtagttctggtttttttttccatttttgtcatgagcctttattattttataaagtaaaagtaacattaaagtaaatattgaacaggggaagtctaaagttatgatcctactgtaagaaattacatgtgttatacagaataagtataaataaattttataaattctccacaaaactatccttgaatcccaccataatactacataacagaataacattttttgaaaatatattaagtacatagattgttcaataagtttttctattccatatatcaatattattagctatagttttatgtagagtttactttcctgaaagctcagtataattaatttcaactccattaactgtatcacaaatgcagttattaatatatatacttaattcagtaaaattagatgcaccaaaactttttggctctgtaagatatagttttgagatatatttgacattgttcagaaaaatacatatggagtgttaaataccactaaataatattcaagttactcttaggataatatgtaaaatttaaattaccactagaagtttataactgatagaagatcatctactttgtttacatgtttgaatcatatagatttcaagtacagttaatttcactaaaactcatcaattattattcatcaattagggtaaatgtatttaaaaaattgttttttaggctttacaaagttctctgcaagagcaacaaagtggcctatactatctcagcaccactgtgaaagagatgtcgaagaaagcgccctctgaaattagccggaaatatcaatcagaatttgaagaaattgagggacgctggaagaagctctcctcccagctggttgagcattgtcaaaagctagaggagcaaatgaataaactccgaaaaattcaggtaattcaagattttactttctaccctcatttttatttacttgttttttccctaacgatacactgtaaactgtaaaggtacataagcatttgaccttcagcatctttcaaagttagtgagaagatgaaaagacatgagtcttttacaaaggatggcgatttgcttattccttctaggaaaagaataggagttttctcagtgtttttagaatgaattttctattttcaccattaccaataggaattaaacatgtttttagtttaataattttcaaaaccaatcatccatttagtctggttgtcttttaagatacgggtaatcatttagcttatgactagaaaaaagttatgtatatatacattatacagaggtatattgtaatcattttatatatataatgtatagtatgtatatgattatttcctatattacctttcatttctgctgttttgctacttataaaaagtaggagtcaactatgctgtctatatgtgctattatatataaaatatggtgatatgttcataaaattgcattatatattcatcccattatgtataactccatatatgtatatgtgcagtagaaatgtaggtgtattaatgtcctatgatactcctaagaaattagcagaaatttaatggcttcaaacaacacaaatttattacattactgttctggaggtcagaagttcagaattaatctctgtgggctaaaattaaggtgttagcagaactgtgtctgttttggagactttgaaagagaatgtgtgttattggcatttttagcttccatatatatatgtatatatatacacacacatacatataacatgtatatatgtgtgtatatatatatatatatacgtgtataatggaattatatatcatgtacatatatacatatctaatgtaatatatatcacatatgtaacctgttgtatatgtatattaatgttacatatgtaatatatagtaataacttattttatcaccatatcgaatttgtaattatatgcttaaattttaccacatcaccttcttcctgaaaccaaattcccttgacttaatttgtttgaatagtgccaccatactaataaccactcaagctaaagaaaaacagtaaaccaacaattgcattaaggtctaaaagcctaaaatattcaataaggtaagtaatgtgtcccttgagtggtcaattattgtgacaaatgttaatgctgggaaggaaatgtcgaaaacgttatggtatgatggaaaaacattgcaacaatatgctcctggatttaaatcccagtctagctgcttagtttttgtgcttaccttttacaaaccaaagcactaagcaaacctaaaacattttttaatgcatagcatttctttacttataaacatatgtgtacatgcatacctatgtaaatactgcatgaaaatatctattatttgtcaagaccagtggcctaagagggcacaattacatggctcttgttatcaaggagcccacattctagtgaaggaggaaggtaggtgtattcatttcctatggcactcctaacaaattgccggaaatttaataacttcaagcaacacaaatttattagagttctggaagtcaaaagttcaggattagtctcagtgggctaaaattaaggtgtcagcaggactttgtctgttttggaggctttgcgacagagtctgttttattggcatttttagcttctagaagcattccttgtctcatgtccccatcctccatcttcaaagtcagcagtgtaacatcatctagtgtcaatttctctctccctgtctatctccctctccctctctttctacctctccttctcaccttcctttccctatcctgttccctgtgttgacttccttttaattaggacctttgtgattacattatgccctggtggatgatccagtataatctccccatctcagaatccttaatgtaatcacatctgcaaagtcctttctggtaatatactcacaggtttcagagattagggtgaggacatcttgggggtagcattattcagccttgcatggtaaataaattaaacagtatgggaaaggttgtcacagtaggcaggaaggaaatccaacataaactaggaaaaaggattatgaaatattatcggaacataggttgtctctgctatagattaaataggtagaatttagttagctaataccgagaaagaaagagttcttgagaaagcatagcagcattttcagttaaatgatataagttcaacactgggtagacaatatatatggggattaataaaatattatggttggaaaactggattgagagtagacagtgaatgtccttggatgctatgttttacaatctgagttttaatctagtggtgatgggactgataataataacaataaaaacttaataagaaaaaactgctattggttaaagagggaaataatatgattccacttgtgttttcaaaacattcccaagatgagaggaaggaggagaggagattactggcatcactgtagatcagtaattagaatgaggtgagaccgaggcagatatcaaaacgagccagtgcattaatggagtcactaatgagacctgaacagcccaggcgtagtggctcatgcctataatcccagcactctgggcagctgaggcaggtagatcacgaggtcaagagatcaagaccatgctggccaacatggcgaaaccctgtctctactaaaaacacaaaaattagctgggcatggtagtgcacgcctgtaatcccagctacttgggaggctgaggcaggagaatggcgtgaacctgggaggtggaggctgcagtgagccaagattgtgccacttcactccagcctgggcgacagagcaagactccatctcaaaaaaaaaaaaaaaaaaaaacaaaaaacaaacaaaaaaaaaaagacctgaacaaggacagtgaagatgtgaaataagaacaaatgtagacttgaaagataacagcaaggtgatcgtcttgaagttctcttagataaatagtttaaaaattattattaataatcacattaaaggggaaactttctgtggagcacatattttcaatgtaaatttaagtaaaacagaagaaaataacacatgtagacagcatagttgaatcatactttttagaagtggcaaaacagcagaaaaaaaggtaatacgggaaagaatcatgggtgagagatactggctatttataaatgataaaagatgatgatttttacctgatcattacttcgtactggtcagacaaataaaagcaaaagctctgtctttgaagatgacaaaatattagtccaaaagttcccaactggaaggactatttaaactgtcatctgtagaaaataatttgtgaaagttcgggtttagggaggctataaagacaccattacattgagtttattgttcatagtttgttttatgtactgtaaggacacatttttagtattctcatgagttgttttgtaacttaaaatttctctagagggggatatgatttaatgttctcgagagtaacatcataaaaccacatttggtagtaattttgtatttttaacaatagcagacttcacacaccagtgctcatacagtagaccataaaaatgcagtcttagtaaaaatattctttgcctcaagaactacttagagacatcctttaaacatgggaattgtttttgggcctgtgtttagacataacacaatgatgaattgtgttaaaagtaatcagcacaccagtaatgccttataacgggtctcgtttcagaatcacatacaaaccctgaagaaatggatggctgaagttgatgtttttctgaaggaggaatggcctgcccttggggattcagaaattctaaaaaagcagctgaaacagtgcagagtaagatttttatatgatgcctttaatatgaataattttgtatgaatattatttggttagatcagtgttttacagctggggtggattttgctctcctctccccagtggattttttttaatgtttctagacgtttttgattgtcacagctgggttgggggtggtggttagatgctactggtgtctaataggtagaggagagagatgctgctaaatatcgtacagtccatagaacattcctccagaacaaggaactgcacaatctaaaatgtcactagtgccaatgttgagaaaccctgggttgagtaaatgaggaactgacaaaacattgccttgtactcaacctcatttgataacattattttactataaaatgcagtataatttaaaggtaaagaatcctttgagctacttgttatttcttatgataaattactattcatactgtgttgttctcttcatctataatgcactgtactataatataacacagtatgcattttgaaataatattcattataccattgtcatgcagcaggaagaaaacaatcttgctctttaaggaaatttttttacaatacaagctaaaaaagcaaatccacctcacaaataaccttcacacccattacactgtaaacaatttctgcagtatcctgtgtttgaaaatgaaaatactaacaaagataataaagtatgaagcccatcattttcacacatttttctaaccagaaatattaaatttatttccttttgtttctgatataagtagaatacaaataattccccactggattcatgccataataaccattgaacatttttgcaagactgttaggcagtcatctatatcaatatctctgtatctcagattttaaaagacaaaaatccatatgcaatgccatcagtcccaattttacattttctagctatgtttcatatctaatatgtggcagtaatttttttcagctggcttaaattgatttattttcttagcttttagtcagtgatattcagacaattcagcccagtctaaacagtgtcaatgaaggtgggcagaagataaagaatgaagcagagccagagtttgcttcgagacttgagacagaactcaaagaacttaacactcagtgggatcacatgtgccaacaggtatagacaatctctttcactgtggcttgcctcaacgtacttaactaagatttcctaatgtctcccttcaccgttacttttggttaaggctttgttcctatgtttttgctttaaagcacaattaattctgacaaattaatcttttttctagcatatctaaatattttcatggtatatattttaaatagtacacattcatcttattttgatcctaaaatgactttcttgaacacaactgtcatactaaaaaatgaaatcctattcttagtcattatttccaatccatgttttcttcagaacataaatgtataataataatgggattaagaaaaatttgttacacggagatatttggtacaaaataaaatgcatggctaatatatgtgtatgtagaaataggataaataattataactttcgattaacatttccaagtttggcctcttcgacacatttattatttatttattttattttttgggacagggtctccctctgtcacccaggctggagtgcagtggtgtgaactcggctcactgcagcctcaacctcctgggctcaagcaattctcccatctcagtccccacaagtagctagaagtacaggtgtgtgccaccatgcctggctaattttttgttattttttggtagagacagggtcttgctgtgtttcccaggctggttttgaattcctgggctcaaacaatgctctttccttggcctcccaaaatgctggaattataggtgtgagttaccacacctggctgacatctagttttaaataacaattaagattcagtaaccattaagaatagctgaatttcaaaaaaaaacacacacaaaatgactgtacactcatatttgagtttctcatttttctacagaagaatattttatagatatctctcttatatttaaatattcaattacggatagtaagatatattcaaaaatagtgtatatcaaatacttcttgttcgaaagataaaattttgaactaaagcaatgaatacttttaagttcaccaatacattagtccccgatcatctgcagttttgctttccctggtttcaaatgcttgtggtcaattggaatcctaaaatcggtgagcacagtaaaataagatattttgagagggagaagaagagagataacttgttctattttattagttgttaatctcttactatgcctaatttataaattaaattttataggtatgtatgagtaggaaaaaatctagtgtatatagggttaggtatcatctatggtttcaggcatctattggaggtcttggtatgaacatatcttccaaagatacaagggaactactgtacctttttggaaattaataaggggtttcaatttacgtgttagaggcagttggtctttggttactgctaagtaaactttcaaaatagaaaagaagtaatgtcaaaaggcaaaagctacatttgaaaatgaaaaaaaaaattagaaaagtcaagggaaatcactcagctaatacaatcactgacaagtgttcattggttctgttaattcacagatgagctgtccctgggtcagctagctcacattcttctcctgaagtaagtcagtgctagaagagttgtttaggaaaaaaaaaaaatattacttaaataatagattataccattgatgttttcctggaaggccagtgtgaaaggtatttgttttttgtttgttgaatgttcttaatggatgaataaaaagaacatcaccaatttatgtagagcaaggggaaaacatcagccaaaaaaaaaaagtataaaaccaacaatattactaaaacctcaaggtttttacattttacaggagtacaatttgtaaaggctctctaaaaatgtctttgcttaagaccttatgtctgttatatgtactaagaatttgttgttcaagagatatattttaaacacactcatctgttgcatagcaaaaaagctatagatccaagctatgttctgatctccattttctaatcttagaatattatatgtatctgtgcttttcctacaagtatcactctggccatgttctgactttgtagccaaatgagttaggttgtaaaaggaaggaacaatggcgctcaaggagaagaagaagacgatgcggtaaaaacaaggaagccatatgtgaatattgttaccaattcagcattccagagagaataatggaaatgaagtgtaaatctatgcattacagaaatatctacagacaaaataagtgtgtgatacactcttttgggttaaagataattccttttttgtcaccagatgccaatgtctgcgaaaacataaataatttgaaacaaaattgtccaaatatctgatacatttgaagatgctttcacatcccatgatctaattttgggtatataaaatggttattattttaaattttaaagggtatgtatataagtttaaaaatctagattctagctatttctaaaaaaatgatcagatataagtgagggaataaaatagacattgtagttaccttcacggagataatagtttagtggtgaaaatggaaagtaaataggttaacacattatcacaacaatgtcttgtttgaagtcttgcttacactctgaatgtagcaataagaaccctttaaatgagagtgacaggagcaggaaaactactttctattgggtagtcagtagagtgttttctgaagaggcgaaattaaagctgatacccgagtagtaggaacttgacaatttgttgtgtcaaggaattctgccagaaaatgaagtggagaaaacatctgaggcaagagagggcttagcatgtttgaggagctcaaaggaagccaggagaaaaagagtgggaaaatgagtcagaaaggaatatggaagccacagtgatgatttagtcattatgtcaagtactttggaaagtcatctgacttttaagcataggagtggcatcatttcatttcatttaaaatggttgttttaagtttgctgcatattcctattagaagaagaataaatcaaaagggctgaagtggaagcaggtagggattgcaattgtccaggtagaaaaaaaaaacaggcaggaaaaaggggatatttgtggatattgtagttttctgaggaacctccatgctgttctctacagtgactgtaccatttatattcccactaacagtgtagtgtagttcctttttatctgcatccgtgccaacaattattttttgtctttttggcaatatacatcctagctggggtgaggtgatacctcattgtggttttggtttgcatttatttgatgattaccgatgtggaatttttttttcatatattaattggccatttttttcttcttttggaaataactgttcagattatttgcccatttttgaatcccatcacatccacatatgatatgatgttttatatcataaaatcgttatttttctttttatgatatctgagtttctagcttctgcacagcaaaggaaacagtaaacagaatgaaaagacaatccacagaatgggaaaaaatatttgcaaactactcatccaacagaggattagtatcctcattacatttttgatgaggactttcacacttacatctacccagaagtattattcctatcctaacatgacacattcctttattctttttaacagatcccattagatctggcagtacttgctgaaggagagtgtttgttgatagtctagaggaagaatgagggaagaatcaaagtgttttcagatatatttctgttatgagctacattgtaggtcattgtgattttaaagaaagagtgggtactaagagaagaacaaaatggaatagcttactagagtgactagcggttccatcttagccatatttatttcggagaaaaagacaatcagacatgtatctggaagtcaagtacacttttcaaactgggcatataaacgaggtacataaaaataaagataacatgtatataagatactgtttcttgcctattgagaagatttccccatgctcccatccctaaaatgcttggtcaaattggataattcgtaaactcttagagatggaagagaatctatttttgtttaaaccactttgttgaggtatgactgacataccaaaagctgtacatatttaatttatacaacttgattagtttggggataagcgtatacccatgagacttattaccacattcaagatgataaacttacctatcacctccaaaagtttccttctgccccttaatttatttattttttttgttttgtgataagagctcctaagatctatcctcttggaatatttttaacaatacagtatttttaactataggcccaatgttgtacagtagatctgcagagctaattcatcttgcataactgaagctttgtatcctttgggcatcattttgccattttcccctctctcagcctttggaaaccactattctactctctagttctgtgagtttgactattttagattctagggaatggaaggaaatattcacaaatcatatgtctggcaaatgattaatatccaaaatatataaggaacttctaaaattcaatagcaaaaataaaactgaaaaataacctgattaaaaatgagcacaggacttgaatagtcatttctctaaagaatacgtagaaatgaccaacaggtatatgaaaaggtgcatcactaatcatctgaaaaatgcagttaaaagccacaagaacctcttcatacctgttagggtggctattatcagaacaaaacaaagcaaaagatactaagtgttggcaagaatgtggagaaaagggaattcttttatggtgttggttggaatgtaaattggtgcagccatttgggagaacagtttggaggttcctcaaaaaattacaaatagaattcccatttgattcaccaatcccgcttctggatatatatccaaaggaaataaaatcaggatctcaaggaggtatctgcacccctatgtttacagcagcaatatttacaatagccaagacatggaaacaatctaaatgtatattgtcaaataaataaaacatggtatatgcatataacggaatattatgtagctttaaaaaagaaaattcttccatttgcagcagcatagatgaacttggaggatagtatgctaagtgaaataaaccagacacacgcggtcaaatactggagaatattttttttgtggatggaaaggcacagtgtgtaagaccagaagctctgagatcagatcgcctgggtttaagtctatccacatcataaactgcctgtgtgattctagaaaagttgtttaacctttttgtgcttgagtctcccaatctttaaaatgtgatgatattaatacataattcataagtatataataattaaatgaattcatcttttcaaggtgtatagagcctcatctaacctagattaatcactgtacatgtttgttagatagaaaacaaatagaaacctacatatatagaattataaaacatgtatactttctaagtaaataatatatggttatatattttaattattagtggctttaaatttatagtaaatagttatcaataaatgggatttagaggttacgtggatgtctttctgccagcttgcagatcattgtctttctctgggtcagtatactctttgggtgtagtgatccccagatctctttcgtcagatctctaacagtctgtttttccatctttctgcaaaaaactagcttcttgttttaccgagaaaatataagcaatcagaatagaagttgcagtactcccactgacctgcatataagctcacagactctactttccctttgtttacatagatgaactttctgtgcttttgtctaaggccagcttttccacttacgtacctggatccctttcccttgtctctgcacaaggacattgtaacagctaatgaacagccctctacctcctacatcttctccacgctacatcattcccatcattcccatcagtagagaattattctgtaatatctcctgtcatttaaaagaatcctcaattggacaacaatctctctagcaacctctccattcccgtttccctttacagacattcctttctctccatttcactccttcccttctctcttgatgccaattaagagagctaatcaaactgttatcctcactattctattaaagcagattttgtcagggtcatcagtgaattcgtattactaaatcgctaaattcagttggcttctgtgtcatcattctttcttaattatctcttagttttccctgaccactgtcaatatccttggtggttctattgccctgaccactaaatttgaaagtgttccagggctcagtctgtggactccttttttttttccccctattaccacccactctccgggtcaacttatcaagctccatagttttaaatgtaatctgtaagttgttcctgctgtaagttttttttttttttttttttaacaatctggaccctttctaatgatcctagacctgcatacccatttgcccactcaacacctccacatcaattaataataggcatattaaatctaacatgttaaaacaaaattcctgatgtataccccagtctactaccctagaaatttgcctgttattacaaatggcacctccatctttccacttattcaagccaaatcccacgagattttcttgtctcctatatttctcttacagccgaacatcaaatctatcaccaaatgctgtcgtttttgccttcaaaatttccaggatccaacaatatctcaccatacttgagcacgtgcacacacacacacacatacacacacacacacacacacacacacacacacacacacaaagtatgtatgtgaatgtatagtttttactagaagtcttggctgaattccattagtccctctaatatttttgtagcttcaccaactgccttaaaagattataacagagcagagtttctaagtagaaatttagcagcaggatttcttaatttataaaatagcaaaaatagcagcatgttttcttaagtttattataggttcattgactgcacaaaataacatttataccttttctagtacaattgcaagacatattgttctagatgtgttagggtgaaacatttatttacattgtagtagatcaagtactacatttacctaggtaagtaaagaacctaaaatgaagtattatctatattaggctcaaaatggttgtaaattataaggaaaatcaatgcgatagtgattctacacatatttactattgggcaaagtaccatgaacacttcattttactaaaactgtgcattatatattaatactatgaaaactctgttacttaaaatgtataatgttgtttcaaccagagagaagaataccatcttttgaatagagttactttttaaagtaaaagcactatgtataatgattgtaatactatagagtgccttgtaacaaggtgtatgattttcttttagatgttttaagttttgcatttttctggttaatgagtaatggagtccattgtagaaagttttagttttcaaaaatgcgtgaggctttaaatagcagatgttttctataaccacagacagactcttttgcaacttgcattttacacgtaaaactttatattgagccacttttcatttcagtaaagatgtatttgtgatgcacagtatcccatagtatatatatgtcataatttaatctctcatgaaagcacctttgggtttgttttcaagatgtttggtctttaaagctgaattaaatattgtacatgttagtctctacactttggttggcatgattcactctcaaaaaatggagcagttgactcagattcgtggacattaacatttttatatgttttgccatcttactatctaaaaggttgtattatgttggatatttccctcaacaagtataaaaactttgattttcccacatccctgcccaaaatgggctctttattaattattatttttccctgtcttaacatgtgaaaatgcattaattcacttcgatttgcaatcatttaactataaatggtattagaacatcttttatatacatgtattgccatatattatcttctttgtgaattgccaaactacgttttatgcacttttcgttttttctttttaatttatgagagtttctgtagatacatgattatgaagttcttagaatatttaaaatagtaaaacattatgaaagaacacaaagaataactatttctatgtatgccaataaaattacttttccaactgaaacatattattttaaaaagccttgtttttctccattcacagaaaagcattgtcacacaaacagctgaattatcatcatcgggcaatacgttcattttattaagtatgccaaataaacagacatgtcttattttcacacttatgggaaattgagtgtatctgatccccatgagttattttcttatgcatataagctttttacttctttatcattactatctaagctttctgttatttacatactgatgaaataatataataataatgtttcatcactgtcaataatcgtgttttgtttgtttgttttgtggaaggtctatgccagaaaggaggccttgaagggaggtttggagaaaactgtaagcctccagaaagatctatcagagatgcacgaatggatgacacaagctgaagaagagtatcttgagagagattttgaatataaaactccagatgaattacagaaagcagttgaagagatgaaggtaaaaaaaaaaaaagaaaaactaagtaaaacaaaggaaataaatggaaaaagaaagaaatgcaacaatgcttgaagttgtatacagtctgctctttcctggttctaagagaagaggttgatttttaattaataattttaatttagcttcaagtttaatatacattttaacaaccttaaactgtttaattttaatgcattgtggtcaattatgaaaattgaaaatcacaatttgaaacaattttcccttgaaatcatgtagtattaagagagcagaatcaactcatttcattaactgtctgtagctgatgtaaatgtacgttgaaactgtgcaaaagtattcttgaaaagacaaatttataatgtagtcaacaaactgtgttaatttggtagtttgaaggcatttctgagaatttggaaacactaaatatttgaacccgtagcctttaatatggatagaaaggactgagtttacatgtacttttcttgaaacaataggacaaaatataacattgacttattacgaaggaaactggtatgtagtatgtagtatggatttggaggtgaagcctggacttgaacctacatagtggcatttcgtatggccttgggcaacaatataatagtcaatataatcctctgttttatcatgtttatatcatcatacttcctcacttgaatgtatgaactgttgattgtaactaccatgtgagtaaattgcctaactcagagttggtgctcaattagtagctataatcataattattatttttatgtgctagcaagaacttagagaatgacttgaaatattaatactgtagatctttttttggttcaaggattgtgacaaggaaaaatcaatgtggagccagatacttgagtttaaaacttagttcggccccatgccaactgtataaattggggtgagttacatgagcttactgagccaaattccttcgtttgtgaactgggtatcagaatgtctgctttcagaatcattagagggatgaaatatgaaatttctaacacaatgcctagcacagtataaatgaccatgactcattatttattattttaattgtgaaagggccacatggtaaaaaattatataattaaatggtaattcagaaatatctattatagttaatagcagaaagtaactcacatgaaaactcagatgtttaaatatcgaatctgtcatacggctttagtcaaatgttgaaagtaaatatctaatatactccataaatatgtataaatattatgtgtgtataaaactataatgaagaaaaaattagtataatcatttctagagtattaaaaacacagaattattctaatctagcaatagcatatttatcaactaaaacttattgcatacttactgtgtgccaaacaccctctggctactgaatatagagggtggtgagcaagaccactgccttggaatttacattctagtgttctagcgtgtggtgaggagcaggcaataaatggaaaaataaatgaaatcatgataatttgcctagaagtaaacatggattttgaaatcaagaatgaataatgttcaggcaggatttgagggtggtaggatgctattttagaaaaacttgacttatagagcatttatgaagaattgtatgtaatatgagagaactgaatcataaggaaaagccaaccacttaaaaaaatctttatggaaacacattctattcagagagcatagcttctgcaaagaccctgaagctaattgggaagagaaagaaatctgcctgaaggaaggaaaatgggataaaattacctcagataagtcttaggaggtgggcaaatatctgttaacaaacgggttttgttagagtatcacagtttttattctaaatggacaagaaaaaccattggagtatttcaaaagaccaaaataatttaaaatttgactttggggaggtcacccctgaggaaaactttatcagaatgtgagagctagaaggtactttgaaacttgtgtaattcacacttctctctctgcttatcagaaaactgcaattcccagataggtcaaatgatttagccatagtcacagactttatttgtggtagagcccacaggattgaaggtattttattctatttcatctcttttttcctttcctttcctttcctttcctttcctttcctttcctttcctttcctttcctttcctttcctttcctttcctttcctttccctttccctttccctttccctttccctttccctttcctttcccttccctttccctttccctttccctttccctttccctttccctttccctttccctttccctttcactttcactttcactttcactttcactttccctttccttttcctttcctttcttttccattgtgtgtcactcatatggccttttctcttgtatctcaattcctttctcactgcgtctatttatatatggccactacctcagatccgtaagtagatactatagagtcatttgtgttcagctgctctgattatccctgggttcctttggttcagtgcctcttctggccctcttccctctccctatgagcgatttgcctatgtcaccaacaacccagtcagatctctcttattttcctgtgctctagagtaaactgtctcaaatttttaaaatttgaaaaccatccttgaaatgagtgttccaacaaatttgtctacattgattgacatgttttgataattggtctagctacaaaattggtttagtatgggggtgatagtaaaaagaggtaaactctggaagcctctggcaacaaccactggaagagttggcaggaagatttcatttcttgagttttcagcctgctactcaagacagtttctttaaggcaacttcactacctggaggttagcaatagtaccttgtccagacttctacctgtgctcatttgatagctaatttttctttattgtcagaagatactaacagacctattttgacatctctccctgatactcaaagaagaaatagagacccccccttctgtttatgttctttcctgtgttttacctgaaaatggaagtgctgttttaataacttatttttcccctgaaaaggaaagtttttttgacataaaagaacccagggtacagtttgataaacaacctctgactttaaaacttttatggagatcagcaatcactatatggtaaaactttatactaaaaccctttgaaaaacactctggaaagttattaactggttttatttttttttaatttttactctattataactctagtactagtgcttaccagaacttacacataaagtgagaatagtaaatacacaaataaatttgtataatcactacagcagtgattcctgcatctgaatggacatcagaatcacctggaagtcttgtttaatacacagagtgctgggccctgaccccagaatttctgattcagtgagtcttgggtgaggcctgtagtttttcatttttaacaagtttgagtttgataccaaagaacaagttgcagagtgattccaagggtgctcactttaagaagcacgggtgtgaaatcctagcaatgaaagatggcagagcatatcatagttagattcatggaaagaaacaagagccaccgtttttatgaggatttgtatagaaactgtaccagtcatttagctttctaccttttctcctagtagagaaattcatcatcatcttctttcctcatatgtacctggattaataaattttgctgtttgttcttcgaacctttcccaagatctgagcctcttattaaaccaagaatatatgaagtctaaaaaccatggaaagaagtgttcttcattctacatttttatatagttgcttgggttatttataatgagcataaattgtaattttattcattagactgactacagcatgctccttcttcagctcatggaacatttgagacccgcttaacagaaactatgagaaagagaggatataactctgaggatgatttccttaaactctctgaacctcagttttctaatgtccaatatagaggtaacaaaacacatccgagaaggtttgggtaaagatctaatgaggtagcacttatgacatggctggcacagaacacagtagcacatattaaatgatgaatggtaatcaaacttgttgattatactataattactaaagtcaaaatgcaatttgtgtaaaaacaatctctatgctcagtgatgccaaaaagctgatttatttagaatattgaactaaagatttcaatcaattaaaatcggtgaagttaagcattctatagacaaaacaatttgcattttctgacataatgcatacttttaaggaattgtgggactaaatccaaaggagtagggtgattatgctgacacatacaaaggcattttatagctgaccttatccatatcctgccaataagcccttaccttaaccaccgcattgtatgcaggcccaacttctacattatagaacctgagttcctttacttgagggctttctgtggccactgaatcccacttttgcacttgtgtggtaggcttgcaagtactgggaaattaacatttccccaacagcctttaacaattagggaagatgatacagaaataataccccaatttcttcacccctgaatgggataacccgcaggcatatatttctcagggctttctaacaggattaaactctagtcattaacagtgtttgctgggattaataagtatgcccatatggatgtctcttccctttcttgtctcaattccccattcagctaccagaatttcttttacatggcacacataaataaactacttatatttgaaagctaatgtcaggtttgacccctggaggaacacagactaaagatacagtgtgtatgtgtgtgtgtttctaaaatacatgtacgcatttgaagttaaggagtgtaaatgtctcccaaccgaagaccaccaccaactctcttgtagctgaacaagttgggttcattattttttgcaatgagggagaatacacaacatggaggccagggggtgcgtgtggatgaaaaaaaaaaaaaacattgtaggatttgtgcttgtgttaggggatttgagggagggtttaaaagctttactttggattgcttgtcattagtgtgtagggatagctatatgggtatcgtatcttgtccagaaggagagaagaccagaatgaggctaaagttgcaattaataaagaaacggcgttcgttcatattaaccaggataggagagtgttgggcgttttgtggtttgggtaatgttgatgtttttgtctggattcagacatgattatggaatgatcttgtcatggtcttgatccattatggaaacaaagtggccttttccaatgttgaaattctgtgaaacagtttattttccacttgagaagaccaaggcatagctgggtgtcaggccagcttctgatatcagcagctccttttttggtttctctttctctcatgtgttttcaattctcgaacgaaactttcttttatcaaaatatgttcctaaatatagcatcaaggggacctttctatgttaagtatcctttaacttaaataatgatatttgtgatggtttcaatattattcatccaagtaatttataagtgatttcaattctagactgccaaatattttttaacctagttaatattgaaatatttgtttcttgccttttccaaacaattgtatttatatcaatgtgtatatatttgaccacaaatccatacctccatgcagactacttttcagtctattcttgttacagatctgttgtattcttataataaattatttctttaactttccaatttcaactaaacttaaatttatggaagagactggagttcatattagatttatttttgtaattctcattctaactgggatgttgtgagaaagaaattatatgattcatagaaatgcattttggatgtaaagttattttcatgctattaagagagcattctttatttttcagagagctaaagaagaggcccaacaaaaagaagcgaaagtgaaactccttactgagtctgtaaatagtgtcatagctcaagctccacctgtagcacaagaggccttaaaaaaggaacttgaaactctaaccaccaactaccagtggctctgcactaggctgaatgggaaatgcaagactttggaagtcagttgcttttcttggtctttgtcaatgatatgtcaatacatggtcatatgtgaggcatagtggttaagaacatggataccagtgcaaaacaactttggcttgaattcctcattcaggcacttataagttgtatgactttgggccatttgcttaacttgtgtaaacctgttttcaatctgtcaactagacataatacataattcataagttgttgagaaaattaaatgagctattctctttaaactacttagcctagtactcaatatatgtgagtagctatgcttctaattctcattactattattaggtcataaaatcctataaattttctccagatttatagacaatgatctttattttttcttatttttgtatgtacataaacttatttaagtatctttggggaaaagcattctgtagagaagtatgtttttactacaattgtctttagtaattgccgtgccccatagagttctttgttagacatgttacctaaccagctctatattttttgatggtttgcattatatttatgtattatcacaacttctgctttaacttttatggatgggccttactgtctagattatgcttatctgaatttagataaagaaagcaggtgcctcaaatgatggccatgtaattgcatcaaaaataagctatgacctttcttatgaaaatactgtgccaaggggcacaaaactttatccactacaaatgctgatgctgccagacattgcacatgagttggactttaagcccccttccctcacacagactgagttattttggtgaatatggttaataaagtgttcaggtacctctttacttttgaaaaacattatttagtttgcttcctatgttgagggtttgatatttaaagaaagatacgattcagatcaataataaagtacacctttaaaaatattttaaaatgtatttgtagctaaagtaccccatatattcccaatacagtattatcattttccaattgtaaaatgtgatccgagtttctccattatcagttctaagctcttctttactcatccttattcttttcttttaaatgcaattcactcctcagactcttgaaaagtgccttctatatgtcaggaaatattacagtttctgaggatataatgacgtatcttatgtatcagtgttatgtgagtgctatataaaatataacaaagaatgggaagggaagggatctgatggcactgtacatgtctcaagaaaaccacaattaattcactaacatgttacaatagggagggactttttgtacccaggaaatgctttctgacaatgtttaaataaaacacctactattactttcttatgttcttaatgtccttaaataagcatcattgttccctattattcatgttgttcatttaaatgatactccgtgattcattagaaatttatattggagtacattttccgaagggattttcttaagttttcgtattaataacaaacttttcaagaccaattattggattatttttccatttccttctcatgtataataacatttctaacattccctattcatattgaagttatcaaattattgagttccattttagtcctttttcactggtttggaatatgtactttattttatcttataaatatttctctatacctctctaacaataatatggtggaaacattagcatagtttaactctgaacctacctcttccgttttccgcgttattgttgcctcatatttcattttcaccttatttcccccaaattagtccatataattgctgttgctgctgctgttgttttaactatttcatataatatttatttagatttaccgatgctattttcccagtttttgtgatcagttttgccttttgttcttccctttgcttctgtgttcagtttctttcttgctctttccttgagtgtgagtagcaaatgtgttcagattttacatattgaaaatgcctttattttgccctgagtattggataatgatgcagttgagcaggaaattatgtaaggacaggtttttttttttcctacaacactgaaaatattatttgtcttttgaaattttttgcctttaggaaatctgctgtcaagttattgtttctttatcattttctctggtacctttaaattttctcttcgtcctgtctgctctgcagtttcaccctattttgtcttctacagtttcactcaactttgtctgtgtgtaaatttgctttcatttatactttgtcacctggtgtgttaattagaacagatacgttatttctttagtggttctgcattgtctttgtgaagattttctttttcccaatctcttcattccttcctaagggaaaactttcttagagctattaagactatccccttcttatattccagttactggtttccctttaatattttctatattcttatctctatctgctcaattttggatacttttctaaaatctgtcttccaactctcaaattctcgcttcagctgcctgtggcgtaatttatccttcaatagagaaatagtctcatctttgtctgtatatatatttatctctctacatttatgtatgtgtgtttatattttttcaaaaaacatattttccatttctcaatattttattgagttgtttcacaaatctgttctttgttatggttttcttcttttttgtgattaattctatgtattcctttaaacaacttaaacagataccatctgtttgactgaaatgtttcaacttaatgagtaataaacatgacaccgtcttatttttccaataactacacccaactctgtcaaatttcaccttctgcctggtagttggcttctttaacaatatttctctgggatctcattactttttattcacttttagttattaaaatgtactctaatttaaatttaaatatcataacttaatcaaatatttcacaagtttagattaatctgttgcttcagcaatttatacagacgcaggagtgagaataaatggtctcacagtctcctcctccatcccagtttctggatacagatctactgtcgatataagggagggtgaagagggaaaaatactctcttcatgtgaaagtcctttttttgctgctcacaactgctgttcccttttgttaaaacccacacacatctataatgcctagtctgttgtccctcttctatatattatcaccactgacctggctcgttctctatagacttgattcgctctgttgaggatccagattggccttattcatatgagctttgaaccccccaaaaaagatctcctaggcttttatagtacctcgtagtgtttaacaagaatttcaagctgacgcttgtcaacagctttacacaaactgctcttgaatattatgtctttttaaccaatgctttagtgatgccctggagtctaatttacctaccatatctcaactcagagcctatgggcactggaagtacctatactccgtacctttcaggaatgagaagtttgaaagagttgtttttgattccttcttggccataccaacagctcaacaggaaatgaataccaaccaccccttcctgaatatatccacccagtagatgagtggttttgttttagatcctgtaaataaaatgattcagatgagtttaccctacctatccccataaaagggtgagaaagaagaattgcctaactattcaaactctcttcacctcactcccctcaagtctccgtcagctctctctgtttaaaccagggcttgtgaaaacaagaaagagatgatctcccaaaatgaaatgtaggcaaccaagccctttttcttaggtgtgaattccacttgccagtctcaagcaaataaactctatgggaaacatacaccatgaggctaggcatatttattgtacagttctccaaaattgttctattatctttatgtcataaggtatggattctaccatttgttacaactaatgactccctctaatggaagtgaatttccccatgtggctagtaaggtttttgtttgtttatttgtttatttgcgagctcatctataataggaattgcctttactggaatttttgtctttttttttctctgggctattgagtttttgtattgttgccatcaggattgtagagattttatgctctgccctcatgtgtgatacaagcttaagtttccgtttgttatgggtggatctttatttttcagcccaaaatcccccaacaatagtttccttgctaaatcataatattccaatggctagggatgttctacttcttccttacagggtggatggcacactgcttcattctttcccatttccctggcttgcctcatttcccatctcaagttagtgttaaatgccccagctttgatgtcgtataccctgttctgatacgccagtatttttataagcttgattttccactttctactttcatttccctctttttctttctcacacctgaggttctatatacatgttttacagatcagctatgaattaaaaatgtttcctttgtattttaacatgtattttggtataactgaagcaggatatgttgggagttacctcatcagctccatctactattttgaacagaagtttagttttttatttgtactttccttcaaagccactttggattctgtgatttcaaagtaattttaagatccaaactgttaagcttaacagttattctaagtggcttttagctccaattcgggcttcaagactatattttattttgcaaaggtgacctgtaaagctggtacattcagcctctccagctgtgtccttcagatgcattgaggacagaagaagctatccattctgacagttaaatcagcaaggtagttcattacctcaatctgcaccaaagttaataagacacattaccaatcacgtctccttgtcttcaaagctctaaggtaccctcgggtatttaagaagatatttatattttcccactgggatctttgcccagaatgaagacagcctgtagtccagcaggagctggaaatgacccagattttagatttctatcaccttttaaagcaaaacacttaatttcactttttgcaataaactgtacataagatatcaagcaggtatgaaaggttggtacgtttgccaagcaggtgagactgatacttttcatcagatagagatcgaatactctgtgtcattctaagggctatgaacatagagaactttgggaaatctgattaattttttagatccttctgaaataaatcttcctttcaagcctttaattttggtggtagtgaggcgggggcaggtggtagtaagtggtgatgattgctgcattgtgtttactgtacttataggttcattcaacagttacaaagctaacagaaaatgaccgttgttacattcttatcctctctcgcatcttcctatcttttccccaatagacataatcaccatctagaaagctacctttgttattcctttgtttaaaaaaaatccacacacatatgagtgaaaaaacaattgtgcttaatttcagtattacagtaatggtaaactataatatagtttttttagggctttgtctttcacccaacatatttgtgtctgagattcattcttatggttctttttgatgagatttttcattgtcacgtctgtattctctgtttaaagatgacggtatatttttccattctccttgcagtggacattatttccttttttttgattactacaaaaagggctgaaatgatcattgttgtaacagtcttgttatccatgttaaacagtttctctgaggatgcacatatcaaaaagtggagttgttgtcttgatgggtatgtgaatgttcaccttattgagaataacaaattgttttctgaaatggccatttcagtacacacacccaccaacaataaatacaaatttttgttcatgtatatcttctctcacacgtggaattgtcaaacttctcatttgtgtcaatcaacatggtatctcattgtaatcctggcctacatgtccttgattactaatgagattgaacatatcttcatgtttaatgtatatacatatttctctttaagattttggttcaggttttcttttcattatcgattgggttattcatcttctatttgacttgctggcatttttcatattcttatgtgttacagatgttgcagttgttttcttctattttgagtctgtttttcaattacttgatggtgtcctttgatgaatagaaggtcctaattttaatgtagtcgaatgtattcatctcttttttcttacggtcagttttttacgagatgtcttacttaagatattcttctctatgccaaagtcagaaatattttcttctatattttcttgtagaaattttaaagttctgcttttttatgagtacttctgtgtataaatcagtttcataatacaaattaatggccatttaaaataatcaaacctttgaattagtggtaatatttccgataatatacctcaaggaaataataagaatgtggaaaaatagtccatattcacgatgatgtttaccataaatttataatagcaaacaaaactaaaagtagtctatctaaaaaaaggaaattgctaaactaagatagagccactttaaagaagtcttagattttcattaaaaatatgtcttcttagtaatacagaaaatggtatgatataatgtttagtgaaaagagagctatagttaaactcacttaaattttaactatcaaattatatatgataaatttcagaggaggtcacagaatactggtaacagtgatgtgtgagggagttagatttacatatgcatttttacatatgcttttatttttctgtttcccagactgcaatgttggtgcttatttttattttaaaaagtaaattactgtcttttgaatttattcattattcatgtaataaaatgttttcttaatgacttttgattgtagaggtattagatgatgaaactgtctagctgcattttgaattacctgctacaaagtaaaggtgaaaaatacaaagtgttatattttcagaagttttaataatgaaatggcaaaatttcacatttacttttctaccataatatttaatctgtgatatatatttctttcttaggaagtttgggcatgttggcatgagttattgtcatacttggagaaagcaaacaagtggctaaatgaagtagaatttaaacttaaaaccactgaaaacattcctggcggagctgaggaaatctctgaggtgctagatgtaagttgtaaattaagccaaatgatgataatttatatgcagtattaaaagaggtcaagtaccaaatagaagacaaatccaaagaaaacaacccaagagagtataattactatgttatcactcagcactggtactttggataaagcctttgttccccctaataaccttctaggtcacaagattttgcaaagggtttaaatggcttctcacagaggaaatttgcctttattatatcactaagttctacatagatgcttcacctaattaaatgtaccacaaacctgcaaagacagtgtgaataaacaaactcactgctttagggctaatcgggatgataatatgaaatattatttccagtttaaaagctgcacgtattgaattggaacctattttatacttacttaaaatcacaaatttacaccttacggaatgttttgagttattaaatggatatgctttaatattggaaatatatctttaaagtattcataaaatgtaagtacatttttaagttttactttggagactttcaataattaaatgagtttgcatttataaacttgactttaacttctgacatttaatcattcaagctctatgcattttagtgtacttttgacttatctatatgtaatgaatatgttgttttagaatatgtaatatatgtacgtaaagctataagtagtatagcccctctgtaaatctataaaataaggagcataaattattcaagatgtgaagaaaatgtaaggtatttctttagacagaatagaatttgtaatcctagaacatcagagtagacacctatagatcattttatccaacttcctaattttcaaaaggaaattataaaacctgaaaagatattaaagtacaatgaagtagatctccagtggactttaattttggctctatctgactatgactataaatttgtcgtattcagagaagttaattgaccaaacatttcttgtgaatcagcaatgtgttacatgttctagaaaagttgcagcaaatttacagcacattaataaaaggacagtggccagaacagaagataggatgatgctgttagcctatgaaattgtcaaatcgtacatggagcaccatgctaaattcttgctctcacagtttcagtgatgtgctgaaaaactagggcatgttcacaaaggaatgttaaggaaagagagaaaatttgaagccataatgaagagcatttagaaaagatggggaaacaaaacttaccattactatttactattttagacgaggccctcacaatgcccacaacacagacaagcagggaggaggaaaattgcgagtgctcttatcttttatttctatgttgtggtcataatttcaaattgttcctaattcagataatggagccaataaatgaaattccacagtgaaaaaataaataaatacatacataaaattggctctttggtagtgttgctgatgcttatccaggaggacattttgagtgaaaagggctagatcaccacgtatcaaggatagaaaaactgcacgacttctaggttttcttgcaactcaagatatttataactgatcccttaattttgctttgttgcttttcatccacctttaaaaaaatttaacaaggtatatactttgttaagacttataaaataatgtatccattaaaattatttatatccattttgcaaataaatatttacaaaattaagatttgttagaagtaataaggaatataaattattaggaaaattattaacaatcacattgttctactcaaaaatttgatggcttttaaagtattttacaggttatagtgattttttttaatataaatgtatttaggaagtctctttattttcttgaaacttaataggacaatgtattgagtttgctcaaaattcaagaaaaatacataaacaggaaaaattacaaatatgtattggaagattttcatttttttaaaacaaggaaaacagaagatttaataaatttgtgagaacatatgcccatcacttattttatagatatgtttgaggtccagtaagatgaaattgaatcccttgttttctggcatgcctatgacactgagattcactttcatcatattatctagccaggcaactttgtcaattttgagcagtataggagatgggtattattgggatgtacgtaacagagaatcagacaacggtttaagctcacaaaatgatcttttctcaccacgaaaagaatagtgaagggaggttactcagggttgaggatggttcagccatattatgaggcgagtaggcactctctgctctctcttcctgagcatgaaggacctcacactcaaagtcattgcctcccagtgcaaagatgattgttatacctccaggccatgtatgtgcaaaaaagtaggaagggcaaaaggattcttcttgagagagtactctttttcagaattgtgtcacgtggacaccactagctatcagagaagttgagaaatttagtgttttacctcttctggttttagagttaggggacgtcaaggaaaaaggtggttgtgaatcaagttttaagttctcagtccgcaacactgtcataatcccatgaagattcatatagaatgacatcctattttttgaagcaaaaatgctccttggtgtttttaatcccaattaaaatttgctttaaattgattatgacttaattatatgtaaatcagaagatactgagcatttgctgataatccaatgtatttagaaaaaaaaggagaaatagtaattattgcaaatgtgtttcagtcacttgaaaatttgatgcgacattcagaggataacccaaatcagattcgcatattggcacagaccctaacagatggcggagtcatggatgagctaatcaatgaggaacttgagacatttaattctcgttggagggaactacatgaagaggtatgaagataagtgaaaaatctctttaatctaatttgcattaatgtatagcagatacaggcctctcagataaaatgagcaatagtttaaatattagctcagctttcaggtttcagagacaatccaatgccagacactgggtaaattctttacatgtgtattatagcatgtgatttcacaaaaacattgtaagttaggattcttaaaaggcaactgagacatcccaagaaggttactctgaccacagagttcttttccttactcaagatagaccagtatgtgtgggtatcctttctctctcgctgtctcattttattcctctccctccattccacacacatttgttatgtcacatgtaatctgctaataatacatgcaattctgttagtaccccatattatttattcttcataaataacactacatttcttatagataaattttcatatatcacacatggtgtgatttttcaaatcaaaactaaaacaaaatagcaaatttctcctagtcagtgttttgcatactatctcctaagaatggattatttgtcaagaagaaaacccattttataatgatgtttagttttatattcacttactgagtacatctactacatgtgagatatggttctatggtttgatgagtaggaaaaatttgctaaccttcataacttaaaaacattggttagttaaggaagagttactgatttcctagaatgtgcaagacataaaaacaaataatataacgtatgaagagaaaaaagagaataagggggggtagtaactagggtagtatgcatgaaaccattgactaatgacttattgaatagtcaatgtcggggaccttttgacatgcttacagattgaaaaggaacgccttgagtaggaaaacctcttctctatccaattctgaagagaagtatgtgagggtagggcagatatctgcaaatgtaccagcagcacctccagtcttgaatcctgggtggcatatccatattttatccaaatcaacataaggaattggggattggaaaaggggaattccaaacaatctctggtccttcatcattgttgcactattgctggatctgagtcaaatagatattgctatgtggcaagtaaattgaagatcatttcaatgtgggttgtgatatggaattggaatgtgtttttatttctatttgaatatcagtgtcaggtaggagacagcagttgcatcaaaaaattaaaagtcattgtgaaactgaccttggcttagctgtgaaaagactcaaatttttttttttttaaagacagggtcttgctctgtccctgagactggagtgcagtggcatgatcgtggctcactgtagcctcgacctccctgggctcaggtgatcttcccacctcagcctcctgagtagctgggactacaggtgcatgctgccactcccggttatttgtgtgtgtgtgtgtggaaatgttgttttgccatgttgtccaggctggtcttgaactcccgggctcaagctatccacttgccttggcctcccaaagtgctgggagatacacctggccaagatccaacttcagtgtttgacatttttcagtactcatctattctgtccttaggaatagcttactctctaacttgatcttggtattaactctattaatgtaattatattgcaatcctttattaacacaaaactacttataaccttctattttaaaggtttttggtataaaccctgacatttcccccaaagaaaaaataattcatttcagcaacataccctgattcaacacgtattatcttattttctggactgagtttttaaagcataaacttttgaataagaaaatacttgaaacttgggctagaataacaccttgtattagtagtcagggtccagacagggcacagaaaccactcagtcacttaaacagagatggtttaacacaaataagtattaactacttactggaaattaatttttaataggaaataaaagagatctctaaagaataccttaagcctgaggaatagtacacaaacaaggaactaatatggaaagataggagctcaacccaaggctggattcaaacttctttagaaagtgtgtgtctgcctcccatgggatgacagagaagtttccttcattgacccaatccagaacaagtctatagccagtgagctgaagctagtgtgaagagaatattggaggggaatgctgacaaaattcacagggaagtagcctatggtggggaaccattgaatttgctagaaagctgtctggtgtattcattggacatggtgggaaactacctgtagtggatgctactaaacttgaggaaatgaggtggggctccaggaagctgcctatggatttgccacccatcctcaatttgcttattgggtacccatagaacttgtcaaacacgacccatagtgttgctgaaagtcttctgggtaaagtggggtggatgaggtgagccttactgggcattccataggccagcccagagtcacaggtttgaaaaagaattaaaagcacactgggacagacaaacctctacctcccccattgtcactccagcatcctttactgacagaacttaatatcatgtcagctggcaaggggagaaatgttcccgtgtcaaaaacaggatcatgttgaaaggcaaaaaattgataactggcaaatccctctgtaattcactggctatgtgattttgagtaacagttttaaacttacgtttcctcatcctgtttcatagggggttttttttgtgagcaaaatataaaatacggcacttaaagtactatggttccaggaacacagtacatattcaataaattattcaataaatttaatacatgatcagcctttttattttgactagatgatattctagagtatcagccctcaaaaattgtgtgtgtgtgtttgtatgggtgtaaatatatatatatatatatatatgtaagtatatattaaaatatgtaaatatatatttaaaaatatgtaaatatacatatatatatatcccactgagggcagtgattggtaaataaatgcagatagtgcaatatgaaatataatgaaatgcacatgcctccattagttaaataaaatgtgaagacagataaaaaggatttttatcaccctctaagtcttaaaatcagaagctctccacttgtacctcaatgattaagcagagtgttaaaataacaataaatctaaaataagtaaacttgaaactattatcagtcctagctgtgtttatattacatatttggccagtaataacctgggagttatttgacaatgaaaataaagcatatttagtttttacggctttcatgaaaaccacatcatgttaaacataatatccttctcaaattctgttgtatcagcctgtgataagctgattagacctgaaagatacaatgttaaattaaaacaatgtgtagtaataggacttttgtatttctcaggctttgctcagcactttgatcaatttcaaactacttaggtaaaaaagacacacctaataatttattagctaaatcaatcctttggatatttccactatctagttaaaaagactgttgtttcgatgcagtagaataagccttgggataaattatctgagaggctgaagaaacaaaatgattacagtaactgagtttttaaatcaatttaaaaaattcttgttgtacattaatgtgttataatcaagaattctgaatttgttttaggccatgattctcttgatttttggttggttaaacaaaaaagtttttattttgtggttattttctatttttattttattttatttttttgagacagagtctctccctgaagcccaggctggagtgcaatggcacgatcttggctcactgcaacctctgcctcctgggttcaagcaattctcctgcctcagccagatttgctattaataaacaaagtgccttttaatttgaagatgagccttaacctattttttaaaatcaattaagtgcctatgtcagaggtttgtgaggtttttatatcacctacctaatgtttcttatagctgcaattatgcagaactaaggtaacattcaattgcctgttaaatcagtcaaacagccagacttttattgcctatgaatatttaaaagagatttgctagatcccatccctaatttcagagtgtgagtttgcattcaaataagtaataaattatttccatcacttcaaaaggcatctttcattcttgataatcatatagcactatattttctactcacagtaatgatttgaaagatggttagcaaaccaggcaacatctccaacagacgtaccaaatcatatcatttttacaactattgtaatagctttattctctaacagggtaaccaagcagcagaagatgatttagtaatacaacaaaatgaataataatattggtaatagtatttggttacagaggctcaggtacccttttaattgtcagatatgcattttctcatttagttctcacaatagccttatgatacatggtggtttttgtttttgttttttctttttttgagatggagtctttccctgttgcccaggctagagtacaagggtgcaatctcagctcactgcaacctcctcctcccgggttcaagcgattatcttgcctcagcctcccgagtagctgggattactggcacatgccactacgccaggctaatttttgtatttttagtagagatggagcttcaccatgttggccaggctggcctcaaacacctgacctcaggttatccgcccgcctcggcctcccaaagtgcttgaattacaggcgtgagccaccgcatccggccgatatatggtttttcatattcccattctacagaaattgaaaggatattaaaggccctaggaaaaagctattgagcatttagacccatctctttacacttgaagcctaggcacgtgaccatttggctacactacctccaatctctgtgacccttttcatatattaaaaataaaaactctgctaataagtgaatatggcaattaacgagtttccccgtttttaaggaaagcttaaaacatggccttaaaagtattatggctgactaattaaaataaaatttagagtcttaaatattaaagtcacacattgagaagtccaaagcctttaccacttctcttgatgagtgattatttcacctctttcgtggcttattaatgcccgtatttcagtccctttcaaagatgtctgtaagttgttatgcctgacatgaaatagcaaatttactgaaagggacaaaatctaaattggttaattcttctgtaatagtaacatttatgatagactcagagagggccgtattaatttttcctggtaattatgactttgaatttttccctcagtgtcacatctaccttagcatagatagaccagaacggaagaacattgcttgaaggaagactataaagtaatctaggaaaataagtggcatattatgctttattaatttgtcaatatgttttgtagacaatatctgtctataataatagtaaaagccattactttttgagcacagttttacgtcagtccttttgctaagccgttagaagcaacatcaaacttaaatcccacatttgctttatgaaatagatttgattagcttacttcacagttgttgtgatagggctgacttctgttctcaagggctaggacagctaagtcttctgtaatgccctctggaaagcactaggatgctggaaaatgtctagtagttgtattttatgttgctttcaaagaagtataagtaaacctttaaaggctaggaaaaaaatcagatgaaactgaagtcatgccgtaacatgcctatgaccactgacatttgtatggtggagataaaagctaagactgggaaccccaattttaggtgaattaagtcatttgatggaaaagaaatatgatcctctggctcacgaaaatggtggagctaaacacagattccacataaaactggggttctatcagtaagataatgggcagagagaattctatctgcagagagaacaaacataaaaagacatctgtcttctcactgtgagtgcaaagtaatagaataattataataatgtcacctgaaaatgtgtgttggcctattcttgtaaggtgaggaactcttgagtgtatattatcacaaagggtaaagaaatatccaaacaagtgattaagtcagggtagcaccaggttaggagcgtcctagcattagttagaagcaaatgcaaattgtttaccatgaaaagtgccctcagtgtcctcacagattaaactcaggggaacttgagctcatcataaacacatagacatacacacactcactcacacgcacaagaaaagccctcatgaagcacagtcagcctatacaacgaacggtgagtttacttctagaattccggatattagaattgcaagatgtatagtataaaataaataggtaaaatattatagaaataaatgttattgaagttataaaaaagaaaacattgtaaaaatggaataaagaaatcaaaattaaacaactacaattaaaaattagaaaatgaatatatcatatataaacatattagttgaaagaaatgatttaaaagaaaactaaaagagaatgtacagactgtgttaccaaaaactaaggaggtggaagatgtgaacaataggtaatagatacaggggtggggagtagaatatgaacatataacttatctcaatgggagttttcaaagaggagaataaagaaaatggagattattattattcaatataaaaaaattatataacccaatttaaaaatgagcagttgagctcaaaaggcatttcttcaatgaagacctacatatggccaacatatatatgaaaaggtgctcaaactcattaatcatcagggctatgtaaatcaaaaccacaatgatatatgtcttcacatctgttagaatggcagttacttaaaaagaaaatcaagagatgacaagtttggcaagaatgtggagaaaagggccccttgtaccctgatggcaggaatgttaattcatgctgacactatggaaaacagtatggagattcctcaaaaaaaaaattaaaaatagaattactatatgatccagcaattccacttctagggatatatccaaaggaaattgaatgagaatcacaaggagattatctgcactctattgtttattgcagcattatttacaatagcaaagatatagagacaacctaaatgtccattgacaggtgaaaggaaaaagaaaatgtgatatatacatacaatgaaatattattcagcccttaaaaaataagcaaatcctaccatttcgctgtaacaacatggataaacctggaggacattatgctacatgaagtaagccagacatagaaagacaaataatacatgatcccaatcatattatgaatctaatacagtcaaactaatggaaggagaatgtggaatgcttcctgccaggggctaggggaagggaaaaatggagagatatttgtaaaagggtacaatgtttaggttatacaatatagataattcctagagatctactgtaaagcatattgcctatagttagtctatttacttaaactttgctaagaggatagaccttatgttaagtgttctgttacagaataataataatattagaataggaggaaagttttggagatgatgaataggtttatgtcatagattgaggtaatgtttttatcagtgtatatttatctccaaactcagcaacttgtgtatgttaattatatacagctttcttgtatgtcataatttttttgagaaatggagatggagtaatatatgaaggatattaaaggaaagtttccaagagccagtgacataaaccacttaaacagaaagcacattatataacaggcaaagtaaataaatagaaatccaatctcagacatatcacagtgaaagtgcagaaatccaaagacaaatttatattagcagctagaggtgagatggataacctacaaagcaattaaatttaggctgtcattagacttcttatctacaacaatgaataagaataaaaaagcaatggaaaatattttcaagatattgaaaaaattaccgtcaacctagaattctgaactcaacaaaattagttcttcagagtaagaggaaattagacattatcagagtgaaaaaaaagtgaaattttaccccaatagacccttactataaaaatgtctaaaataagtatgaagaattagaagtagtagaaaaataagttttaaaggttttagatgcaataagtatgatgaaaaaatagttaagcttttaaatacaaaaggcatttgttgcaaaaaatatataagaatatctaatttcatttaaaataatgttgatctaaaatactagattaaaaacaatatggaggggagttacagccacaagcccttttatttagaaagagggtagagatagtgattaaatgtcgactttatgctgtaataaattgtcaaggataaccactaatggagcatccacctgggaaacaatcaaagaatgataaaaggaacagttctcaatcagtacgcagtaaagcaagaaagaaggaaaacaaaacagaaaaatgtgagatgagcataaaataaaagaaaagatggtagaaaaatagaaatagaaaaaaatagatggtagaaaaataccagcggccgggcgtggtagctcatgccttaatcccagcactttgggaggccaaggcaggcagaccaggctgccaacaaggtgatacctggtctctaccacaaatacaaaaaaaaaaaaaaaaaaaaaaaacccaaaaaaaagtatccaggcttggtggtgggtgcctataatcccaactactcgggaggctgagacaggagaatcacttgaacccagggaacggaagttgcagtgagctgagatcatgccatttcactccagactgggtgaaagagcaaaactctgcctcaaaaaaaaaaaaaaaaaaggaaagaaaagaaaaagaaaaaaaaaatacatctgtagtcctagaactatttgctcaatacatttaatatataaatgtagaaattttcagaataaagcatcaaaattcaaaatacattgtttttaagaaatacataaagacacatatatcgaaaatggaaacagattttccgaaaaggattaatcaataaaaagcttagacacctaatttatttccagcaaaatagacattatggtcattatcattattaggcaaaaaatggagtaaaatataacagttctaaaacttgtacatacctggccgggcatggtggctcacgcctctaatcccagcactttgagaggccgaggtgggtggctcacctgaggtcaggagttcgagaccaatctgggcagcatggtgaaaccccgtctctgctaaaaatacaaaaattaaccagctgtggtggtgcacgcctgtagtcccagctgcttgggaggctgaggtgggagaattgcttgaatctgggaggcagaggttgcagtgagctgagattgcagtctccactccagcctgggttacggagtgagactctgtcaaaagaaacaaaaaaatctcgtacatacctgggaaaatacctttaaaacacgtaaagcaaaaatccacagaataacaagaagaaatacacaactatatcagcatggtgggagatttcataatgcctctttctttcaagacaccagacaaaagttagtgaagatagtgatgattaacagttgataaggtggatataaagactgtatagagaaccccaaatcagagtgtaaatttcatctgaagtacatggaaatgtcaatacatttcacatatttggtattattagggaaatactcttaaatttgtaacaagctagaatcaatagtaaaaacttgactaaagtaaataatttgtggatcaaagatgaattcaaaatggatggttaaaattcatagaaccgagtgataataaaaataaaaattaaaactaattggttcctgttaatttttgtagaagagacggaagggctgaaaactagtgagctaactgcccatctcaagaaaatagggaaaagtataataaatgcagagaaagtaaatggaaagagaagaattcaagagcagaaataaataaaaacaacatggaatcaataaaatttaaatgcccatattcatgttttaattagacaaatcaactgagagggaagtaaaaacaaatataaaatcttaaggatgaaaatgttataactacagttataatatatttttaaaatacagaaaatactaaaagctatgcaaataagtttagaaacttacatgaaatggatgaatttctaggagaatattgctacaaaaatgatggaaggggatatagaaagcctgaggagacagaaatttaatcacaaattaaaagtcttcctacaaagactatattagactgaaattattttacattcaaatttgaacacactttctaggaatagataattccagtcatcaacaaactcagtagaacatacaaggcaatatacatgtctggaaaatataaggttagaaaatttttttttttttttaccaaaatcagacaaaaatgaaacaggaaggaaaaccccatgccaatttcagtcataaattaataaggaaaagttctgaaacaaattattggccaactggatccaagtgtgtatgaaacagtgtttaagcttaatgttctccctttcctttctatattcactctttataatactttatgcagtgtcatggctttaaataaaatttacatgctaattattcccaaaatattatctctggcacagacttttgcccttaacttcagaccatatatccagccttctattgtgtatttttctctttggatatctcataggctactcaaacttaacatactcagatgacagctcctatcaaagctacccaacaccgttttctccacctctgttaatgccatctcattcctgaaatttctcataccaaaacttttaaaatgaactttgattcttgtctttctttaccagcctttctcttagcagatctgaaagatggtctcaacagatctagctgttgttttacttttatgttctgggtatatatgcaggtttgttatacaggtaaacagtgtgtcatggggggttggtgtacagattatttcatcacccaggtaataagcatactacctgataggtattttttctgatcctccccttcctcccattctctatcctcaagtaggacccagtgtctgttccctcattgtgtccatgtattctcattatttagctcccacttataagtgagaacatgtgatatttagttgtctgttcctgcattagtttgctaagtagaatggtctccagctccctccatgttcctgcaaaggacacgaactccttctttttgtggctgcgtagtgttccatggtgtatatgcaccacattttctttatctagtctaccatggagggcatttaggttgattctgtatctttgctattgtgaatagtgttgcaatgaacatatgtgtgcatgtgtctttgtggtagaacaatttgtattcctttggctatacacccggtaatggggttgctgtgttctgtttttagctctgccaaactgctttccacaagggctcaactaatttacacccccaccagcagtgtataaatgttctgttttctctgccatcccaacagcatctgttattttttgacattttaataatagccattttgactggtgcgagatggcatcttatcgtggttttaatgtgcacttctctaatggttggtgatattgagcattttttttcatattgttggccacatgtgtgtcgtcttgtgaaaaatgtgtgttcatgtcctttgcccatttttaatggagtagagtttttaaaataaatttgtttaagttacttagagattctggatgttaaacctttatcagattcacagtttgcaaaatatttctcccgttctgtagtttgtctgtttactctgttgacagagttcaacagaggaactctgtgaggaagttgtgtaatttaattaggtctcatttgtcagtgtttgcttttgttgcaattgcttttgacatcatcattacatcttttcccattcctatgtccaggatggtattgcctaggttatcctccagggtttttaaagttttgctttgacattttaagtctttcattcatcttgagttgatttttgtatatggtgtaaggttttattcttctgtatacggttagccagttatcccagcaccatttatggaatagggagtcctttcctcattgcttgcttttgtcggctttgtcgaagatcagaagggtataggtgtgtggcattatttctgggctttccattctgtttcattggtctatgtgactgtttttgtaccagtactgtgttgttttggttactgtagcactgtagtatagtttgaagtcagctaacatgatgcctccactagctgtatttctttgctccttctctcattaaatatagtctctgtgttccaaagtgaggaggaacaactgtgagattaagatttggtaaaagagaaaatgagcagggcaaatagagacaataaatctgtgatgatgaaaaaatgagaaagaaaggccagtaactgaaattgaatagtaatagggcagaaaagatgtgttgttgattttcaggataataaaaatttaagcatgtttgtagtataagggaagatccaatagaaagacataatatataagagcaaagtcttacaagataggatacacgagcaaaaaaaatggaaggattgactttggaagtgggaaagagaaaattgagataatacaaggaggttctgaggtggagagtagtaagtttgagaaagtttatccaccaaggataaatttatccctgagaagtaggtaactctgttttcaggttgtttaggactctgcacggtaaagggggttgggagaaaggagaactggtgtcattgaggaaatgagagtgaaaagtatttggaataggagctcttttgttttaaagattcgtttaaaatcaggagaagtgttagagaataatatcgtggactcagtagtagccaatgaagttattcgcaatggaaataatcagttatctgactttctcccgtaattttctgcaaaataattttatttagaaccacacacatacagccgcatagaaaatcaaaagcgaagggatttttctttgcgttatctttgattagcatctccaggttgtatttgattatattctgaaacaactaggattctagtctgaagtatcttcttccaactatattcatatttgcaagtcattcatctggttaccgccagtatgtcaaatgtgaatttcatgtatttttttttttttttttacaatctctctaacttaaccaatttaattcagatttttatgtcagtcttttagctgttggctgtttttcccaaaatgtcaggatcggctccataatttgggggactcagggaagaaagaaaatactgggtcccatactcaaaaattaagcattgtaagatggcaacagcagagcattaaaccaagcatgggctctcctaagcatgagttactgcataactgcacaggttgcatggctttgaagccaatttcgggtgtcatcttatacatttggttatttgtacacctgaaatgcttttgataaggtttgggagttaacaatttaggctcacttttatagattatcattacttgaaaatatttcattgaggataattaattaacaataaatgctttaatatttagaaaggtgaaatttaatcttattcttagtgtgttaataatggatatagcttctaggtttacatctttccatactttgaattcagggctttctttccttaagtagtaaaaaggatattggatatcttgaatcttgacttctcctaggttgaatgctctgcaaaaaacctttgtctttatataaaaattgcactgcaagcagactattatggcagacctctgtgttcaaggtgactgcaattttcagctgagtggtggactatgcaacttgttctcataataatattaattgaataaatggtcaagagtgattacattttgaggggaagaaacccacttgtgtaatatttacacatagataataaactcaatagcccagacctctttaatgtaagaaaaatagacatgaatgtgtatgctattttctttgtaaattagaaatttttccttctctatttcatgtatcttcttttgttatttgagaaagggatttttcttgtcctaccatcaattgtgtgagttaccttgattcttgtttttaataatattttaaaatacatcttgtattttaaatgtagttaccctctattttatagctacaggaactgaaagagtacatagccttcacaaaagggtctgtggtgaatgtgtttaattcttattttaatcaccatgaatcatggattttttctttgtaagtagtaattccattatttttagatataatttaccctacttcaatcaataatgtttccttggacagtcatatttacttttccgaaatattatataaaacagtagttaaatgtttttgttcgtctgtatgcctattatagaatattagcatttttggggtccagacacaaagggacacacaaacacatatatatacttgcatgtatttatatatacatgtatataagcacatatgtatacatataatcatgtactgcatttcaatatatgattaatatttaagtatttaatattcactctagacaaattatgtttgctcttggagggcattaatatctttgtgaatgagtgttaacatatccatttaatggtatcttgtcttcaaatatctcataatttgatagttgagttatttcttctgaagttggaatagcttttctacaagggcctaccaaaaaaaaaaaaaaagaataataaagttggaataacaaaagagggagttaatacataaaggaaaaccattaaggccgaaaaactaatcagttgtaaaagctaaatcagtagtatggattgataaagtagcattttagtgataaatttttggattgaagtttctcttttaagtttatcaatgtaccttttcagaaaaattcctcgagtttatatctttatgttaatgaaacttgtcaataactttaattatctatgatgattgacaactaatacttaatttctataacacacaatactgttctgagggtacatattcatctctctctttcatcttacgttttaccactctcaactttttaaaaccgttttctttgcaagctacttcatagattcttgagattgaataatcaaatctgttatttaatattcaggccaaatttctgaaaatgtttatttttttaaaaaaaatgataaatggaaaagggaatgttaaacaacatttctttgcagtgtattccagtgtccctagatggaatgaggaataaaaatatttttcaagttcatcatgctgtcttttaaatcataaaatgcatatatttattagtaatttttcattgaaagtatcaaagaaaattggagaatttccttactgtttctacctcactatgtttcgtatattctgaccagcattaataccaatttcatagcactctactgttcgctcttttttgctgtaagcccaactgattgcattttcttacctgttatttttcgttgttgttatttaagacatcttttctttctaacttcggtcttcatagaccttctcaatttcagctcatcaccaaaattacacagatagaagaatatagggactttggtgtacacatacccacttttgactccctctgattttctaatttagtagattttaattgaggctgagaactgtatttggaaaagttcattctgatgattattcaggtttgtgaaccccagtctagatagacctttatcagcacatgtataaggtgcactttgctaaggtgcattatgtgtcaggttcattcccactgtggaccagtaatttattcttgcccaaccactgctcatgacagatagatgatctctgtattccagaaatgaagctcctttccaattcctcaacaactaaaccaagcagaggaaaaagtggttttccttcacagccatagttccctgctgaagtagaatgaacgctttctaggaaactgcagcagatttttgatgacacggaaagggcatcactaggatcctcattatatattacctctctccctcacccgaaccacaatgttgacggaacagatacttcctgtggggaagatgctaagcagtcctgcatggctgtaggcattgtccacatcttaatcttcagctatatctgaggtatgacaagtttaacaatcctacaagttaaagcgtcacaccggaaacctgtttattcttctcccatgccaaataattccagcacgatgggtttcatctatagacgatgagaagatgccattgtggggtgaggacatagagaagagaggaagtttggaaccagtttatttctatttcagcaagcttaatgtattgtaagaacattttgtggcagatgaccctagtctgtaacaaggaatcgattgtaatgcatcattctgccagtgtttatctgttccctatgctcatataaacacacgagtcatctttctgcactcccaacctactcctaaagcactatacagaatgtttcgaaagcagaaggaaaagcagctgttccatacaccatgttcctgctgttcaaggtgcacatcccatccaaatgaatcatatcagagccaaagatcctggtaggagttcttttctacaaaactgcagtcttgtctatcctaacaacttggaggacaaaatattagaaaaccttgtaataaccttaggacacaataatgtagatactgactgagctagacctgaggactttttcaatgtagtgtggataagtaagatgacaggaagccataagcatactgtgccttgcacatcaacttctccagagccatgacaatcatctggagtatttgtgataaataaatattgttaatcttcatgtaattgggtaggatgaaaaaggaccagtcgtcccagacatcccaggagagaggagcatttttccagttgctcagatacaatttcaagttcgaaccaatatgaattacagttgaccacagaggccggcaaaatccatggcactgtagtccaagagaacctgaacactggccttagagtattatgagcctacatcacagtagaaggaatccagcagagatctctaatgcacatcagaaaagcaccatttctagttatcaaggctgtatttcacactgcttgactgaagattggaaactattttattcataggcaacctgtgtggccatccttacctggtctataaaaggaagtgtgatgaatttgcttcccatacatcatattaagtccagaaagccagagatgctgtgttgagtttctttcctgagagtctgaattcctaagtagagggactaacgagttccaaagttctttcactctgagatctttgtcacactactgtactgactggatatcactgaccttatttaagaggactatcaactggctagttcatctacattgtaaggactagtttgctcacaaccaccaacctatctgtaattggcctcagtatgctctctctcacttgggtacttctgtatttggctaattaacctataccacttggcttagaagcaccagctacattttttctaattttgacttctcatcttttccaacttgattttatccccagatttggacttttgtctcatgtataaactttatattttgcttgaacatgtggtctcaatgctgaccaagtcatccctagaatctgattctgtctcactattccatatcaggagacagcgacttaaatattttaattatttcctgtatcaataaattattcactgcctaaagtttagactttaataatatgaacacatgtgcagtcaaagagtacctcgccattgggccggaaaaatttcactgacttagggtggctcctgaaggtaccttgagaaagcttggatatgatgaatcctgtagacttattttatgtttactgaataatgcttcattcactttctttttgaagcttaaataaagcatcagtttgctcctgtcagggcagaagaccaatttcacttgtctacccatgaggataaatggatgcagcaagaatccagaaatgtcttagatatattactctatagctcattgaccattctatcaatgctcaatgctttacttgaaagtgatggctatctgatgtcaagttccattgataaaatgattcccaaacgttactttcaagtatgcttccttcagaggtcacagaagaacttcagtaacctgctaaaacctaaaacaggtgaagttcctattaaccatgacaccaagagttttcacatttatattctttcctggtaaagaaaattataggagctccatgctcacggcttttgagttttctcccaggtgtgttcaaacctagtgacattaacaaaacataaatctagaagcctttcgtgaataatgtaaccttctttattttatatttaaaggatatatatgcagacatgtacacatctttgtaattatttaccgcctatatccctattaaatacattaacaaatatgccacaggaaaaaccactgtaccaaagcccctcacaagagttatatttaaagtgggttaaagcaacatggttttaatttacttagtctttcttgtccaaggaacacagtgtgagacctcctttctttaggaaaaaataggatgaactaatttgaaaacaaagaaagcaacaaagtgaatcttgtgatgagctatgagcattggtaaattatttcttctgttgtaaattatcctcttctccctctgcttttctcttaatctccatttaattcccttttcaaaatcctaactctattctttttggaaaacatttcattaagctggtataagcatatctagacatctggaaatttttgtataacttttaaaggatctattacttaacaccatatgaaattatggaaaataaagtgttcctatctaatcaatctcaaagatttttcaagtgtacaatacaatgtgtgcttcaagtgtcagcttcttttttttttttttttttttttttttgagacagagtctcactctgtcacccagactgtagtgcaatggcacgatctcagctcactgccagctctacctcccgggttcacaccattctcctgcctcagcctcctgcgtagctgggactacaggcgcctgccaccatgccaggctaattttttgtatttttagtagaaacagggtttcaccgtgtcagccaggatggtttcgatctcctgaagtgtcaacttctttaaggctgtcatcttgccggttctaaacaactaaaaattgtaagaaccaatttctgagacaaatagaacattcttagtggtccttaaataattcctgatacttttatggcatgcttctttaaagaccttagaattatgcttcaggaatttaaattggttgttcagcaaagttaccaatcagtaggcaagttgttgcatttgacaggagcaatagttttcacgtggattatttatattcatgtatgttggtagacggatataaaacatgcaacttgcagttgcatgagacaaaagcatcaacatatctatcttagcttttcaatcatgtgatactactataatgctccatttttcacagatatttcttaagttctttatctcttcagacctcccgtaaaccattttctgtcttctgctggaccacattctagatgatctggatgtctatcattctcctttgcctttgctttatttgagtaagtgctgaattcgtggactgtgttagtagtttgatgcgtagtttcagccagatagatcagaaacatgaaatgcttttacatcatccaggtagatggcgccatgaatagatccctttgctttctggcctctgaggtaataaagacttaaatctaattgggttcagcttaaaatctcaatgtcatatttaatttaatatgcttccttgtttccagctcaagcttaagccatggtctaaaagactttctctggaaggcaagtgtggttagattccatcttacacctccactgcctctttttcttttttttttttttaactgcacttcagttatattattctccaatgtcttgggaagtaggagttaaggaaaataggcaaatgtctcctgttaactagctatttgtagctttgagtttatgatttgtgtgtgtgtgtgtgtgtgtgtaacagagatacaaagttcgggtttatttggggtacaagtatgggatctttaagaagtcttgcagaagctcttttgttttccccatctttaagaaggaaaatatgctctataaaaacatcttcaagcctcttgatcctgaggtactcttgctccataaagagtgttcctggtagatagctcaaacatggctgtcttcttccacgttcacttgacctattgagaaacgtttgccacaccaagcactggggagtacaggctgccccccttcttcactgtatcatttctcattcattttttacctatcaagtaggcatataatttctgaagcagacatcttcagaagcagagttggtaattaggtgtcatccctatctactctggactcccagaccctgtgatcagtggtcttggagctccacttacttgcatgggacaaaaaggttgaagtaccatcttcttttcccccttacggaataaacagagggagccatccctactctccctctgggccatgaattcagaagaccgattctttctaaaaccttcagagagttttagtataagtgggtatggtggagcaacaaaggcagggccagttttcccagctcttttgtaagccctttgctatgccctgctatttccatctcttagaatgagagagacttattacttgttattttcagtttaagactatacccaaaattctaagacaacagatagaattcaatgcattcatatccatagtgacagtttcacacttgctcttaagttaaatagaagagttaggtcaggaggaaatagtttatcaaaaatgatatacacccaccagtattcttagtacttggcacttgaacaaattgcaacctgttagtaggtaaaaaagaaacactaaaaggaaatagttggaccactgaactattgcttgatccactgaagcaagtgttgcttggtccactgaagttgagactctgggaaagaaaacttgactggtaaactctgtgaagtgaagcgtggttgtcaaatggagattaatgtcctctcatgggtctccactgtagtttctgaagggcaggttgagtaggatttggttttagcacatctcttgcaggactcctatcccaagacactttctataaaataaaacatattccatattgctctactttctgcaaggtacggacagtcaggttggggccaattaatgcactaccctaagcagaaacttcaagactttgtcgttgctttgctttatttgaattggaatttgggatttagttttcgttagttcatttactactaaaatcactcataaaaatgagggctttattttgacattggcaaaaatccttctttactcagaagaaaatatttaaaactgctggaaattgaaatgttttacatgtctacatcacaatgatgaatacaatgatgagtatttaaacaccaaaaataaaagtgtcttattacgagatgattgtaaacagtgcacccacattcttaatccatttgcaagcataagcttacccatcacctcataaatgcagtaaaattgctttttgtattgagtttaataagtatagtataggatacctagctcctttaatgaatgtgttttttgtaaaatattattaaatgattttttttctaatttggctttttaaagcatgcattcatatgttaaatacattttttggtttcaatattcggttttttatttcacatgcagagttttctcttccagagtttcttagacatgctacactttgatttatgtgtttgtaatattgtggtacaaaggttagtacattatttttaaaatggaaatgtgagaaactgtcaattcattgtagagatgactttacattgccagcaaaactcattaaactcttaaaactttttcttaaacttattttatatttccatagtactttaaagatataaaataattaatttgtgttaacttttacttagttttaattttcattgaaaactgggttaaaatatattatgtgtttttcttggtaaccattactaggattgttttctatttttatatttttgtcattgatcgccagttattaaaagatgtctttctaactttccttatatttgctgtttctgtctagctatataattcctcttactgctaagtggattagctaaagacatgaaataacattttaaaacaacagcggaacagtattctggaacaacaacaaaaaatcagattatggttgaagactttctacaaacttcattcaatgagacagcacaggtcaagcgggcagaaagtcagaaaattcataagcctgacattccatcagggtgcgcctaatcagatgtttagaaatagaaggcagcttatgccatgactagttgaaagaattctgcaagcttgcattgacatgaggtcttttcaatgactgagataatcaaggaatctgtgtaaatcagcctctcttattgactgtcaggccaggaaaagagccaacccacccgaagtcaactctgccatcatttcttaagccacactgttcctttcagctcatagaatctcatgaatagaaaaagttaggtttctaaaaagaattttgaggctagatatgtggtttaatgttattctatattacatcctatacaattaaaatctacagatgtgccttgtagagtacactgtttttgcctttagccagaggaaggaccaaatttaatacctggctaggcaattattacacgctgtgattggaagttttctccaaccacctgtcacaatgctgaaattttatcactagagatccatttctttggaagagctgtgggtaggctgcagccagtctcctctgcaatagaggctctgattatagccctgaacactgttatctgaaatagtaaattacctgatgtaaattttagttgaaattttgactgagaacaaaaggaagctatgtttgaattggaatatagggcaaagcctcggtcaccaatcttggatacagaattttaatagaaagagattaaaattttctccaaataatgtcccacccccattctgacacttttaatacaaaaacagatagatttattgtccaaaagatacatctctgagcagtggtgacctttgtttacaatttcttctgtaaatccattttcgtctttgactatttaaagttttctgtttttctcattaaaatttctccttatacttttcacccagtcataaataaagctattgggcttcattctaggaactggtattgagcaatgaacaggacagccgtaatccttgaactcattagagttgatagtctaaagtaaatgcagaccattaatgggagattaaatatgttatggcacatacaaagtgcaagaaagaacataatgtcatgtgagggaatgcataaatagcttaatttagccatcccgtaacatattcatatattaaaacatcatgttacgtgctctaacttgatagaatttttacttgtcaaatcaaaaaaatacaaaattcaaagaacatgcaagaattacctccctgaacttagaaggtgccagaggtagccacttggaagagatgtccactacattaagaagataaatgtaaattagccaataaaaggaagtcagaattgagattatgccagtaaaagggaacaacatgtttaaggccaagaatcaagagggccacagtgtaggttgggaaataaaaaataaaatttctgtatagctagagcagggagtaaaagacaccagcaggacttatattatgaagggacttttaagccacattaaggataaagcttttggctgcgcgcaatgtctcacgcctataatcccagcacttagggaggccgaggtgggtggatcatcttaggtcaggagtttgagaccagcctgggcaaattggtgaaaccctgtctctactaaaaatacaaaaattcgccaggcatggtggcaggtacctgtaatcccagctacttgagaggctgaggcaggagaatcacttgaaccagggaggcagaggttgcagtgagcagagattgtgccactgcactccagtctgggtgacagagagagactccgcctccatctcaaaaaaaaaaaaaaaaaaaaaagaatagagcttttatttgaaggacagtaaagaatcactagagaattttagacaggaagccccaattcgttattgagagaacacattgcagctgctttacaggtgggatgtggcagagtaaaatgccagtgaagaaactgatagcatatttgaggtaagatatagtaatgattttaactagagtaaagacaatggagagagagagaaaagattggaatcaagaactatttagaaggtataataaataattagtgattgactgattagatgcaacatgatgaaggacatgatagaggaagtagaaatatctagaattacatctaataaagggaatcattatttgtttttcgctgaaaccggaaaaaatacagagaaggaggaaaagcaagttggggagttgagaagtaggtgagaagagtatatgcaaggagttcatgtgtgggagtgttagcttttggtggttgcagaatattcatgaggagatgtccaatagggtgagataacatgcaagtatggagatcaaggggagatctggacttgagagatgtagagttgagagttgtcagaatgtgaggaggaattgaagttaaggtatgggtagaatgagaagaaaggaaagcccaggataaaatcttaatggagtcaaaatttatggtacagggagaagtactgggaaagccttccctcttcctgcagcatcactaaacttcctgttcttttgccttagtctagatgcctttaactgtagttttacttgggcaaagctgtgttataggctggcttcactgaagaataatgacatcactaatatttttaaagcttaaaaagtatagtatttatgtaatatctaatattctatatataatataaaaaccaagatcatcttaaaacctcagtcatgctctgtgggaaagaaagttatattgtacctgataatcatgcctttacattgtatattaaggaaatgtattttaaatgacacataatgaattcccaataagttgcctgccctatttcttacttttacaactactctgttaaaagtgaacagatccttgaagggagactttccaatctgtgcagcatggtatttatacttgaacattattgaattatcctaatcatacttatagttacaatcaagattaattgcagctatattaggattacttattattttttctacttcagcagtaacataaacccaattgtacaaacaatttctgtaatccaaattgtgaaagaaagtagggagaaaaaagatcatgcaaagctggttgaaatagtattcaaaataaatctttaaccagactgttatctaaaattctgtttttgacaaggagctgattctgaacagattgtacatgtatctcactggtggaagcagattatctgtcttgaattggattgtgatgacgatgaccctattctaagcaaaccaaatctcttgaactatataatgagatcaggaggaacattcgacctgagaaagacagattgcaatgactgagatgattttgctaattttttttccagcctatttccttaatgtacgtgatattgtgattgattttcatgcagagatccctgatcctatagttttgtttgctatttatttttctccttcacattttttttctatcaacagagctgaatgagtgccaggaagctgcgaaatctgtcttacaaaaaggtgattgtggaagagtctagaatcttcatttattgttcagcaggattacagaaaagctatcaagagtaaacatttaactgatacactcttattccttctttttaggctgtaaggaggcaaaagttgcttgaacagagcatccagtctgcccaggagactgaaaaatccttacacttaatccaggagtccctcacattcattgacaagcagttggcagcttatattgcagacaaggtggacgcagctcaaatgcctcaggaagcccaggcaagtacatctgggaatcagcttccattcttttgtttttattacttcaacaaaatgttgcagtgtttctaactttaaatttattcaactagttttccatggggttgttttgattcactgatttgactatttggaggtaggtaggaagaaaagggggtctagatcattagtctaagatttatttttttaaggatgtaatggaggaatttgaaataaagacatttcaaagacaggagcaatacgttctggtgtttctgacttcaaactatactaaaagctagagtaaaaccataggatagtaaatggtaaagaaaatgttttttggccgggtgtggtggctcacacctgtaatcccagccctttgggatgctgaggcccacgaatcacaatgtcaggagttcaagaccagcctggccaacatggtgaaaccctgtctctactaaaaatacaaaaattagccaggtttgttggcacgcgcctgtaatcccagctactcgggaggctgaggcaggagaatcacttgaacacgggaggcggaggttgcagtgagccgagattgcaccactgtactccagcctggaacagagcgagactctatcttataaaaagaaaaaaagaaaatattttctatggcattgttggaaagcagtctcaaacattttattataaactcctcgtttagtcacatggtctatattgttttataaaaatgtgttagttacaagcagtgagtaacacaaaattatcgatataaatttacacctcaattattaatgatcatgctcaatatagctacatgcactcactcccatgcttcattcaaacgaaaatataaaacgtgtttacctgtttttctagaatgagaattaaaatagtgttgaaaataaatctgagttgacttttaaatgagtaaattttaggccataactaaatttacattcactgtaagaagtatttttaaaatgctgttctcattttttaattaacatttaaacatatgtgaagttatcataggtattatttattcaaaagtctttagggttgtgtgatcgcaattactagatctgcttttcaaatcttatatacatgttgtgaacccaatcaccaagtccatgctatgatgagaggagcactagaaggttagctgcaaatctcaaagccttctccctgccagttggtgaagatgtctgaagtttttcactttaaaatgaatttgggggtgatatattagatttgtagatcatggttacaatgcaattacagttaatgaatcaccgttaataggtgttctgggcaacagtatacacaatagcatgagttaatttaccatattgtctaactttgaccaagaatgtccctgataatatgtggcagagtataggtagttttgataggcttaaaaagtccagggaatattatttccttatggagtgcatacaattgcaatagtggatgaagaaagagaattttggggagaatcctgatgataaaatcctcatcatagttttccactgggcaacaagagtaaatattgtagtagaagtgagggataatagtaaacatacttgaggattcaatttttaatttgtcttgatatataatgattgtacatattttagagggtaagtgtgataggtttatacaaacctactccagtatatatatttttcaaacttacacaagccaggttctctagaattaactattcctaagtccgtcccagtttgagtcataatgaaaaaggttttttgatataaaatatttatacatatttatggatacaacatttatgtaatattttcttacatgtatagaaagtgtaatgatcaagtcagggtatttagtgtgtctaccacggcagggtttagtaaaatgcatgataggaatgagtaattgtttctgaattgagaagaactacatgactataaatgaaatacagagtagaactgctttcatttaaactaatgacatgagttttgaaggaatgtttgattaaaaatgcttgtgacgttctgaatggaattaaggaaaaatttgagcagtatgaatactagacattaatattgcaagtttgtacttcaaaatgcataaagaattactttgtgacagacttgcggaatgaaattatgagtagcaaatttgataggcaaagctattatactattgtctttcaaggaaaattggagcttttagggcgaagcatctttagttgaacaggttgtgataaggggcactgtgtgttttttcttatttagaaatggattcaggattttataaacattacttgtttttaatagcaaaatattttgcttggtttttctaaaaaaatactacaataaaaatgttattaactacatcagtagaaaagtactagtaaacagcagaacacagataaattatgaaatttcagatctacttcaagaaagagattttgggcattcagatcaaatctattttccatgcatttcaggtcacacctgcattatcaacatagttcttgacattgagtctccccaatggtaatacataatattggagaatacaagccatctgaaagctcttaaaacattcttctgctccagggttttattttaatatggcagtaagtgaattgttttctagaacagagttctcaggtactcagatttgcttcaaggattatatttcctgaaaagcagctcgaaattcccatgaaataaaatagagagtcaaaagttagatagtgaaataacataagcacagtgtgtaagatgaaggatccactaagaatgccaccaaaatgacattttaaatatagagatggggtggatagatggatggatgtatggattgatggatggatagatagatagatagatagatagatagatagatagatagatagatgaaagaaagaaaagaaaggaatagaatagggactaacttcaatgcattgtattaacaaaaatgtgtttctataaatttgcacttaaagataaaaaggttattgctaattaaaatattagtgcactataatttcttttctcataaatggtatatttagcttaattcatcacggagaagcaggaaaaaatgtatgaagttaccatattaagtcctctttgaaatacctgctcagattttctgtcatatactggtcacgcagatttgtgggtgtctgactccaccgtgtggtgcactgagagttttgctagttaatttgaatcttttagagcattattttttctgcattttaagatcgtttgagatcctcagatataaaagctatggcactaaggaaatgcatactgtatgtacaactttctgacaaccatactcttgttatatataaaagtagatgtagatcaggatgcttctttacattcacattggcatttattactataggaaagaaaagagctgctcacttccttagtgtgttaattgatcagttatttctctgggccctcagattctgaattggatttaaaattatgttacttattttagtgacatgagcttacctacagaagcaaagcttacacttttagaaaataaagctgcatgctgccaggatgtaacagcatgtgttgacctaggagtattttatttcaaaagataacacttagccaattcacagtctttttttttaatactttaagttttagggtacatgtgcacaacgtgcaggttagttgcatatgtatacatgtgccatgttggtgtgctacacccattaactcgtcatttaacattaggtatatctcctaatgctatccctcccccctccccccaccccacaacattccctggtgtgtgatgttccccttcctgtgtccatgtgttctcattgttcaattcccacctatgagtgagaacatgcggtgtttggttttttgtccttgcgatagtttgctgagaatgatggtttccagcttcatccatgtccctacaaaggacatgaactcatccttttttatggctgcatagtattccaaggtgtatatgtgccacattttctaaatccattgtatcattgtgagacatttgggttggttccaagtctttgctattgagaatagtgccgcaataaacatacgtgtgcatgtgtctttatagcagcatgatttataatcctttgggtatatacccagtaacgggatggctgggtcaaatggtatttctagttctagatccctgaggaatcgccacagtgacttccacaatggttgaactagtttacagtcccaccaacagtgtaaaagtgttcctatttctccacatcctctccagcacctgttgtttcctgactttttaatgatcgccattctaactggtgtgagatggtatctcgttgttttgatttgcatttctctgatggccagtgatgatgagcatttttttatgtgtcttttggctgcataaatgtcttcttttgagaagtgtctgttcatatccttcacccacttgttgatggggttgtttgcttttttcttgtacatttgtttgagttcattgtagattctggatattagccctttgtcagaggagtaggttgcgaaaatcttctcccattctgtaggttgcctgttcactctgatggtagtttcttttgctgtgcagaagctctttagtttaattagatcccatttgtcaattttggcttttgttgccattgcttttgttgttttcgtcatgaagtccttgcccgtgcctatgtcctgaatggtaatgcctaggttttcttctagggtttttatggttttaagtctaacatgtaagtctttaatccatcttgagttaatttttgtataaggtgtaaggaagggatccagtttcagctttctacatatggctagccagttttcccagcaccatttattaaatagggaatcgtttccccatttcttgtttttgtgaggtttgtcaaagatcagatagttgtagatatgtggcattatttatgagggctttgttctgttccattgatctatatctctgttttggtaccagtaccatgctgttttggttactgtagccttgtaatatacagaaaaagagaattttagaccaatatccctgatgaacatcgatgcaaaaatcctcaataaaatactggcaaaccgaatccagcagcacatcaaaaagcttatgcaccatgaccaagtgggcttcatccctgggatgcaaggctggttcaatatatgcaaatcaataaacgtaatccagcatataaacagaaccaatcacaaataccacatgattatctcaatagatccagaaaaggcctttgacaatattcaactacccctcatgctaaaaattctcaataaattaggtattgatgggacaaatctcaaaataataagagctatctatgatgaacccacagccaatatcatactgaatgggcaaaaactggaagcattccctttgaaaactggcacaagacaggggtgccctctctcactgctcctattcaacatactgttggaagttctggccagggcaattaggcaggagaaggaaataaagggtattcaatcaggaaaagaggaagtcaaattgttcctgtttgcagatgacatgattgtatatctagaaaaccccattgtctcagcccaaaatctccttaagctgataagcaacttcagcaaagtctcagcatgcaaaatcaatgtgcaaaaatcacaagcattcttatacaccaataacagacaaacagagagccaaatcatgagtgaactcccattcgcaattgcttcaaagagaataaaatacctaggaatccaacttacaagggatgtgaaggacctcttcaaggagaactacaaaccactgctcaatgaaataaaagaggatacaaacaaatggaagaacattccatgctcatgggtaggaagtgtcaatatcgtgaaaatggccatactgcccaaggtaatttatagattcaatgccatccccatcaagctaccaatgcctttcttcagagaattggaaaaaactactttaaagttcatatggaaccataaaggagcctgcatcgccaagtcaatcctaagccaaaagaataaagctggagtcatcatgctacctgacttcaaagtatactacaaggctacagtaaccaaaacagcatggtactggtaccacagtcttaaattaaattatatggccacagcatcaatctacccagtgtcagctcatttaatgagagattttattaaagtacaaaattaagaaaagatttattgaaacagaataaagcaaatggggaaaactcttctagatatggaaatatatcttagaaaacagaaactaggattatttccaaagtactatgattaaaaatgtaacaacctatgcgtgttccttggaaataaataaaaaattaaatcacgaaattgtgtgactgcaaagaaacacatggaacaaatttagtcatttactgttcaatttttcagaactatatattgaagcacagagtttagttttggcacctaaaatcctatagcaacagtctaagtaaccatgctgagccccggagcaatcaaatcaaatctttaggtggatttggtcttcagaatttttggaaacttttttattcattctaatgtgtagctaattggagaatggctttggatggttccctactagtaatgactaaattgttccagagtatttttcatacgacattttctatcactcttctataaagattctcttctatgactgtgtcaacgtttcaatgggagggagtcagagtggcaatcaaactactggtgagattctctcctattttgattttttcctctaatggaaaatgggtgatggaagaaaatatagctgagagctatcgcacaaattttaatttagacaaaaagaatgttcaatatagatgtttgaggctgaactctgcttggctttcttcaattcatttttttctaaccccatttgttaacatgtcaattaacttgcatatggctcttaatcattttaggggacagtgacaactatgtttaaatagctacttaaatgtcttgcaatttttaaaattacaaagatactttcacatacatgatttttttccttttctactaattttagttttgaatctttgatatgtaagaacaacccaacatgggcacctgttgaaagtcaccatgtccttatgtgttgatgcacattttgtaggggaaaacatggccctgttgcttaaattactgcaagcaagagcggagttgcttagcagtggctccagtagctttactgttctatttgttttttcccaaagaattctgatctcatttttttgtaacctcgtgtcccacatagtagatttatgagcaggaatagaggaaggaaacaaattaccttcaaagaagagtgcctcataattaaatattgaaaaatactgccgtggtttgctcaccaagctaggacgtcaggtgttccagagtccactacagaccagacttcctccttctctttttccctcccattaacaatgtgagtacaatttagaaaagaggggatttttaaagcaaagaaagctattaatttaaactaattacgttaaatgcactttaagaagaattcgtaattgcaatcttcccgtgtttatcaaagaagctaaatcttataactcacattaaatataatcggtcatctttaaatgttaacattccaagctatcaaaatcaatggcttaaaaataaagatataactgcagattttggtctatcagattgagcttttgatttcattaaggaataaaacagactcttatagtgtaaataggcatatttgattgccaaacgacttggaacagtgtaactttacagtctgctttattgatttatgagttagacagcagaaacctgcaaaggggaatttatgtggtaattggataatttagtcaaagaagaaaaaaatggagaactaacccagagatttgggttcaaatattaaaacctatctagccatagatgtagactttttattttctttttacacagcccagtagatggtaaacctagtgcatttaattttgaatctgttctaacattgaaaggccacccctatgtgttgctatacagaacttattactctccatttaagaataacttgttagtttcatatgtttaatagtgtgggaaacagtcataaacacaagttgtaggaaatgtaaaatactagaaacttgccacacgtcactgactgtacttggacaacctgtacattattatgtcctcactggctatatgataaagatatagatttctttcatattattttgatgtgtacattttaagactgcaattaaactatagtatgcttttgtaaaaatctatctacaaattctacatataaggatgaaattattaaaattaatggcaaaaactgcaattacttttgcaccagtctaataacttcacgctacagccacagtgaacactattgcaacactctgaatattttgaagtgatccaaatttatcctattatttcccaattttgtcttatgcaaatgaatatttacttcaaagatagcacacagaaaatttatcgatctaaaatgcacagccagataacacttagcataacatactatgttttatttttctttcagcgtttatcgtgattgttaaatcttttatttgctttttaaaaattttccccgtctattcccattctctaaccactaaagttcagctgtaagaccgtgggccacccagcagatttctaacaaatagctggcaaatttattgaattccactgaggtttagtcactaagtatgtgtcagacaaatgtgataggcagtgtaaaatttaaaatgtgaataagcctaacgtggtccttgccatcttgccactcattagatagcaccaaagaaagataaaatttagaaattgctggccacttacgtttaccataatagtgaagaaccatttttccaatggaacttaatagtatcataaagacttcttgtcataatgccttatgattgcccaactttgaagctctgaaaacctttccaaaatactttgaatagtataaaatggaactcttcacatgaaaaggaaagactgatggaaaatatatattttagcctctttatgtattacctagtttttaaggattataccatgtgaatatctaatattttgaaagcattcacgttatttggtaattacagcagcctaatgaagtataaaagttgtgtttaaaagggaatatttgaaaacactagatgaatggttgaggcatgggttgagaacaggatgtgaatgaaaatggacacacaggtttaggggttaataaaaaatgtcctaaagttggattgtggtgatatatacatgactctataaatttcctattgttcattgactatatgtttaaaatgaaaattttatggtatgtaaattgtacctcaaagttgtttttaaaaccctattgaatagagaatatatcaattactattatatatttaaaaagataatttaaggttaccatcaactttttcactccattattttgatgcatagcaaagggtgaaatgtgatgaatgttgttaaataacctggaattaacttaaatggtagatatttattgatggcctactgatgtccgcaagatcttacatagtaatatcataatgttcccattgtttacattctattccatttaatgaattttaatgctaaagcatttttactgaagctgatattttaactcagatctgctttctccactttaataattagccctttattaagtgaaaattaacctagaagtacaatctcccaattatttctaggcagcattccaaaatgttccctagagtttgatttactcatttatctattttgaaaagtaaccataattacttgaaaatacgttatttctattttcaatgtttgtaggcacgtagtagatgtataaacgttacatgagatattttgatacaggcatgcaatgcgtagcaatcaaatcagggtaaatggggtgtctatcaccttaagcatctatcctttgtgatataaaaaattcagttgtactcttttagtttattttaaaatgtagactcaaattacttttttattatggtcatcctgttctagcaaatactaggtcttgctcattatttctaatttttgtacccattaaccatccccacttcctccccaacccctgactacccttcccagcctctagtaaggatccttctactctctatctccatagttcaattatcttaatttttagctcccacaaataactgagaacatgggatgtttgtctttctgtgactggcttatttcacttaacgtaataacgtacaattccatccatgttattgcaaatgacaggacgtcattctttttatggctgaatagtactgtattgtgtataggtaccatattttcttttttttattattatactttaagttttagggtacatgtgcacattgtgcaggttagtcacatatgtatacatgtgccatgctggtgcgctgcacccactaactcgtcatctagcattaggtatatctcccaatgctatccctcccccctccccccaccccacaacagtccccggtgtgtgatgttccccttcctgtgtccatgtgctctcattgttcaattcccacctatgagtgagaacatgcagtgtttggttttttgtccttgagatagtttgctgagaatggtggtttccagcttcatccatgtccctacaaaggacatgaactcatccttttttatggctgcatagtattccaaggtgtatatgtgccacattttctaaatccattgtatcattgtgagacatttgggttggttccaagtctttgctattgtgaatagtgccgcaataaacatacgtgtgcatgtgtctttatagcagcatgatttatagtcctttgggtatatacccagtaatgggatggctgggtcaaatggtatttctagttctagatccctgaggaatcgccacactgacttccacaatggttgaaccagtttacagtcccaccaacagtgtaaaagtgttcctatttctccacatcctctccagcacctgttgtttcctgacttttgaatgattgccattctaactggtgtgagatggtatctcattgtggttttgatttgcatttctctgatggccagtgatgatgagcattttttcatgtgttttttggctgcagaggtacaaggaggaactgataccattccttctgaaactattccaatccatagaaaaagagggaatcctccctaactcattttatgaggccagcatcattctgataccaaagccgggcagagacacaaccaaaaaagagaattttagaccattatccttgatgaacattgatgaaaaaatcctcaataaaatacttgcaaaacgaatccagcagcacatcaaaaagcttatccaccatgatcaagtgggcttcatccttgggatgcaaggctggttcaatatatgcaaatcaataaatgtaatccagcatctaaacagagccaaagacaaaaaccacatgattatctcaatagatgcagaaaaagcctttgacaaaattcaacaacgcttcatgctaaaaattctcaataaattaggtattgatgggacgtatttcaaaataataagagctatctatgacaaacccacagccaatatcatactgaatgggcaaaaaccggaagcattccctttgaaaactggcacaagacagggatgccctctctcaccactcctattcaacatagtgttggaagttctggccagggcaattaggcaggagaaggaaataaagggtgttcaatcaggaaaagaggaagtcaaattgtccctgtttgcagatgacatgattgtatatctagaaaaccatattttctttatccattcgttttttaatggacatttaggttgcttccaaatcttgacttttgtgaacagtgccgcaataaaacacgggagtacagatatttcttcagtgtactgattttctttcttttgggtatatacacagcagtgggattgctggattgtatggtagctctgtttacagttttttgaggaatctcaaaacttgttttccatagtggttgtactagtttacattcctaccagcagtgtatgagggttcccttttctccatatcctcgccaacatttgttattgcttgttttataaataaaaccatttgagttgaagtgagattatatctcactgtggttttgatttactattctgttatgatcagtgatattgagacccttttcatatacccgtttgtcatttatcttctttcaaaaaaaagtctattcagatattttgcccatttttaatcagattattagttttttcctatagagttgtttgagctctttatatattctagttattgatcccttgtcagatgggtagtttggaaatattttctcccattccatgggttgtctcttcactttgtgggttgtatgctttgttgtgaagaagatttttaacttggtgtgttaccatttgtccatttttgctttggttgcctgtgcttgtgtggtatggttcaagaatttcttgcctagaccaatgttctggaggtttctcccaaagttttcttgtggtagtttcataatttgaggtcttagatttaagtatttaatccattttgatttgatttctgtatacggttcaagatagaggtctggttttattctgcatttggatatccaattttcccagcaccatttattgaaggactcctttccccaaagtgtgttcttggcactttgtcaaaaattaggtccctgtagatgtatggatttatctctgtgttctctattctgttctattgggctgtgtgtttgcgcttaagccagtaccatgctgtttcggttactatagctgtgtagtataatttaaagttaggtaaagtgattcctccagtttcattcttttttgcttaggatatatttggctattctgggtctgctgcagttccatataaattttaagattgttttttctatttctgtgaagaatgtctttgttagaaaatacattattataatgaactcttctattatcgttgtcgttattatgactaagcgtaacatcgtttctcaggtatattacaagtaataattatacacaatgtccaattttttatttttaaacggttctgtggtcaagattacgcagaaaaatttatatgctttacttctctgctggagatttttgacccacttttttgtattttcaaaaataaaagtttaacctaaatttgataagaagccacagacactttttcctccagaaatatgttgatataccacaaaactcatatgtcaaggaacaatgtaggggagacactgaaatagactgtttcctttggcctattgcatatttctgataaaagtcaaaacttctttagctgacaaaatttaatttaaaggtaatatttttctaagtaactctacttgggggggggggtttaaaaaaagagtagtacaaagctgtgtgaatttcttctttttttacttgttgaattattataaagtataacctgaaacttttcaacattttttttctatgaaaataattatatttcttgcattttcctatctttggaaagtacatatcatcccaaatcttttgatatattttgtttctttcgttttctaagtacgtgtgatatgtggccatttccctttcttgaaaatagcaatttcaaaattactggctctttcaaaattactaatctaacagtggtacgttcctccatcaatcagtagtctcaacatgaagtattttaatatcttttactaaaatattttcttattttctctaaatttttcctttctttgacaccacagaaactccaataattatttgatatcattttcttcattctgttaagtactttagcctgctgcagtataattttgctggccattttctgttactatatatatgagaatggtttgatgaggtaaagcaagattttaaaaacagccctgctctctgctcagttaactgtaaagtcctatatttaaaatgtgattaatgtttgaatgattttttggttctataattttgccctttaccatattcaatggaaaaatggttaattcgatttcacttgttttattttcctactttgaatatatagtgctgtgaacatagttactgcatgctcaaatgccttttttataatggaatgttgagataagctcaaatgtcttttttaatataatggaaagatgatataatttgctttatattacttgactttgatgaagaaaatctagtgattctgaaaggtactggattgagaacacctcatagagcatatgtgagtgttcacatcagtatccgtgatttgctatgtcctctcactttgtttccattagagtttactgattttatacgaagccaggctgataatttcacaagaatagttgtatgtggttggcttatttgttttcttcaaatgcttactatccatatccccctagatgtatatattaggtgaaaatataactcaaattatacatccctcacatctttaggacaacttagaaatctagtagacaagtagagagatcattttccttcagattgaatcttctatccccaatgttttcttccacaattttattttctttcatcatattctcataatgtcaaaaaagaaaatgattacattgtctttttttatgagtgatttttacataggagattgttcttcccagaagtttcaataatattctgttatttgtacaagttacttttctatttcacaataagcctgcgctaaagtgctaagcattttttacttatgtggttccagaatacagttctgacgaggttaggtaaagtagctggtaaaagatatcctaagtacaagctaaaagttaattacaatttaaatgtaaattttgtggaattaatgtgtaaagatgctggcaaatatgtgtcatgcatgttttacagcttacccatagtagaatcaattggaaatataaagacattttattttataattttagtaatgaattgaattattattaatgaatatgttaagtatatttgatagcctttttccaaatctacttgtatgatgcactctggcaaaaaaaagcaaaaggataacatctacaaagtgttgtatgattcttggatatacacaatatatattaataaatattctgagaagttctgtggtatagacacatgttcatcttcaatttccaaaatatgtttaaccactgagttctttttaatgcataatctactcaatgcataaagaaaattttatctctaatcatattggaacagtactacaaatatgcgaatttcactagaaatgcctatacattatgataaaagtctcacttttatatgatgttcaatgatgatttttttcaatgttaataattttagtggtggcgacctttctaaaaacacagaagctcatcctcaacagtttttctaactatttaatggaaatatgtatatttcaaattccatggaatgctttgccttgagctccaaattgcccaacattcctctcacaggttacttggtccttcatgtcccctgccaacagataaaagtcgagtgtttggttatatgtaagctgttgttgttcctattatttatgacttatgacaacaatatgactcatttgggaaaatgtggaacttatcaggaaggcctgtgttgcagtgatcacttacgctatctttgctttgctttgtaatgctgagcttctagaatttccaggggcagtctttgaaaaaaaaaattataaatagaaaattaaatgctggtttatagaagggtctcttgcaagtgagaggcactgaaacttaaggttctgtagcttcatactaattcctcatctagatagtaattcttactaactcacattcagtctttcctcccattaaattaagcacacacactctgcatgccccaagcctaatctttgctagcttgtttcctacagcctaaaataagatcctatattcttattctctgaccctccaaaaccctttctcagccatatgctagttaaatcatgtaaatttcctaaaaatcaccagattatacagcagatattaatatttatctttctgatcacagagcatgggtttttctgtttttaaaatttttttaaattatactttaagttctagggtacgtgtgcacaacatgcaggtttgttacgtatgtatccatgtgacatgttggtgtgctgcacccattaacttgtcagttacattaggtatatctcctaatgctatccctcccccctccccccaccccacgacaggccctggtgtgtgatgttagtttttctattacattgcatatatttctgctttgtaatttacttatatatctacagtctgcctcttaaaataaggcttctgtaagtataggggcaacaattttgttctcactgtgtggaattgagtagtagaagctgaacgatttgttgaattaaattgactaaatgctatcaacatacgaataagattaaatttctttttttctcacaaatgtccatttggaggatacttttattttaaaatcataattaaagaggcagtataattgttagagggcagcaagtttgttacttcctagttatgttaccttgggcatgttgatgtttctaccttcatttgtacatgaagatgataaatacttatgttaatatgattaggagatggaattaattatataaagtgttagcacataagttcccacaaatatctgtggtggtgaggatactgatgatgatttcttttctttttttttttttttttgtttttttgttttttgctcttctttgaccactctggtataaaaggttaaaggactatgtgtatacttcattttttcctctactaaccttggaggctaaggggatggaaaaacttttaaatacatgtacacagatatgattacagatgtataatttgggccctctaccctctctgagtgtattcttatttttttaaatcagtttcctttcacagtctccacaattgctattgaacttttatcactttgatttaaattccaccttgattctctcctctcatcctcagcagatacctagggttttgtgcttacgaggaaatgacatgttatatcgctgataacttataactaaatatttgtgcaaataacatggacaggtatttttacatatactgtcacatctgatctttttgaccaaaaccaatgtagttgactactgaagaaatgagaatttctcagataagaaaacttcattgctggcttgctattatcattcttgggctagacatgagaaaatcaaggttcagaacatgttgatgctttgcccaaggtggcaagagagagccctgaaatttaaatcctggttactgttaacatgatttcaccctgatactctgagagcaccatgtaggaagcattcaacttcttgcgtcttcacatcttacttttgttttctgaaaaagagccacctctcctcctgttgatattttccgttggccctgagctttgtgcttcactctggttttcttgctttaaacaggtttttttaaaatcaagtttatcttcttacatttaaaaaaaatcactttatgtgttggcttctttcatgtagccttaaagtatgttcaagtctgattgacctgaattttattatgtgtggagacaaaagtctgcaaaagtaatttaaactatttttattagagtgctccttgatccttaatcaggccagcccttgaaaatacgatttctgctctcgtcatccacttctctcttctagctgcaatggtcattgacgagctcatgtaccctgattactattgatcccattgaacctatctcaaactgtcactgttgacctctctctctcattcttaaaattctcacatcaattgatgtgagattttctctcttttctagttcttcttttctttctctttgactgttctttctctttatttggtgcttttctttccatgtcagttaaatttgtgttctccatggttctctctttgttctctctttctgctttcctctaacgcttgaaaacactgaaaaaatacatattatacaaatgtaccctgtttccctctttctctctgtacagacacacatagtgattattaaaatgcaaactcacttcaacatactgctgatttacagtcgcatttcctccctatgaatttccttagttatcggatcaaatattagcaataaaactactgttatctgtgattatgatcaatttcaaattttgaaatttatcttcgtgatcaaaatagtggtaaccattcatttgggacataaagttatttaatacctgatttctacctacatttcttgttaaattttgccaaactccttatgctcttcagtgccctgtctccacaccttgtctctcttcaaccagaaatgcttttgtttttacaactcctatatccttgcgtatccagtatgcatatacagtatttaggactctcatttagaagtaacaaaattgaagtaactaaagcaaaacaaatgagagagaaaggtttttcatatggaaacaggaatgtgtcatagaatccaagggcagtaataaagttttgactcaagaagggactaatgcctgtgttttggttatttatgatagccatttattattcccactaatggttttgcgtgttgagaaagctcacctggatggttctcttttgtggtttcttatgtgattttagtccattgttgtctgatactatagtaacctgaatgctcaactgggctgaacgtccaagatcactcattcacatgcctagcagttgttggctgaaagccttgttgtgattgttgctgaagcacttatccatggcctttcgatgttacttagctttctcagagcataatatgttggatggattctaaaagggagcaccctaagaatgactgttctaaaaagatagacgtggaagctgccaggccacttaaggacttttgccataactggcacttggactatattctattggtcaaagcagtcaaagagtcaacccagatttaaagagctgaagaaataaacttcacctcttgttgagggagtggtaagaggagcatgtgctgtgggagctattattgcagccctctttcgaaaatgctatctacgggctgggcacggtggctcacacctgtaatcccagcactttgggaagccgaggcaggtggatcacctgaggtcaggcattcgagaccatcctgaccaacatggtaaaaccctgtcgctactaaaaaatataaaaattagctgagcatggtggtgggcacctgtaatcgcagctacttggttggctgaggcaggagaatcgcttgaacctgggaggcggaggttgcagtgagccaagatcgtgctattgcgttccagcctgggtgacagagcgagattccatctcaaaacataaataactaactaaataaataaataaagccataccgcattggaagccatcagtgtttttgttaccacctcactccctatgcatctacttctttcttctctctctgttcatggacctttgctcttcctcaatccactctgcaaactagggacttcgtaagcacaatttgctagtatatgtgacacaattcgaagcactcacagtttgaccagactcttctgtcaattctaattttctgagagagattctgatgattctctcttaacacaagcattgtgtgtattctgatcacccataacatggagttggccagaattacgtggcacagacatggttgttactggcccacctttttgaggaggattaacatttccaagatgaaaggccctagccataacccctctaaagcatctgttactcccagcaatgcttactaattattgaaagttctactttaacatcaactcccttatgacatcctccgtacaagcatcactccaccctgcatacttccatccaattttatagattctgtgatgtttcttgctctataaataacgtcatgcacctagatggatccctactcccagattctaggttcacgaaacatatcaatatttctcacacaaggtagttattcaaccaatgaagatcatcgatatggtaataaaataagatacatttatatgcgtatttgctctcatttgttttaaggcagaattctaactatttaggtaattcataattgatttgcctctataattgttaggattaatattctaaggaataatattgaggtacatctgtgaatttataaccttgcataaggagctccttaaccacttagtccatgttcttggtataattctcattactcagttcagggctatagttcgctctggaaactgctaagcaaaactgatgttatcttctaatgatatgtatcagaatttactccaattggtgtaaattcacttacactaatatacgttatgcaaaatgatctgcatgataatgttatgggcactctggtataatttagtttctgctctaaattataataatctaataatgactgaattttaaattagaatgatttgaccgctagctgattttgtatggatttgacagaaataaataaataaatgtattgtgttcgtgtccacatgctgcagagatccctgcctataactggctcagaaattcatatgttaaatgcagaatatactttactatagaacttgatcgaaaatgtctttattgaatatataaatattgaaatgttttatagttatctaaaattcacaatcagtatctgccggaagccatcaaatatctatcagacaaatagcaatacctgtttggggcatttgacttccatttcttagattcatagcttccctgaaatttaactgaaatatggcacataatgactgagtagactacactaaggccaggcacagtggctcacgcctataatcacagctctgtgggaggctgagacaggagaattgcttaagaccaggagtttgggaccaggctgggtcacatagcaagactctgcctctacaaaataaaataaaataaaataaaaagaaggtaattaaggagtattttccacatgcaattttctcattatatctcatccctgtcacagttggctgaatcttacagattaacatcatgtctttggtccgatttgagtgtgacttcaaagataaaacatatcaattctacatataatatataaattacctattgaaaatgatatctgaaatagttgatattgactcaaaatgattattgcttttttcataataatcccatagggaagaaataaatcgtttcacttggataatttatgaaagtaaaaaatatttatgataattctatttaggtgatccacctgcctcgacctcccaaagtgctaggattacaggtgtgaaccaccactcttggccaatttacggtcattttaaaggaagctacatggtagaggtggttgaggagagtttctgaatttcgtcttcttggaaagttagttgttctttgtagagcatgctgactaataatgctatcctcccaacagaaaatccaatctgatttgacaagtcatgagatcagtttagaagaaatgaagaaacataatcaggggaaggaggctgcccaaagagtcctgtctcagattgatgttgcacaggtatatgttatttcagaaactaaggaacgtgttttcgttgggcattatactccagtctatattggacaacttgattattggcaagattggatttgaggacattatttgaaaactataatttgatgtctaaacaatgagtgttttgctctctacattttaaagataaaataggttaataaattaccttttatttagtataacattaagaaaaaactactgaatcattctcccaaatgtatgttttcctgtgttggatgaatggaaaaatactgctttattttgtttttatttttctgtatatcttcagaaataaaggcagatctatcaataaaaataggaccagttattgtttgaaaggcaaaattaaatcagtgcctttttacactgtccttacagaaaaaattacaagatgtctccatgaagtttcgattattccagaaaccagccaattttgagcagcgtctacaagaaagtaagatgattttagatgaagtgaagatgcacttgcctgcattggaaacaaagagtgtggaacaggaagtagtacagtcacagctaaatcattgtgtggtatgtatttctggtggcaaatacgcaggtaccccttgactttcctcattaagaagtaactgctcttttataagagagaattgttttcagataaccataataattatactatgtaattttaagattgagaacaaaaattggcacatgtattgtggcctattctgtgtgtcttttttgagtctataattctgctaagaactgtgcagaatataaaaggatgttgcttgtgtttaatttttatgattctttaaatatattttaaatggaaatctagaaaggaaatatattaatctaaaaatagtaacaacaacagtagttgcaataatcctaacaacttcagaaataatggatgccaggtaaactacgtgacatacagaagtcacctttaattcttaaggctacagattacctgagagaatttaaggacaaacagctggtgaatggcaaagcaagattccaattcaggtactcttattccaaactttaataactttcctttaaacaccagtactggatatacagtgaaatgcctcaagacaacaccgaattaaaaggcatggaaaggtacaaatagcctaaagtataaatctgatttaaactttataatattgaacggtgtcctatgttgctgttattggaaactcaccaactgagatgattcctctgaaaacaaagctgaggtatgattgcatctactcgagtaacataagtattattataactctacatgtactatcggccattagagtgggaagtcacataaaatgaaaacacagaatgttattaaagggaaaacaagtctatttagtacttgatattttaagtattgtttctacatctactccataatatcaatgaaaaacagagtccttcagatacatcgtagtcatatcatgaatggggaaatatttttctttttaacaaatatcttaaaataaatacatatatttatgtgtgaaaaatatgaggtattcttattcgataatatattttcataattcaagctgcattttagtggtataattactttaattattctcacccccaaaaagaaacttggaatagaaatgatagaaagtagttagttgatattagatgagtaaggataggaatatatgggaacatatcccatcttaaattttgccaaaaaaaaaaaaaaggaaagcataaatgacccaagtgccttattcatgactaatatttgcaaagtgagcacttttcgttcttttctagaaacaggtctctaatgttaccttataaaatgtatccaacagtaaatatgagctgaaaacaatctcacctgtgtcaagctgtgactgtgccctgcgtcagtacaaaggaaactgctcaaggcatttgctcaattggtttctggttctggtttaaatgtcaggaccaattgaagcagttctttcataagaatatccttacactgtttagttttttcattgtttacgatgctttgtggtgtataccataatcatagtcttgccttcaagacatgtttgtctatttataaaagtcttactttcatgaacacaaatataaataatatttctcccctttgtttataaatattttacttgcctattgaatgaaacaatgttaatggctaacggtaccttgagggaactttcttcatcaaaataaagcatttatattttttgaagttcagagagtaaataatttagaaaaatctctgattccaaattagcatcgttgatttccaacataataattaatttcagtgtttccagatacacagatatttttatatcttctaagaaaaaagtaaaatgaagtaaataatatcatctgggaaactcagacaaaagtcataattattagtgatgaaggaatgttaacatcatttgtcaaagaggattaatatggaaatatacatgtagcattgatcagataattgtccagcctttacaaaatgcttttttttagacattacttttaaactgaaaagagaaattaaacccaatttttgttctaattccataaaaacaattacctactgtcaggtttattttttggtaatactaaaataagtactgatagttcagatttatgactaaacaaattaaagcagagatacataatgtaaactattatatatacgtgtatacgtatatacacacacgtacatatatttgaatacatggccacatacatacaaagacatatatttctaggaaaactacaaagcaaaattaagacatcaagtggtgttggagtggtgttggtggtataattgtgaacatagctgtcttccaaagttatgacacttgtcttatgatgcttttttatagcaacctatgttttgtgaaaccgtatgtgtgtgctttatatttgtgatgtacatgtgaattgtcaataatatttttatatctggttttcatcagcacttttaagaaaataaagttgtgtaatttaattaacattgaaaaggaccttactttcttatatatgatacaatatatattgaaattatgatgtagaaatttaggtgctttaatgttactaatatgtaagtaccatgagaacaatagtgaatgtgtgtgttttggccaccactgacttcccagtgattcaaatactatctgattgatagtaaccactcaataaatacccgatgtaggagtgaattaattcatccaaatttatggctagaattatataactccaacatttaaaatagaagtcatgtaaaattcagaattgacatttatgttctttgattgaagaactaaatatatatatatcacaaaacacatatatatgattaactctctgtttaataagaatagctgcaaatgacacatatatgcatgtgtgtagacaattagaaatattaaatcaacagaaaatgcaaaagctagatattgaccaccgctgcaaaatgctactctattaaaatttcaaacatggaatagcaattaaggggatctctatttatttctgttcataatattatgaaataatttaactctactgattatcatgttttgttttatgtttaaacttagaacttgtataaaagtctgagtgaagtgaagtctgaagtggaaatggtgataaagactggacgtcagattgtacagaaaaagcagacggaaaatcccaaagaacttgatgaaagagtaacagctttgaaattgcattataatgagctgggagcaaaggtgtgtgcatgctgagaccacaaacacttctttccactttccttataaattgtaaagcaacgggcaataaattatgtatgattagagtcttagcaattctaaacacctctctctctctatgtatatgtatacgtatatatatacacacatatacgtatatatatatatgtacacatatacacaaagataaacatatacacatatttcgatgtggaattctcattaagaaacaataattaatcagtgaggctctgcttattcagattgaaaaatacgtaacgctcagggaggtttttcctggtccatcagatagctctaaaagggtttcttagttgtaagtgttccttattttcattatatatatctacttgtgatgacttgaagactggtaaatattataaactgtatctatttatatgtaggtctaatgttgttaacatattccacagagaccacattaagtttaaaaattacacagtaattatttccctatatggccaagacttgcaaaatctaccacacttggctaataagatagcatggatagccagttaagacctacgtctctgtaattatttttgtatcattgtcctgatcagagtctcatgaccagctccacttcactgctaattcaagatgcctatatctctccatctcacttcgctcaactcaaatattctgtatagattatgatagtaagtagtctcttcactctgttgattgtttgttttgctgagcagaagctttttaggttgatgcgataacagtcgtctagttttcctcttgttgcctgtgctttgggagtcagatccaaaaaaaatgtttgcccagaacaatgtcaggaagctttttcctgttttcttcaaatcattttataggttcaggttttaagtcttgagtccattttgaactggttttttatatgctgtgagataagtgtccaattgcattttcatgcatttggatatccaatttctcagaaccatttattgaagagaatgtccttttttcattgtgtattctcggccccttggttgatcagttgatcataaatatgtggatttattattgggctctctattctgttcctttggtctatatgtctgtttttatactaccatcctgctcttttaattactagagcattatagaatatttttgaatcaggtaattatgatacctccagcttcgttcttttggcttaagattgctttggctattctgggtcttttgttgttcaaaatgaaatttgggattctttcttctacatctgccaaaaatgtcactggaattttaatagggattgcattaagtctgtaaattgctttgagtggtacagacatcttaacaatattatttattccaatccatgaatatgggatatctttccataaacggatatcttagtatttccaaaaatggacttctaacattttaatttcgttctgactgaaagaactgaatttcttggaggataaaaagttatatttttacaactcaggttctcaactttagtgaatagaacaacatcactgataaaattgtcacctcatcttagacagaaatatgaatgtccatgtttgagaaatagctaaggagaggcatatttcttgcatctcagcctgaaagtagattgaaggttatatcttcaagatattagttgccaattccttaccatagaaagtaaattttataattaagttgaaatctggaagtaatcatttttcttagatagtcttgtttttatattttaaaaaccctctaattaatatttgttatgttttaaacaagtttgttgccatcctatgacaaaagattctcctactttgtttcaaaataagaaacactgatactcaattgatgggaaagcattatgataatcttgaaataaaatacatttcaactgttcatttggtctaccaaggtacctttggaatgagatacctttatatcctctagagaaatttatcattgtttaaagatcaccacagacagaaaaattgtatctgcacttgataccttattccggtgcttatcaatttttatagatgccaattatttcatatttaacatcaattacgaaggactgagtaatctctagtctcaaatgtattagagattgaataatctctaatattaatcctaatgctacagcttcagttctggagatatattgtttttgtaattataaattttaaattaataaaatgaatgtatgttatagttataaattacaaattttcagtttataatttgacctgtgtgactttatactaaaataatgtatggatgagtattttttaaattaagaaaatatatgttttggtaaaggggagtttctcagtttactttttaaaatagaggttttttgtgtgtgggctttttatttgtcataggaatttttacgaaatcattgcaagagtaaatttaacataaaataacagaataaatcaattagaatttaaagcaatgaaagtgacattagacgaataatagtgccctgagttgattattattcagaaatgaatgattctcgtaatgatgtcaaaccctatttattcctgaaaatacatatctgagagcttgtgtttattctaaccatttgccacatagtaatatccttaaagcaaaataaaagtgtatgaagaaatcatatttaactttaatagtatcacagaatacagcaaaaacataggccaaacatttatttttgaagtaaatattgatgtagaaacatttgtgactaagggatcatgtataaataccatcttataaaaatgctgtaagtcctatattctttgcctgagaataaaaatattgtctggattttgactcaaaatattttcaacagcagtagctttgtctaatgaaagcaaaggcaacaaaggaaatgttattacattattctttttatgtaagaaggaacccttctattttaaccatcttcagaatttatatggttgtgtctgccacaattgagtatgcattacctttttggagtaatcagctctggctgccataacacaataaaataaactaggtaaattgatttctgcaagtgtggagtctgggagtgcaagatcaaggtgctgatccatttcattcctgaggagagctttcttcttgtcttacctttttgctgtattcttacatggtgatgagtggggagagaaaatataattaatttattaagagatattaaagctggcaccattgatgtaataatacctataacccctttttatttctctatgctctgatttttatggaaatttacataaatagcaatactaatatcatcccttaaatacattgttaacttcgtgaaacaatgactactaaaacattttactgcaggtggcattgtgttaaacgtatccattcctcgcatacacacacaaagtataaaactcaattttccttaagatggcagtgtctcctgttttttaaaaatgtatttagctggaaataaacaaaatgaaataaataaaaatcaatactgcattagctctgggaagatagaatttctttgaaatattgaatctggaatcatttttctaccaataatgcataggaaaaatatgcatagaaacacaccataaagtatattttccctcaccccccacacacccctacaacacaaaattcttgcagtcaaaagggcagatgcttttacttaggaaaaaaaaaaatagaagggaaaatctgtttaaaaaatgaatttacagcctcagcaactaaatgttttctaaatgtacgcacacctctcctaaagaaaataaggaattttattatttggaattggaattgttatcaaggttccagaatatttatttcgattgtagcattttagatgctttatacatatttttatcttttgtgtttttcttgcttatagatagattcttattttggttgtacacacacatacacatagacacacacacacatatatatgacataaatatatgtatcagtcagtggtgcctattgggcttagggcataatgcacaaataacgcacttgtggtggtggtattgttttaaccaattccattacaattgaaattaatctggagtctacctttcagatttcttagcaacaaaagccaaatcttgtccatgttttatttacctgtaaggtagtaaaataaatgtaaataaagcttttgctctatacattcaggcacagttttttattgaaccatccctaaaggtaaataatgagaataaaggaagggattgaggtggtacaatatgtcatgctctctcaaactgttgtctgcctttaccctcgcaatattcctgtgttctattaataagtatagtaatcccatttgacagatgtgttgagaaaaatgaggtgttctgccaaaaatcatactcaagtcgagagtccactacgtatcgcagagcctaacatacttacattccatcatgctgtttctgcagagccaaatatttatatctattgttcagattcccaggcttcatgacagacaagggttttttttaaaaaaaggtgaaaacacataccaaagaaaagaaaaccaggagcaacttgtaagagtataaactctttatgtaaattctaccagttatattttctaacttgtaattaacgatttgcaagtcttcattcattcctttattcaatacataaagcatatttagtgagacctttctttgttcaaggaactttcaggagtagagaggagtaatctaaagatgtgtgaggcaagaagatttgcctttaagaaattgtaatttatctggcttttgttgatgatttgactgcctttagtagaaagagatgctgggatttttattaaaccaaccaactgaaaatcttaacaaaatataggcacatctgagaaggtggtggagaaatacagatttgttcatttcttatgtgagaatatggataatttgcttttgagggtgttggtatcaaacactgagaacaggagcacaggatcaagtaattagtttttctattaatgggaatgaatattgtcttcacattcatctttttgtccctattggatggcaaaattatgtttaaggaggaagtgacctattcactgtattgtttttgagcagatgtgagacactttaaagatgtaacgaggatacagttgagaattctaggtattacacaaatacttttaccttttgagagaattaatcttctatcttcattttgattccttaccagcatgagctagtctcacttgtatatagaggattgtaaaccttcttgccatattattgacacatgacagtaagttttcagtgagaaatgagttttatcttcagtttgacttatatcattgtatttatcataaactttggctataaattatcttagagaaaaattcgtataggtttcttttctaccatgacgacatacaagaccctatcttttggacaaacgatgtcatctgccctagacagtttttattcactcttaatattcagaatatatgatttttataaaatattattttaaaacgtgtaagaaaatagttattttaaataacagaaatataaaagttccaaataagtggttataacgaaatttgaattaaagagtaaactaaattacatttcattataattcttttcaggtaacagaaagaaagcaacagttggagaaatgcttgaaattgtcccgtaagatgcgaaaggaaatgaatgtcttgacagaatggctggcagctacagatatggaattgacaaagagatcagcagttgaaggaatgcctagtaatttggattctgaagttgcctggggaaaggtaaaacctatatcactgaaggttattttgaacatacgtgaaaacacataatatgattttgtaaggaagtattaacatgtagcaataatagcattataaatattaatattgtttcatattccctttcttaaaaattaatctgtgcttttcaggaccatgataaaaccaatggtaagctttagcaggagtctctccaaaagcttccttagagttcagtaaattatgaataagaccttaagaaatacataggtcattagtctgaaaattggtccagagatgagatcctataatgtactggcttgcctaagaccatactgcccagatgaatcccacagccatgaagagggcaaggacacagagattgaagacagttgggctggacaggacttgcaagattagcatattgccaaagtcgcatttcagaaagaatctcaaggtgtctatgcaggggctatcatttccatcaccaaatgacacagcgactcctgtaatcattagccgttaaattcttgccctttctctgatggccaatcatttcatgctgcttagaacttagtcaagagactcatagcttagtatttttttttttactgtttattcattaccagattacctgaaagtgtgttgatataaagaaaatagctgatattgataacatgttttacctcaaaatttgccactgtgttaggccatttacacccacttaatgttttaaagttaccaaattaactagatgtataagacgtttatactttatttttaattcaatgtggctatccagattattcaaagttgggaaattttcaataccttatgtaaaaacttacaatcgtataaatgagacccaaactgaaaactgtctttatgtagattcagagaacaagtagtaatatattttgttacataaaatatttccaaataaatagtagggaattaaattgtttttcttctctttcagaataaatgtaatgttagataagatattgaattatagttattcaggatcatacatgagattactatagcaaggaagatacagtatatacaggttaaaactcacattagccttattttttcttatcattcaaacatattacttgaggtatttttgcattagcctcaccatgaaatcattcaaatgttataaggtaatgacctttgcagaggtttctaggttatccttctcatatagaaggcttgaatagtctggagaattgtctgcttgttgaatctgcctggaaagtatttttcataacgtcaaggagcaaagctactgtgagatctagtaggaaaaaaaaaaagcttagaaaactggcatttattttctttctttatagaataaagataatttatcactctatctagatcttttcaaacactaagctgttaatgacatactctaaaatctcttagttgtcaaataaagtatattcatttgcatctgaattacagaacttttttttttttttaccaatttatttggaaggttctcattatttctttaaaaataacaatcataaaagaatatatgccctgcagatctaagccagtcacatttatgataatcattctaatattttaacataaaattcaaactctcatatatgaaaccccgtgactattgagtacattctcatttctcatggtttcttggtaggtggagagcttaattcaagctataagtttcatctgctgtttcaaaagataaatgtcacatttttaaaaactaaattaaattcatttaaatgcaatacattaaatgtagttgccgatcattccaagtatttggaatgtgactgcagcaaatttgaatatctagagtcaatttcttttttattattttaaaaaatttttagacaatttaatttatatctgctgaatttctcccagttctgttgacccaagaacattatatttattttcgtatgaaagtatttgaacatctagtttcaaatattcaaatacataaaaatgtcaattactcatgaagtgattttttgacctttagtttatccaaacaaagcataatttcaagtacattgactatagttaaatagtatcagttttatcttaaagtatcttaattatatttaatatatattaaattccagaaaaattatttagtgtggcttgaagagatacatatggcacaacttgagaagcctaaataaattggaaaactaggaaaaggaaaattatagtagataaataataaaaaattcttgcatagaaatatatccacaatgtatcatgggtggtggaatggacagggaacattttaaagccacaaattggcgccaagcttcctaaaagacaaaaccaagaagtaaacatatttttgagacccaaagtttccaaattattaaaataataattaaaataattttaactttactagtagtatgttagctttttgctagaacttagtgccagaagaaaataaatgggagggtcataaaggtgataacacgctgattcatattcttataataaacaataagaatgtttatttttttctaccaacatggctccatgaaaaagaaaaatttagtgctaaagggccattcaggaaaagcaattctatgagaggaaaaaatattggagcagaagtctaaagtagtctagcaattgttttcagattttcagattctctattttattaatttttaattttgtatggatacatactgggtgtatatatttatgaattataggagacatttttatacaggcatgcaatacgtaattgtcacatcatgtaaccttctgtgaatatgctttcctgcaactgagcttttaagtagaattagacatcagagatttgaaggttatttattttctctgaatacagaaaaaaattttctgtatctttttcctggaaagaagccagattgtttctaactgagaacacatttctatacttggccctatatctaattggaaagcagggcttcatattcatgtgtatgtcatagtactagaaggcttcaatagctaaaaatttttgctaacatagagttttgggtttgaaccagtcacagagaaattggctattgagccttttcgtgccaagcataattgaagaaagaaaactcaccatcgacaactcaaaatatgttgacttctctaggaacctgtatcaatctctcagtgaatgtatttatttgaaaacacagttgggctattactttagctgtaaaagctattgaaaataaagctcagtagtactctcttacttgatgatggcatttaaaaggtgaagtgagaatgttttatagggggcatgaagtatcaagtactgagtgtgatgaaaattaatatactggttaatgataatactgagtctaaatgtactagtttttcctgtgatatgagaaaactagaattcacttttcaagatcaaaattagcaaagaatttggaagtattgctccaattggagaatcagaagtcaccttaaaaacaatacagattttactaatctatagtaatatatatttcataaagtcttcatgtgacacaaaagttttagggttttggtttttaactagccgtgttatataatcgaggaaatttcctatcctaaattagaaaagtataagcatatttaaagttcaattcagtttttcttacattacgaagctgagaaaaatgaatctaacattaaaatcaaaagcaatctggtctggcttactgtattcatgtcaccaatgcggtttatcaaaaatccctgtcatatcaaatcaagcccttccacaatgatctaacacttaagtttttatgagaaaaaaaaaaaattggattctctatactcatttcacctccttaccgtggctgtgggcaggccccagatgatgcattgtctataatataaactatgttggtgaccaccaaagcagccaggcattcttgctgttccttcatttcttactagattatgttatttaattaatttaatagtatttcatcgcctatttatagggccatagtccatgtgcaagcagttttccagtaccaccaaaattctcaataaggtcccatcacaactatcatttaggcctaccataaaatacacagaattaataaaatgagacaaccatcattgtgtgagcaatacttaagtcagccccatgcaccttcagagaggtactactagcattgagatgaattattccaacttgtagggaaaccaaatagataccgaaagaaagagtttattcttatttatttattttgagatggagtcttgctcttgtcaccgatcctggagtgcaatggcccgatctcggctcactgcaacctcctgggttcaagcagttctcctgccccagcctcccgggtagctgggattacagacacctgccaccataccctgctaattttttgtgttttcggtagagttggagtttcaccatgatggtcaggctggtctcgaactcctgacctcaggtcatccacctgcctcggcctcccaaagtgctgggattacaggtgtgagtcaccacacccggccagaagagtttcttacactggccaaaagatcagttatgttctttataaacttggcataggcttagggggcaattcaccatttgttttctaatgctgtgccctttaaaaaggaaggggaaggttgcctaaaacgatgaaagagatgttataaaaatcaagcttcttgagaaatatagtaaaattggaaacaccttaaatgttgcagtgtgttaccatttacacaaaggataaaatatgtagaaatatacattatttagttatatataatatatagtaaaagcagaaagatgtttgggaattaatataaactgaatacagaacaagagctatctctgtgaggaaagacaaaagaattgggtgggatatgaacaggacacttaaatgatacttgtaatatttcattccttaagatgagttatgcatacagaagtaatgattacatttggtatactttctgtgtgtctaaaatcacatataagaacataagaaaacatacaaaagcaaatgcttgggatttttccttttggaaactccactagccaggttctgtaagataacgcttagtaattaaggaacacccacttcgtgagtattattggtttcaaaagagcatggccactgttcattcggtttgcctaagcattggccaaagattctcctgctgattgagcaacaggacaggaacctagcagattaattccagcgagatgaataaggaacattgtctttccagtttttaaagaggatgtttctgtggctttttttttctttattatctacattgaagcatgatcgacagattcttatcaatgatttccttgtgaaagcagagtcaagggaatgaatagcgcaaaccgagaactgagaattttcatcaaagtggaaccaaaagttagcctgtgtatggtcagtttgtgtggcagcagtgctgttctatccttaagaacacttctattcagagagaatcgttattagagaggacagatctgtaagtcactgggtgaggtaacatcagaactgaaggtcctctgaaaatgatcttatttccctttttgtaaacaagaaaactgtgcaaaaagctccatatccctttctctgtttctcgattactttctttttaaaattactttagattcaggggttacatgtgcaagtttgttacatgggtgtattgtgtaacaattctaaaattcatatggaaccaagaaagggcctgaacagctaaagcaatcctaagccaaaagaacaaagttgagggcattacattgccccacttaaaatatactacaaagctgtagtaacgcaaacagcataatactattacagatatagacacctagatcaatggaacagaatagagaactcagaaataaagctgcacacctacaaccaactgatttttgacaaagttggcaaaaataagcaacagagaagggacaccttattcattaaatattgctaggatagctggctagccatatatagaggaatgaacctggacccctacctttcaccatatacaaaaattaactcaagatggattaaagtcttaaatgtaagccctgaaactactaaaaatcctagaataaaacctaggaaaagttcttctggacactggcttaggcaaagaatttatgaccaagacctcaatgacaaatgcaacaaaaacaaaaattgacaaatgagagttaattaaattaaagcttctgtacagaaaaagaaacaatcaacacagtaaacagataacctcctgaatgggagaaaatatttgcaaactttgcatctgacaaaagaataatatccagaatctataaggaacttaaacttgtcaacaagaaattaaaaaaaaacagattaaaaacaggacaaagaacgtgaatagacactcctcgaaagaagacatacaagcggccaatgagcatattaaaaaatcttcaatatcactaatcatcagagagatgccaattaaaccctaaataagataccatctcacaccagtctgaatggcttttgttaaaaagtcagaaaataacggatgttgattgctttcatagggtgaccatgattacatttgtaatagtcattcactcctaaggatttcaaagtcatgtgggtccaggatcctcaatatgaggattaatgttaccatgggaaccatgaaaagagctgacctaataggggccatatcaattctagccaacttcttgagcttcctaatagagaagaatgcctaagagactctctcaccaagaggaaggcaaattaactagtcagataaatgagagcagagatgggcaaactataattggtaggcctaatccattcagccaccttcttttgtacagcccatgggctgaaaattgtttttatgtaaatggttggaaaaaatcaaaagaagaactagatacttcaggacacataaaaattattaaaaatgcatatgtcagtgtctgtacataagactattgaagtgtatcaatttatatttgtttattttttctggctgcttttgtgctaaaacagcagagttgagtaattgtgacagagactgcatggctcacaaagcctagaacaactactatgtggccattcacagaacatattcaaactcctgaactagaggaaagctaatatagaagcagcaccctgtttgaccatagaattttgccatgtcttcttcttgaatgagtatcagaggtttgacatttctgggatccttttgataggccagtggcgttgtagaattggtctttcctaaatagaatgattcatctaagttttcttcctgctcagaattaaatagtaacatattccaaaccatagatactagaatgcatagcccttccaaaagatactgggtggtgcgtgacacaatttaagatgtttaaagataccatctacttgaagagaattacgaactcaagaatgtcttaggtattctaattcttaatgatcccacagagaaagaatgggagaacttccagaagtagtgaggatgtggtcaggggtgattaactgaagggacagctgcaggtaagaaaactgtcctgtgtccccttaccctgtgaccatgtttccaaattatagttacagaaaaaaagaatatattttaaaagtattccaaattgtttaaaaggtaaagaaaaatttttaaattaaaatgacaggaggaaagccatttgagaatattaacaaatgagataaaagattgatgatgaaaattgacaatttaaattattaatgctaattgcaacttcctacagcgacatagccctttcactgtatttttaaattcacccttcaatcagagtagtattaaagagggtaaaattaatgttaagtttttaaaaatatggatcaatcctagctagctgcatggtccagacaacagcaatgccacgaggcagccatcacagtgatatttatcaccccataaatgttcagatacttttccttttctgttaatggaattttctaggctgaggtgacaaacactgatagctgtagaatagagatgatggaaggaaatggcaaggcaatctacaggagattactagcacctgaagagtttgaatactggaactgcacaagttccttgagctttcatgataacccctactctcttggactgttatgtaggcaatagtaattcattcagcaaaaggacagggaaaatgtgtattttggtctctgatatttcccatgtacataagatattgcctgacacataggacatactcatgaaatatctgtttaaacgtaacttgcaaattaagagttgcaaattataatgacaaagcagttcttgagagaagagaaaaatgctgatttacatttaaaattgtacaagttttataacaaacataaataatcacctgatcaaatgttcccgttttatagatgaacaaatacaagtcctggtacatagcaaaactgtaatactatgcctgatttcaacagttttttccactataccaaattatcataagaagtcttattttctagtaattttaaagtaatctaagcttaaaataacaaaaagctacttattcacaataagcatgaaacaaaccatggctaaatttcaagtgcagaaaatataagtcctcattaaaataataaaatgaaaacccgtgtgtatctatcacctactacagtctgtagtctgtccccactgttgtgattttagatttcaaatattgtttgttagtatcttaatatcactctgattagttgagtgtaagtaaatcaatctgaacatcccattactggccaatattgtttagcatatgaattgatcacgaaaacataaccataggaaagtaaatatgtatgtgattaattagaggtttacttccctgaagatcattatgtttgggaaatacaagctttgacaaagtctaatctatatgattttctgatttaatcactaacattttatttctaattttgttttaagcatcaaagattccaactcagttaaataatttagttccattaaacccctaaatatccatggtgtcatctgaaagttcaaatggtagaataagattttctggaaaaaaaaaatttggtcctatagtatgttcatcctaccgcctgttttattaacagtagtcttagtatgccaagagttgcctgagaggaacacacacaaacacacacgcacacaaatggtattaataaatttaactgaaggtgttaaatgcagaataatctatgtctaaatagccacttgtttaacaaattaccgtgtttttcacgtttattttggaaacaaagttttataatatttaacctcaggaagaacaaacattggttgctcaattatcctttggctttcagttcactcttagaatttaatgactatcactcaataaaaactcagaatgcatctttctgtttgcctgtggttttcaacattggttgcacatcaaaatcacccgagaaacttgaaaagtatcccaatgtttggggcccacttccagagattctgatttaattggtctaactctaactagctctcttattcagcaaagttgagaatcactagataatgtgatacaagatccgcgaatttcaagctgtctgacgagagcctaaattcagctcagtcaaccatgtcttgtatatatattttttataacagtaagatttcacagtttaaagagatctggtttctggtcctagattatctggataactgcctcaactcatcattcctcttagctataaaaatataagaactattacttactctaaagtctgttatactctcattcccctgaaaaattacgtatcttttttttttaaagtgagcagagtaatttatctgtgaagtgaaataacactagcagatcattaacttggtgcaatgaatgcatcaagcagctgttacttagaaaatagaacatctgttacatgccattggagtcactattcactgtcattatagttagagctgttatttctgttcagttcattctgctttcatgaaattcttctttaataaacaatacagtgttattaaaaagtcaatacacattgctatagaatccactatttaatgctttatgttctttttgaatgtatcattatattattctgtcacattagcctaatagtaaaatatgtcctaaacctctagccatgatagagtaattttgggggctgtaaaagcaattagcatctcatttcctcatgtttaagacatgttagattgtgtgatgcaccattgatatgattacagctgctgagaatttaaaaaaaaaaaaaaaaacactaccactttcaaggtaaaccttaattgtatgttacatctcaatttccgaatccttaaaatgtgacaaatgcacatcttagaattgcagtaatatggcaatgtattccttttctttccacgaatatgttacgtagctaaaaggtgaaagaaccctctcctgttctctgtgatcagaaatggtataatatttgcaaatactaagtgcagaattcacctgggtagggggacttctcaagatgccttttatggatgctttagttagccttttattcatattacagggaacatgagtaagagaaaggaatagctaaaataagtctgaatttaattgagtcctagtaaagggaggaatctataaggaaatgatgttaaggtacgtaggtaaataaatgtggtgctgattgaagataagctctagagaacaggagactcttaagataataaaatttgtttaaaaagagggggtggaaaaaagagatcagacagagaagttatcttaagaatataagtccctgagaaattccaagaaaatctgtggaaggtactggaaaacttgtgaaaatacgaaatgggtggaggagagaatagaggttaagtgagctacatttctttacccctgaagggaaatgtttgtaaaggtgttcctataggaccagatgatttttccaataatttttaccgttctaccattaaataaaaataatgaaaaatgctgatggtataatcagcagagaccaatggagaaggtttttccatcttgctactgtatcagtgaagtgagccgatagctgaaccctgaaccgaacatgcctttttaaatttctacaagcaattatacttgtagatatggggaatgaatcagaatgtattcttcatccttcccatcaacatggggcatgacttcactggaagaaattaactcattatactcattcttttataataaggaaattagagtagcatttacaaattatggctaagaagtagacagcaaatttgtttgaaatcatggaagttagtgcttagtatttggactatttatactggagctatcaaatgttacaaagtaacatatggaaaataatatgttagacattgtgagaatttatagtttaattggattttacttatgtcagatattttcccctctatcataaaaacccttagtgccaagtatatagtttgcgttcaccttctcttgaatctcctgaaggtggacttacaatcatgtcataggtcaagttaaaactgagtgtacacaatcttgctttttcttcagccctaaaatcgatcctagcagcaatcacattactacatgactgaaaaacctaaagtgtctgagttataatttagtgaatttagtcattgaatttgaacttgctccttcagaagagtagatcttctagaaccctctccacttctcacctcacaaggcagaagaaggcatgtatgctgagaatcggatgcttttgaaaaggaggaaatgccatatcttttcagctgtttctttccatctcgccaaccctataaataaggagctccctttgagaggaatgagtacaggtataaagacaatggccaaggcaatagctctaggttggttctccatacatctgaagatgcagacattcttgtgttgtgggaaactattagagccagagaaaatggttcgtcaacaacctcatcaaatgtattcttttagtttacagtaagaattccctgttcctctatggcagccttgtattctaactttcataccttctcgttgcttcgtactttgtctttagtcaatccaaaccatcccatgcacactccgccttcaagtgtcacctttcccttgtagtcattcatgcttattccagccatggctcatctgtttccaaaaaaaaatgtgatttttttctagtatgatatcaaattgttttattgcatttaagctttcctctgcagctacactgtaggcatgattagagtgaggtttgcaaagattacctcattcctcatctctggcagtgaatagcacagtacagactggatattaggcacctgatatacattggtcaattagtatttcagatctccagaaagcaagctcagcatagtatttaaaggctaagtcttatttaagtcttatttcttaagtcatatctttgattaaaaacacatttgagggaaaaatttaaggcctactaaattaacacaatattttttcctaacccaaaacagcatgtatacaaatgattgaatactggttccttattgttgaatagcatacataaaagtttaactctaggtctctttttttacagagtgtaaattgtcctgtgaatcacttttgaccattagcagttataaaccaccatcatatcactgcttttttcaaatacaagttgataatggtgataaattgaacatcttttagttttaatttataattttgtggaacttaagaaggcactagaaattagtccacatttcctattttgttcccatcaactgaacatcactggacattgtttaaattagctggaggaatttggccagatgttgacacataatggtttctgtgacccaggaactacctgcaacattatcccctaagttcaaaacttttgtgatctcttctgagttttggaaaattccattgcctttaattgcattgcttgtcatgtaagaaacaaaatctatgtacacaataactttttacattgatgctaaaatatagtgtcatctttatgaagacttattaagagataattagtaatccaaatataaattaagcttcaactttgtgaagggttacctttgtgaataaatcaactacagcgagatgccagtagactggaatatagaaagtagataattctcatttgcgtatatgtccatctctttgacaaactcatacttggatataagtttttgaaggatggggacttctctaccgttttatcccacagagcctagtaacaatggctaacatctatggttgtagaggttgtatactacaaaaggttgaagtcaaagtattaaaaggaataaaatctagtctatgtctactctgaagttaagctctaaagggtctgtatctacccaaatgagagacttctaataatctcccagaatatattgaggagaattacatatgattctgctacagtagtaactggcatataataggagctcaggcaacacttacgattgataaatgaagaaattgcttttatgaattgctaagctcacctgtgtgcaacaaatagcacctacatatgaagaaccccatgcatgatagctgtcgagttcatctggcattaagtaccttaatttcaggcatgtttttattgaaaaaatgtgacataaaaccatatcttagaattgaagaaacagtgtttttgtcttgcataaaaatttttatacattgtttcctcatttatttctcctgtttatccgatgccaaaggcaaaaccaaaacagaaagtatgagaagtgatttcgagtggaccaggaccttatggcgtggcagaaagacagccacaggactacttaggtatattataaagatagaaaagacatgttgagagtgactctatgaggccagcctatacctaatttcttactcttgtactgtaatttttttcttaagaaattagatgtaggctggcattacagagctgctccttgtgtgtttattaattgattatttgtatctggactttctccactttcctgttattgctgtttctcaatgattttgttttgctttggctttctgtgattaagacatcagctccactcgcaaatagcttttcaactcgagtgccaatcacagtctctgtatctgttaaccttattgagaaaggagaaaaagggtctgttgggctctggctcagctctctgtgaatgtcccacagctggctaactagacaggcagggaaagaaccaggcacagactcagtggaatgccgagtggccacattgtctgtcagccgtgccatgtaccaggaaaggggctttatgcagggcaggtagtaaacctttgtactaagatcactttttccatcactactctctatcttttttcatgttaaatgtgattgttttcatgttttataaatcacctcttaggaaatagtggtattctcttaggagattttagtctagggtatgtggatagaaataaggtctgtgaacttggattgggggaaaactttatctttatttgtattcaattaaaaccaaaagtaagcagttttttcagttaaaatgtgagcaacaaactccagcaatagagatacccatgactttgtcactaatagaaatgacagatacttttataacgtgttccagacattgtacatacttaaaaataccagttatgctcgtcatcactacattgaaattatcctaaagacctgatgctagatcttgttaattaacatattaggaaataaaacatgtattactacatcacaaatatttaaaaaatgtgttgcacattgtatttcagtataattgttttcatttaaaatcctatgtattttgttttatgcatttaaaagcattattatgagaatgggtttttaagcttcaacagatgccaaaaagatccatggcactaaaaggctaaaaaaatccctgctgcagaaatacagtagcaccatactgtagaattttctaagggcagtttcttatttgtggatggattttcaaatatctgcctttagccactacatgtataaattaaataaatataaatatatttagttgaacaatatgtatgtttattaaatatttataatgaaaaataagacatgaattatgcttatgtacatatatatgttcatagttacccaacaatgaagcttcagtatatatggtatggttttcatgattcattaatacatagttataggtttaaaaccttgcagaatcatagtaaccatacagaaagccgtttcataagcattaaatcttaagactacaagacattacttgaaggtcaatgctctccttttcacaggctactcaaaaagagattgagaaacagaaggtgcacctgaagagtatcacagaggtaggagaggccttgaaaacagttttgggcaagaaggagacgttggtggaagataaactcagtcttctgaatagtaactggatagctgtcacctcccgagcagaagagtggttaaatcttttgttggtaagagaaaaggctagaagcttttacacccttctctgtcacgagaaaaagatacataagtgaccagtaacaattctgtgtttgaaaatttctcaattctacgtatatgctggctcttaattcaatatctataacaatattttaatatatttttctttatatttacgcaatattctatatgaaaataccacttaaaactaatctcaatgaaactttattgttgtcttttaaacattttagaacataggaaaaattctttaagaatattgtctaaccaataatgccatggtatgtctctgtacaattaaggaataccagaaacacatggaaacttttgaccagaatgtggaccacatcacaaagtggatcattcaggctgacacacttttggatgaatcagagaaaaagaaaccccagcaaaaagaagacgtgcttaaggtagcaaataaaatatgaaaagtaatgtccaaattgtacaccagttacttcaatcatctttgtcctaaaagatactaaggacgtcttaataagagtaaaacaatcctttcttccttcctttatctttccctttttccttccttccccctttgaatggaaatgaatgattttgaagagttctgtaatctgactttctgttcaaatccatcactcagttaattatacccaatgtaaactccgttcagaaagatattccaagatttattttgaaatcatattgcaaatttctgcctttgtcaatggtggtactacattcttgtgtctaacacaaagaacaatctgacactatcattcatttagcccatctgaatgaacacctgaaatccagtcagctgatttttttgcctatgccatatccaaatcttggtaattagtcttaatgttgggcttatgtaaagctgaggttttcatttttaactacatgtaaactaggctttgggttctttcttttagtctcaaaactgactgttaggatgccctgtcttctttttcaaggggaacttaatcttttctttaaaaaatgattccgataaaagggtatgagaggtgtaatacgcaaatataccttatagacactacattgtttctatttgatgatgtctcttttcccaattaaataggtagagttgaattttaacagctctcttttcaataaacattttttattttgttttgctgcaatgtttgataaatttattgattagttgtttactatttaaagaaaactcaaaaattatgtttctttctatgcaatttatttttatgcctctgatattttccacagattacgatatacctttaatgaaaaactataaattcattccaggctatccccaaaacacatttatgccattgtctgaagcttattttgatgtggatctgtattgtgctcttcattatcccttgatgtatagtcagagatgtcatcttatggtgaatttccttcaaggctttttgaataatagggtctgagttatttaacttcaacctctgtgacccggcaggtcaggaagaacattcctcagtacctctgtatgtgacagaaaattcgtatgtgttagaaaatcactttttttcttatgacactcaatgtaataaagaggaacttgaaagtgctaggaaggaatagaaaagtgttcttcagctacctgacctcctgagcacatacttagttcattccacaactattaaattcagtaacgatataataaaataagactaaatagaatatattatgatagttgcaacaacatagttgggaaaacatccctgtccttcctcggactaaataaacattttaaatagacatgcatcaaacttaaggacggtgatctatttttctgaaatcacacgcattttcattttagtcctgttttatggaagttgtggttttatctccctttgtattttctgcatgtgcttgctctcattttcttactttctctctctctctttctcactcttctcgctcacttgctcactcgctctgtttggctctctttttctatcttgaccttcattaattactaacttcaagtcctatctcttgctcatggaatatagcgtttaaaggcagaactgaatgacatacgcccaaaggtggactctacacgtgaccaagcagcaaacttgatggcaaaccgcggtgaccactgcaggaaattagtagagccccaaatctcagagctcaaccatcgatttgcagccatttcacacagaattaagactggaaaggtaggaagatctactccaaggtggaaacttgtgctaaatggtctcttgcgaaggttgcgcagtactctgaaaggggcaagtagaccccacagcaaggttttcaaaaggaaaatgaatgccaaaatgtatttaaggaaattttaccactgattataatgggagataaacgccactcctccccgtctctgtctctctctgtctctctctgtctctttttctctctcatcttttgctgccatagatattctaggactgcattctatgctgcagtttacatacgtactttcaggggtcacctacagaaaaaaataacaaatagcatgctgaaggccaaaaaaataaataaaaccaaaagcacacaagtcatccatcaacataaagcactaccgataaattttgccaaaagcagtactgatacaatattgcttgtatgtaatgtggatcaaatatccaaaatgaggtcttgtacatcttctgcacggtctagggtgtttttttacctctttactggttgtgcaagtgtgtttgtttaacttgcttttgctagttgtagacactgtgacaaaattcattaggctataatgaaatgatcacgccatgaaaacaaatcattgcaaagcttacatatcctaatttttgtaattttatatgcctatttatattactgtttaagaagaaccagggaatatggaacttttgcgtgatagactttatatttgtgtatgatttgatgaagagaaagtcttatttaataagtagtttgcaaaaatgtataaatatagtgttatagaatttcagctctttgggaagatttgaaatgcaagtaattacctagaaatttatatactgtagtttgataaatttcaatatatatgatatgctttcaaacataaaaatgtatataaaatcaatatatgtatttaggtatatagataattgttagaaataatctgaaatgaaaaaaacattggagtatttatgagaaaatatgatgcagtatgtcaggtaagtattgattcctggaaaaatagaacattttcaaaaaatattttgatagatataagcaaccagtaatagcatggtttcacaattgctgcactttctaaggcattacagtgtctcatcatgttatataatagtacatatttaaagtagttttcaaaataagtgaaatgtgacatgataaattctaaatagtttagcttgtatgcatgagacacagttacccttcaaaattcaccttcccaaattaaaaagttgttagtttaccttaattcattgcaagttatttttaatagttaactacttagttctcttgtactctctctctccatacatagagaccttatatagttgacttttaaaaggctatattctctacatatggagagagacagcatgagagaacttagtagttaactgtcacaaatatatatatttgagtcagtcattattacctgcaaaaaaatgtgacaggctcttaaaattgattaaagttttgaaagaatgtattgttacttacaaagacaattgtttttacttctaaagatatcaatggcttatgtaataacaagacaatgaatggagatttatttcaatccttaaaaaatgctactacttcattactaagatatagacacacacacatgcacattttaataaatcactaagctatagaatatttaagagaaaataaggtattatctttggataaattgtgttacaagattgtggttcacagatattaaaaaatgggtagaatttgctctccaccacagatgtgacagacccagccaatacaagtttgtgaccaagacaagtttgtgagttttcatttcacattctgcatgaatttgtaagtatacttctggaaatcatgcataaagtgatccactctatgaacttcttttattttccctagaaacataaggcataagaaatttccagtgaatattcatttattattattattattattattattattttgtgtgtgtgtgtgtggtggagactctctctgttgcccaggctggagtgctgtggcataacctcagctcactgcaacctctgcctcctggaatcaagtgattctcctgcctcagcctcccaagtagctgggattacgggcgggcgccgtgacacctggctaatttttgtattttggcagagacggggtttcaccacgttggccaggctggtctggaactcctgacctcaagtgatcctcctgcctgggcctctcaaagtgctgggattacaagcgtgaaccactgtgcctggccccagattttcaattatatgttaattaacaaaataatcacatgtttgcttttcaaagtatttgtttttctctaaattagtaaaggcaactgagtgtaacaatgaccccattttagggctctgaagagataattatgctctattatcacgatgaaatgaaaaacacagaaataaagcatatctgacactttgcttatatattcattgcatcagctaatgggattgagcttccattgtgttagagattgtggtgagaagatacaagggtataaagatccttgcttaagaaatacatgttttcaaacagaaatgaatacttagtataatcataaaatatgtttaacactaattcatcttcatggggatgttcaaataatggtgagatgatctcggcagagagaacaatagatttagaaggtaatctcaccagagaaaacagtggatttagaagattgagatttaggcctaactttttcagtagtagccagaatatgtgatttttctgcatatccatttcattgtttgtaagatgaggaagttaaaatagactaacaatttttaaaagaaaacctatcctgcccaaaatattattatttaaaataaagtattaaatttaaatatttaatattaaaatcatattatttaaaattaaattaataaattggaaaataatagagttactagatgggggaaatatctgccattttatctttctccttcctatgattgaattcaggaagtataaattatgctcatagaacatggtttgaaatttctaaattagattagttcataaatccctgctcgttctaaaatttggctattcagtaatcttttgttgattacaataagaaattgaaaacatttaatgtcttgtgtgtgtttgctctggagtagggaagtgctgaagtgctggaggttttagggggtagcctttgatctcaaaatcaggtttctttatagtaggggttatacaggataatattaggttagaatatggcttttctatggttgagtctatgtctaagtttcatggaagagtaacctggggaaaaaaaatactatggtgataaaaaaagtagatttggattgaacacgggtaggtcatagactctttgtaatcagtaatttcagtatagcctttagaacataactctaaagagcccttgaatagagaaataacttatgctgaaaattcactggtgtctagatttactatttggtgaagaatacaaagtggggtactcccatgtctcctgccaggactgttcatgacaagaaattccgaagcccagaaagcagtgagtaaagggatcctcagttcagattggctgaggacttgactgtccaagtgcagctctctgtaatgttaattttggcctcagcaaggagcagtatggtgagagcaaaaagtccttaacttcaagacacaagacctgctttgagcactagctgagcacattactacttagtgattttggatatgcctctttacctctcagagcctcatttctagctacaaaataagggagatgatgcctgttttattttaatctaaagattgtaatgaggatcaaattatgtaatatatgtaaaaacatgcatttaaaatgtattaatcagtgtatagatatgaaatggttaaaaataattaatatcaatgggtatttccatcgttacgtatattacacttgaatggccgaatctggggggttgagacaaaaactgatggaaaaaaatgaaagaattgctgattttctgtggtctctgctgtaatcgactggagtcagaaaatcgtgtctttgctattttcatgacaaagaccagccttaaagataatgaagtggatgaatttaagaactactaaggagttatgtttgtcccacatacgccccttaaaatacataaaaatgctgccttttcccattttattaaggttacctaagagtatccaatgactttgaaaaaagcgtgttttttcgtaatctatgtgaaatcaatgtgaggaaatggcagttttaatggagaggatcagaattgcaacagtcaatcagagataatattagaaccctgagtaaattgacagaatcaatgaggagagactccttgtctcaactgtctctgttttagggcatcggagtatagtggcatggctgagggcaagtggataccatcgggaaaataaggtgataggagacaaaagtataggaaggggcatgggaagacaaaaataaactgattatttattcatattaattatgacagttctacccctctccatccctctagaagccaagttggagaaggggagtcagcaatttgggagagatgctagttgaggtatatctaaaagcactaatgagtgaagacttgagaaaagggattaatcaggatgaattctcaccaaccatatattattttccgataacagtgtttggtagtgagggggatctattgctaggtaaaatacgatggattcaaggagcttactgtttgatgatagggcaagatgtgttcatggatactagattgagagtgagtgcatggtaagtgagtttagcagtcactccagcaacacagaggaggtaacaattcggcataaacatatgagaaagcttaggagcatacagtgtgttcaatgaagagtgagttcctttagttttcagagtagagggcatggaagataaaacttagttgtggatgataaggctgaagattatggctagacacagtgtgaagaggtcatggacagccagactaatcattcatgcttaattcagtatgcaatgaagagttcttgatgtgctctgtgtgtgtgtgtgtgtgtgtgtgtgtgtgtgtgtgtgtatctgtgtatgcactgttgagaaattagtccagtgatagttgtgaggagaattccactgaataatgacatgaagttcgggagctattgcagtagtctagatgagatacactgatgacctcaaaaaaagggatagctatgggagtggaaaggaaatttcagtctagatcagtaaatcttttgtatgcacttgggtgaattgttaaaaccagtgtgctgggccccacactcagagcttctgactcactaggtctggagtggagcacaagagtttgcatttctaacatttttctaggtcagattgatgctgaaggtctagggaccacgcttagagaactgctgctgcggagatatttagaggtagcctagagttaagtcattacatacaaggacccaagaagatgatgaattcaaaaatgactccaaatttaactctgattgactaggaaagtctgcatataaattccaataataggcctggtgcggtggctcacgcctgtaatcccaacactttgggaggccgctgcaggcagatcacctgacgtcaggagttgaagatcaacctggccaacatggcaaatccccttctctactaaaaatacaaaaattagctgggcatggtggtgggcgcctgtaatcccagctacttgggaggctgaggagggaaattgtttgaacccgggaggcggaggttgcagtgagccgagatcgcaccactgcaccccagcctgggcgacagagtgagattccatctcaaaaataaaaattaaaaaaaatttcaataataaaatatgcatcaagttatatttttattgttgtaatacttagctgcaaaataattttgactaaacaaactttaggtgtgtcatattaataaaggcaattattttactttttacaaaatattatgtaatttctacataaaatttgcttagattgtatttttctagagatttagatatacttcactgttctaaggagctgaaatgttaaattatttattctgaaattgatactaaccagaaaaaagtgaaattattttctctgactttgatcctttactaagacttatttgctataggatatatctggcatatgttctttaatttccatataggccttgaaaattgctgctaaaattcatgtagcagtttctatatatatgtattacaactgtaatatgagatttggacaatcgggcatcaaatacttaaatattcattgtttgattgctgcaataattgtaaattaccaagtttttttttttttttttttttttttttacttccattcagtgtcagaagatataaaagtaatcattctttggataagagactttcacaagtttataggaggctgtgagagagtcagtgaccttcccatgtaatgtagaatatataagaaaaagaaacacatgattgggcctaatctatcttaaaatatggttctatgtgtggaaaataattaagcagtgatttaattattttggctctcctaaacttcggtgggaaataaatgatgcattttataaatgtgatctagaaggtccaatgaagatgtattggattgaaaatttttaattaaagcttaattttctgtagtcagatttatcaatgcaaatacattgatattttgcagtctctttctgatcgtattataacttaacacctatgatggaaaataatattgtatcttaattggaacagtattcttgctatatatattctttaaattttaatttttttaatttttgtaggtacattgtaggtatatagatattcatttttagtaaaattttctataaaaacatgaaaactgagatgaagacttgtaaatattgcataatttgtagagcattaaatatgtaatatttacaactaatatcttcaggtaatagtaacagatcactagtcaaactgtataatatctgcaaattttattttactaaaatgaatcagaaaaatatgaacctaacaacataattcttatgttagcttattttttccacatgtgtaattggttatccctataacaaggttaagtccattgaaacttcgctaataaatccctttggtaaccatgtaaaatatttttaaagtagatgtgtaattgagtttggtgagcagtgtcatttgataaaactatctgggtcttgttagcataacatttgaaataattaaagctatttggtgaatcttgattgttctcctttgataaaggaaaattagtcccctgatcagtgtcagtagatgtaaagcaattttgctttggaccagagactttcagatatttataggaggttgtgagagtgtcagtgagttgaccaagttctcacagttagacagtgtggttagcaaatactagatctcagtccattgctttgtccacttcaatacactgactcagcatagtttactgcctctatttatgtcataaagtagtttttgttggtctactatgtgttagtataaacatacccaatttcacttcaaatacagtgatttcgttatactttttgtattaaaaatgacaagaacaaaaggtggtagggaggaagaaatggaagaaggaagggggaatggaagaaataaaactggaaaacaacctaagtaaatgaaaagaaagtttaaaatacaaaattgcttaaagtgttatgtttttacttttgtctgtctcccccatacattttagagttaaatgttttcctcttttaattcatttcctactccaaaaagtcatgtaatcatgaaatagggcaatattctaagttaaactttataaaaggtcgacagtaggaagcagattcttgacccacgaatatattttgcatccagttttaaaatgtgtaagcatgaaattaacctcatccatacaaaatcaattgaaatctactgggtaatatcctctaattagcctcacaaattagtcacattttcacatttttattatcaaagcattaaaggtaaaccagtactttatctattctcaaaagaatgcaaccaatgaaatgtcactatttggagtcaatttatttaatttaaaaataatatttcttacattttcttgtttgctctaataattttaaaataatagaataaataagtttataaaccatattttaaataatctttcttctagcatagatgtagtatctttccaatacacttatttgtttttgtaagttcttttcctctacagatagaatgatgtgaaataactcttcatatcatatcagtagtctgtcttttctgtactatagtgtgttacttgtccttgaaatttttcatcttggtttccatgaattctttatttttctatatcaatattgtaatgataaataaattttcaaagctgcagaatggaaaaaggagactgatggatttgaagcaattttaaaccaatctgtagcacttggattatttattttcaatttaggttttagtgtgatttgaatatagtggtaatttatcatgattattaagattccatagtccagattaacaaatgtttacttgctgtctgtgtaaacacagtcgttattatgctagtgtatctgtgcatgccaaagtaatatttaaccaaggaaagcttacattttaaaactaataaagtgtatctgagtaattttgaatgctttcaatttacaatgaatcagtttgtaattgatcttgcttttcttcagtctgttatcctttgttaacttgttataaaattcagctttaatgccaaaacttcaacaaagccttaaatttcattaatccttaaataatccaacaaagcacaattaatagttgttaagcaatttgaaacattaaaaaatcaaggaaaacaaagtgttgtctttctcggtttctctgtctcttctttatgtgtccatttatccatttattatacttccctgtcttctaatttatatgtattttgtatgactgcacagtcatgctaaagctcttaaaatgaaaaggtaagtaaaaaattaaaagtgtccaaaacctatgcttggtatacactttctcatgcaatattataacttttgtttgattattttctatataactaaaacctattttgtgtgcactgtctaacattgtgtgatttaattgtgattccagttcttttgtggtcatctatttcctttaaagtcaatagaagtaacttacccaataattaagatgatttatcagccattgctttcaactgttttagacaatttatcataattctgaattgaaaagcaggcatgatatactttgtgttttaaaatttggtgactcaagaatgagctgttaaattataaacgctttcttattacatgtttcctttataaagttgcataagaattccaagttacaaagacagggaagaccaaggaatgacatgtagaattttaattgggtgggaaagtgttttctgttttagaatgggcatagcctaatgctgaactagtgaactcttaagaaaagcaatgaatttttttcatctctttgtgtccaaagactattaatcatatggctgtcaaatggctggtgctatcttgccaataacatagctaaaacaattggtttgataaacttattttggttataaaattggtcactggttgattaaattaatatataggtagttctaaaactaccgattgatataataagcaccttttcctgtataaaataaaaggcagtgttttcactggaaaatagagtagtataagacatattgccaactttaaggatggaaaatttatttagagagacaagcatatatctttgaaagccaaataatattatattcctgtctataagaaagcagtgcaacacaagctgagatacacataaatgagaatagaaactcctgaaataacaggtcaatcccactcccgtaatttttcctataccccgaggactgcctgaaaatttcactcagaacacataatgcaagataataagaccgacgtaagaataatctaaattcaccacaagttataaacaaaacattactattttattcaaagtaattatgagatattagttctttacaatgttatgagtataatggttaatagagctctatactgcctaataaggtggtcatgaaccacatgtggccactgagctttagaaatttggctactccatgttaagatttataaataagtgtaaaatatgtgtgggttttgaagagaatataaaatgtaaaatattcatatttttgtattgattatgagtttatacaataatttggacatctcagtgaaatcagtaaaattaattttatctgttttttgttttttactatggcaactagaatatttaaaattacatatatggcatgtattatatttctattgagctgcactactataaaagttctacttgaatttagagacaagaacttactgtaaggttataaaattttaagaaaatgtctgtgtgaaaaggattttgttcctaaaatgtgactgaatacatcctcatctagtctctgcttataaacatttagcattacttgaaaatcagtgtttttaaaaaaattgcagtcctcatcagttgttcttatataaacctaaaatttaggctccaaataatttttgcccactgattttagttaatcactttgaaactacacaaaataaaactactcaaattcttaatcttcctaatttttttaaacaaaatgcacggtagtctttcattggaaaatttagaccctacacattgaactaaagaagtctaagtttccattatcttgcctgaataattagcacttcagtttttggtagtctctcccaaagctctttttacatcttcccccttttttgtgtttacctggtggtatcatgttgcttagcatttgggcagcagttaatatacatactcatataatgctaaccagtcaggtcttttgacatttctacatagaaattgtgttatttaaaattccatgtcactaaaaaagctccttgaaatgtctattttggccctcaatttttagtcttttgttcatttattttttcaggaaatatttacttatgaatatttactatgtaccagaaatgactgtaggttgaacatgagaaactcagctccataggatgtctagggaacacaccccactgactgtatctgtggtatgccttttctgtctccaaataattcctgattaaaaaaaaaaaactgcaccctgtaaactaaatgcaaggctgtgatatcactttttatattgccgcagataaattaatctgtagttttgttcttcaggattatgtaactctaccaaactggaatctaaaatcctccatgttcaccattacaatgttatgatttcatcaaatcccttggtaaaataaagactcattatatcaataagcatgtattttatcctttaaaaccatagatttcaaaggaggaagggcttgacctgagccaatggatgattaggattttgagaggatcaaaataagacccaagatttatagagcatgtatttatattggatggacacatagaagtttgagagaaaataatagtcaacatttattaagcttttattatataccagacaccattctaacatatttgatcttagtaatagccctgtgaggtagatattcatcttatctccatgttataaagaaactgaggttcaatgaggataaataacttgtctaagttccctcagctagtaaatggtagagcccagattcaatctatgcattttcatacagaagtttatgttcttcactagaagatgaaaagtattctaaggtcattgaaggaggcataacagaagatcaccaaatggcctgcaaaaaaaggtctatattaggaacacttacataaggctggcaagtctttggggcaagattaggagaagccttgactactgtgctggaggttggactttattctatttatactcaatagatgcaggaggttcttcagcaaataaatagcataatgaaagaaaggtttttgaaacatagtaagctgatcattgggcacaggctggaactggtttgactgaaaggagattttacatcttttcaaagcttattgccttagttttgtgtaaggaccaggaacgatggagtctctgggaatacaaagcaagtggatcatagcaagtcaattgacacttacttgatatttattagacattagagtgagatgttcaaaaatagcatgacttacgttttacgcctgaatgactgagagaaatggtcttccattaagagaactagggaagttagtattgtaagcagtttgcgggaaagataatgtgctccatactaggaatgtgaaacttcaggtgaaaattcagctggctattggagagtctagatgggaattcaaaagtcagataacagcttagggtgaagacttggaaggcataaaaaattgttaaattcgtagaaaattgtatcttaaattaatagaagttaaattcatggagagatgagctagagaagaagcagttggaataaaacaggtaaatctgactgtaaatagacctatgttcttctgacatccaagtacacaataaaagttattttcaacattatcattatgtattcacaaaatcacatagaacatagttgctttcattaaatattagcaaatgtgaacaaccatttaataacataaaatatcaccaaattgataattgtatagttatgattctaagggttgttaatctttttacttttaccgtcatctaaacagtgtatgattttattgtaccgtaattgctaataatacagacattgaaactttaagcatgtttgtaccactaccaatctatactggttcaaataacttatgatatttcaaatggcaaatgatcattaggatttaaaaactggtactgtaataggtcacttaaaattatctcataaatctttcaggggtgtgtagaagtacctagaagatatgtggttattcatgttgcatatgagaatcatgtcatcatgaatagaatttgattattcacttcttcaatagtgacagattattacctttagatatttagtttttcttctacacttatccgtattgttcaccagaagttgccatctaataaaaattcaacctcttcctgggaatgtgactggagaagggtaggtggggaccaaacttgatgaatgtaatcgtcttggcaaaagacacgggggtcattcctgaattggttttacaaaagtaaaatgttttagctctgaaagaaaatcagatttctgtatgtcatctatgggttttcaagagctatcccatataaaatatgttctagtgttttaatggaaagaaatacagcataaagattgagagagtatcaatgtattttattaacagaattttaatctaataactaaaccttgcccacttttttgaatatatatttgattttccatgtcttttcacttatcactccttttcaagggttttgtttagaaagtcaagagattttaaagttttcttagactggtcattatcagttcaaaagtaaagaaactgatgtttacaaggttgaaaagcatagattctttatgtgaaatatattaggttcattcgtttgaatttatttgcatcaccaaccaaactgttcctaaggcaagctaatggcattgtcttagaagagcatgcctgtcaattgtgctgtgctaaaaatgtcatttaaaacatctgagcagattgccatgtagtttttctaaggataagatgacaattctgcatttctacctgaggttactgttacttgataaatgaggcaatttctgatgagacatatttacccaaatgtatttatatcagaatatttaaaataaggtcaaatttgactttagaatattaaaaattagcccattcaaatgtatctgtaaattgactgttgttgatatcaccaaatgatgaattgtactatcttgcatgtatgttcagctctggtgatgtgaaatgtttctccttatttgcatcctcaggtacttttccagttgtatttcaaaacccttcataaaacataatatggaaacataatgcatgtgattagtttagcaacaggaggttgaataaatgtatttcttttggtttatgtttctaataaaaagtaattttgatttaaagtagcactatctttttttttaggcctccattcctttgaaggaattggagcagtttaactcagatatacaaaaattgcttgaaccactggaggctgaaattcagcagggggtgaatctgaaagaggaagacttcaataaagatatggtaaattggttgtgataaaagtgtgaatgaactaggagtggaaataaatatttggaaagaacttagataagtctccaactgaattttcagagcacatattacacattttatgattctaatgaattttataaatgcagaatattcttggccttttattacaaatgctgaattactatggtatggtaatataggagcacttacggtttctaataaatagcccagcaattttcttttgacctgacctacttttgaacttatcaagggcaaaatgtaattggaaaaaagagtcgaatcataaaataaactaaaaatttaataaaatactcaactatcatagatgactgacattttgtatcagcaatgtttttggtagtataacatttatttcaatgaagagagaataatgcataatatgaacattatttattacaatttcccacaaagttgttttaccaaatagttgtttagttagtacattatatgtctaaaatgtgtataaattcatgctgcttatttcatgggagtaaagaaatatgaccatgtgtgctcttcccaacctcagaatattctccttcaatcccaactaatttcaaagtatctactacatttctctctggcttgaatatttgtacatcacatccttattaactgactttttttttctctcttcatcctccttttcacaattttttcccctctttcactgccatcacctctgtggcattcttaacctttacaattaccagtgctagagccttctcagacaatgcttgaaagtgacatcagaagacaatatataaattttaggtaataagtgtgtgaagcaataggagaactattcccaccaatcttagttcccacttcctggagctgcctcaatcaatactccccatgtatggggtttggtggccttgccaactcagcttgtggaaagacggaagaggctttccaagttgctgagttacagcaatctctacttcaggtcaaagaagaaactagagggcaccaagatgaaaaaaagtactgattacctcttgggctgaccccaactctgccctagagccctcaactggtatagggaaagaagtgaagtgggttttttaattttttgttgtttttgtcctcagccctagaaaatgctacagacttttacaacaccttttaaaataagtaaagtcttttacagactataagtatatgatgtgtctatattatgataagtatataatgtgtctatattatgccgtatgtttctttagattattgaccagtctctgacaaaaataatccctttcccccatacaaaatgaatcagtcctcagttgcgtgttgaagtttatgcattatagatttaaatatataacatctaattccttgaattgtaatacacacatacaaatacttgtgacttttgaaatttattatttgttttccttatgtcatcagtgtaccttgagtaccattacaatgtgagactacttgatacaaagttttcacattctgagttgaaagaaagaaaactaaaggtgaaaaatcacatggtcatatatgcgactatattagaccagcatttattcaaaacattttatttctaagtaaagaaaattaagatattgttcttgcagcctaaaggaacaaaatacccattgaaaatgtttaaagccattttccagtccatattttagtattatttgatcgtatttaaattaacatgcatatatgacatattttagaaattatttgatggtaacttagcacatgatttttattaatatcctgatatttctcctattaatattgagcatttaggtttcagaaatgaagcaggagttattagataggaattagtgtacatttaaatcaaaatattttcatgtagttgtgtgttaatattttcagatttgctgttatctcagtcacaaatacacatctgtattcctttatggatcagttaacattataaatgataactttagctcatttctctaatgttttaatttctagaactacactaaaaaagccaaaagaatactttcacagtaattcatgacttgtctgacatgatgaagtaccacactcccccatctttctacaggtgcccctaaaaatgtgttctttacaactagatgggaggaaacttattttgaaacctcaagtaccaaatgtaaaagaaaggctatgagcacagtatcttataatagcattccatgaaagttttaaattggatttttgtgtgtgtttaaataacatgtcttattatctctgttaacaatgtacagctttttaaaaaccaaaatgaagactgtacttgttgtttttgatcagaatgaagacaatgagggtactgtaaaagaattgttgcaaagaggagacaacttacaacaaagaatcacagatgagagaaagcgagaggaaataaagataaaacagcagctgttacagacaaaacataatgctctcaaggtattagagctaaaattataatataccttgcctgtggtttttttttaatatatagggtaaaatataatgtgcattaataaaatctgcttcagacttagtcatcagaaactcactttttctgttcaatgtgtatgctttatttaacatttttgagtggtatttgattttgaacgatgtgttgcttaaaagttatggctttttaaagacatatttttctaagtagtaattgaaagatgggaatgcattcatagtacttatacatttaattttctaatgtgctttatttttatcagctactttatattgaaaaaaacctgcctaactgccagaataaccgatctacatgtatccattattcctgctttctttacttaattgattttgcttgcattaggtccaattttttggtaacctgatacttgtttaataagccctagattcttttatttatttttaaaactttattatgcctttaagaaagtcactctttgcaactatctacaaagtcaaatttcatttatgtaggaatcctaaaaaataatcttagtgcccttgaataagaactgctactttcatattaagcagtgtagtgtatggcttcaagtccccaggtgactcatctggtttgtgcaggaagagcaggataaacttaatttttctataataatatctaggaagttcttgagactagacatgtggaaagttttgtgaaactttttttttgtatatgctttgcaataatcactatttgcatgcatggctgattttctaatacttttaattgctgagcttttccttgtaaatcactcttttgagctatgtagttatgaaggtggatccacctagcaggtagatggagtctgctttctacatgcaaataagagaataaaacctttccccctatagtcaaccaaataaacactgctgagaatgtaattacacaatattgtgcctgcaaggaatccacaaggaaagtctaattggccagcaggtgttctgaaggtaactgctgataaatatagtaaacagaaaaggcctcttcctcgagggagtgcaaaagcacaccataatgtgtctagaaaatcggaacgctatgtaactcacacccttccaactgtgagcaagctttcagaagtatctacactggtcgtatgatggtgtgtgtcctactgaatagcagtgtttaatggtcatctggcattcctctaaagaaatctacatgacatctctaaatattttacatattatacatcactttgtgcttaggaaatgaaagatgtttcagattgatgaccaccaagccctttctcctggcaaagatgtgagttatgtcacaaataaggcatggctcaactctaattcacgtggctgtatcttgctacctttgaaaaaagcagcgttcgatctgactcctcagaaggtttgaaaattcaacataaaacataaagtacagcaaggtttaaattcccaattttaaacaaactagataatgaaatgtagttcattcttgcaaatacaggctataagtgattaatcaaaatcgtcaacactactcgccaaaccaatctataccaacatattcaataactttttaaacctgtcaaatagttccaattctggtccttatgaaatattttagagaaggtcaaaattttccaatggaatgaaatttttagaaattccctgatatttattattttttcgctcgaattaaacctgtgaataaaaccctaattgctactttctgtagaaatgaaagctgcatgcagagcttatgttcccatgaattataaaatggcattttgagtaattctattaatcacagaagatattgagtgtgcttgtaaagagcatgatgactgatttcctcccattgttgatttattaaattagtcttatcacattgatttgaaagcatgcacttgctgttttcttttttcaaatagttaattgttttgcatttagagcatgatttggtatagtaagataaatgtggctatgcaagccttggaaggagaagcatttatctcacataattttttattagttatgttcaccaatatacgaacagtggtgacacttctacacatacagcttggaacagtttataagacaactaaaatggctttatatttctaatcataaaatattaatggcctatgaaactcttatgtaggcatttctaaaaacatgaatgtatattggttgagtacataaagttttgttgatgagccccaaggctaaagatatacattttagaattttacctattttaagtcagatacaaactcactaggtttgtgagtttgtatctagttaagtcaattgtattcgtatattaaactcttgcacataaactacacaacagttagctcattaagagtcaattgaatgtgacaaaatttttaagcaagtttgaacatgctaagagaaaatactttaagtgtgttattcaggtttcttagcttcctatacatgggtcccgcctcatgcataggcaatttaattatgtctttgtatattttgcatttaaatatgattttaacctaagttgtacaaaaagatgagggacgcaaattattttgataaataactgcagccagaagtgcactatacatatatattgatattttaataatgtctgcaccatgaacaggatttgaggtctcaaagaagaaaaaaggctctagaaatttctcatcagtggtatcagtacaagaggcaggctgatgatctcctgaaatgcttggatgacattgaaaaaaaattagccagcctacctgagcccagagatgaaaggaaaataaaggtaatgttgttttagaatgtcaataccagattttattatacagtttaattaacctgtgaagatcatatttaaaatgttgatgttcttgtttctattaacgttctctttgatttgatgcatttccttgtattgtgtgttgttttcagtaaatgtattgtattaagtgttattcaattgacgtaatgttgaatgaataaaatgttttagactatgtaaagtgatttaagaaatgtgatgtgttttctggtaaaattgtaattgactttgtgtatctttgttccagatgaactaatgacttatcggtatatggacgacttcttactcatgttagcccattcatttcatcagagcatcttcacacatcagtgttcactctctatagatttatttgcatattgtctaaatatgtttttttctgttattattttacactttttattttgcttcattctctgttgagttcctcaaacctttaaaaaggaaataaataacttattcacttaccctctaaattatattctatgtggacggtccctaataaataatgagttatcactccaaattgtttcaaatcccaagacaccagaggaatttagaagaaagaaaatgttagaccaatttcaatatttacttaattagaatatctaaaaccaagcattcaaaggataactgaaataatatttgggttattgagcgaggatgacagtcatgcctttcatatttgtaaacttcaaaggatgacaataaagggacaacagcctttgaaattttgagagaagtatttgctgcttgcaagtcggttgatgtggttagctaactgccctgggccctgtattggttttgctcaataggaaattgatcgggaattgcagaagaagaaagaggagctgaatgcagtgcgtaggcaagctgagggcttgtctgaggatggggccgcaatggcagtggagccaactcagatccagctcagcaagcgctggcgggaaattgagagcaaatttgctcagtttcgaagactcaactttgcacaaattgtgagttgttactggcaaacccacgtatgtgtttgcaactactactctattaacagaggcctactaataaaaaaaaaagagacaaaaaatctgggtacagttttaaacttctaatgtacattctgaaagtgagtggtttccctcactttgggcttctgtaacactagtgcttaattttgccaattaaagacacaagaaattaacagataacagggaaaaccccttatcaaaaatgaaaatacatcttaattttttttgctacatcatttttcataacattggcaatgttaatttgtcaatttatcatacattcactttacttcaatgtctaatccaaaaaatatgtattgctttcctgagatcatcccatgctgattttactttcttaatgtatacatgataaataataaatatttcatggtacatcttatgtcaacctgcataagccattatctcattgacttgaagaataatagcttaatcctcacacctggtttaactacttaatgggttacagtgcccataaaagaactggatgcctagtaagatggttgctaattgattgcagattgaacaatatcagataatgttattactgaaatgttaccagccaaaacaaaaaggagtgactgctcttctttcaaacaactgaatggaaagtgtatggttctctctttaaaaaggcgattcagaattgttagcttggtctcacttctttatttgtagtaggtataaaccatagaggttttctgacaggtacatttttgttcctattattaacacttgtaagatgaagaggaatgatcatcatctgtaattatagaagaaagtactcctcacaaaaccaggatgtcaaaatctggaaactaagtctttatagttaagttaggttgaattatatgaatcaaacagatactcaaccattttgccctatgtaaataataactgcatagggttcagcccatgtatgagacttcttgggaacttcttctgtgatagtgtcagttccatttaatttggtgtatatttttaaaatgtcaaaagcagttaccataacttaattttataagcatataagggaagtatgttgcatattattgtgacttcttttaatacttcaagaaaattaataaatacactgttttctgttaaatctaataccctaaagtttaatagcaggtgaattattctgagcaattggaagaatacgagaaatagcgaaactgtattgcatgtgaagtctaattccacctggctgaatgtttcagcctattatccttcatattagatgttatgaatgtaatgtgtcataaataaccttacactaaccagcaagcctgtgtctgcagatgcaaaatgaagcgaaagattaaggcaatcaaaaagaaaattctaataaaatagtttcacctcaatttaatagatcattcaagggggagtcctttgctttgaattatctgactactaactcatttctccattccaattttccccaggtcttgacacacccaatatgcaggtttaaaattcgttacaaactaatcaagttgctaatgctttatggctaaataggcacaggatcaaaaatctccataaaccacttacttaaaatgccattatgtccctattcatagtaggctctcaacaaatatttgtacaacgtaataatgactggtgaaataaaggaagcatgtgtgaaccagtatatatttttaaaaaattgtagtaaaattctgggatatattttcctcataaacgatttattcttaagttttatatattaaagatccaaaattcagaatgtgaagggggctatttttgtgttaactcttaattatccatgataataaagtaatcacaatctgtatgaagaataatcaatttaatattgcagttatatttggcatcgtattttaattagaactgagggataattgatagatgataagtaggtatataggttggtaggtagatagatagacaggtgggtgtagaaatattcaagatacatctttatacttgaccaattgtcaatgcattttaaaactaatttcactgtggccactgattagagttatctttcccaattcttacgccctagagtcatttgtgatagtcacagtaacagcttaatgaaaagtagtatttgatataaccttacaatggctctgatgcagcatatgccatagcttcagaatttcttacctccccctatattctccttctctaattgtttgatttttacttttcctaactgtccctttttgtttttctagatataaactgtaggcttaaagttcatctttcatgtctttacagcaacatgttgaaatagtaagcggtactcttaaaatgcttagtatgtgagagctgagtgagtttaaaatgaaaaattaattttccttatctcacagataaagactcagagaagtgctaaccactgtaaaattaaggcatttaggggactctgtccatgtcagagctatatatggtagtaataaagctcagaaaaggactgagactttgagggaacaatcatgaggcagcgcccagccacacaggaatgcagaccaaagcatagtagagggtatctgcaaattgtggtcctcagggcaaacctggagatgataaagaaagaggcatgagactgggaggacgcaggtaaaaattttaccagatattcaaaatgagagaactcctgccttaattaggaattccaatcatttctaatatatttcctgttggtttagaaactaggttcctcagttaagaccaagcacggactgtaaactgaggaaaagggatagttctataggatgtactatcacagcagtgtggtctagtaaaattaactcttggataaacagccttgaatatgaatcccagtgactttgagtgctgtatgatcagggataaactgagtctcatttacttcatctgtacaatagagataaggatgtttctgaggattaaataaggtaatatttgtcaaacacctgctgcgttatgcaggctcaatgcatgaaagttttcttcgtctcctttctgtatatatattaacattggaaaatagacataatctttaatttttaaaatattttcataagtcattaagagaattaagtacgcagcatttgtttaaaatgttaacaacagatatctcgttcagtgaaaatttcaaatttaattctataatatataagcagatacttttctctagattcacagaataaacacaggaaatatcacacaaatctgatgactgccaagaaagggcatgattttccctaaactgcccctcacatcattgtagcatttggaaaataacctcagagagcccaggcatttgcaaacacaaaattatacaatgaagataccactacaacccccaagggtcatgtgaaactgctaaggaacataagcttacaaactaaaattatgattattgtggaaaaaaattataagcaatgttatcagatgccaaacgttaaaaggagaatgtatacctgaagaaaatagagataagaggataatcaccaaaggatattaagtaatttttaatgttcaaaaataaaaattaaatggatttttttccagtaagaataggccattatataaagtgaaaacgaagatttgaaaaaacaaagtctggaaatgaaaatataattaatccctcaaacatctgcgtgaaataagtttcaagttgaaaaaaatagggattatggggaagagacaatatttcatattaatgaaatttaataaaatggaataaatgtaaattttaatgaatcctcaaattcaataaaggtcaaccaacgtggaaaaaataaaaacaagtctaccagctagctctgaatgaaactcagagcatcagtaatcaaaaaggtatcattaagggttacttaagacaaaagaacatttacaggatgacaatattgactgaagacttttcatcaacaatagatattagaagacagttgaataatatcttcaaaatgctaggcacattttcaaataccaggtaaaacatgattcaagaattaaggcaaaatattctcagacatacagctagtttcacctgaacaaaaactaagaatttcttgtctatagatttttgctaaaataattactaagcaatatatttgtgtaaaataaaatgaaactagaaggaaggagacagcgatgtaaagctgtataaaattgttttctctgtaaataagaacatttattaaaaaagcttataatcctaaaatttggtcagtgccaccaaggaaaacacagaatactaggagaatgcagtgtttgactgatcctgtgtaaagagagagaaatcaaatagaagacttattgcatatcctatgaattacatatccttaattcatatcctgcatattacatatgctatgtaaagggagataaaaacaagacttattcgagataatggcaacaaatataaggcttgtgcataatgtgttctatgtaaattattaccaattataatgtttctagatagcaaaaaagtgctaaacctctgaaatatgtatacatacatgacctttccaagaacagcagcaaaaaaatacaaaaaaaagcccacttcagtgaagaaaaagaaatgtccattttctaaatacatttccacttgagctgagcatgttatgacatcaaataccaagtatatgatcttgatgtttaacattttatatccaacagtctcttatcttggatgcctaatgagcatctcaaacatacaatagccaagtgaaaaataaatgatccaccccccatctacgttaattggcatctaccaacatctccagatgttattaaattgcactattatttacttaagtcagaaacctagacatccttcatgattcttttctcttacattaccatgtaaattatttccactcttgttggatatacctgcaaaatgcatcaaatcactcctccgtatctgttatggaagtgctaatctacaagattattatctctcatctggattacttcaacaacctctaacctcttcttccagtctttccccacttacaccatatttctcctggtgaaggcagagagctccttctaaggagttaatgagatcatatcaggcccctcctgcccattactctttaaatgaaatcctgtgatccgctatatgatgtagccccttcctatcacttctgttactcacactttgtctccctttttgctcttctgctaacatagaggcctaaaggtttcttttctatacttaaacacaaccaatttcatttccatatcagtatctttgaacatatttttctaatggaatatttttcacctagaattttgcataggtgctataacttatttagatatcctttcatttaggaacaatgaatatttagtagaactttgatgtataatctggttatgtaatgtagtagtttctgttataaatgttttatattccctatacttatgtatgcaaattcggagtttaagactgctcgttcagaacatcagtttctcttacggttacttctagaagtaggcatactaaggaaagacacagcttctggaacataaaagtgaggtggtaaaagatgaatatgaagagggttacaatattgtattgcaatggatagcttgtcctacagcagagtaattgtaatgggatattttgacaaaattaaagtacacatttccaaaatatacatgctcttggaaggctgatagaaaattaaccttgtttgtagattaaatgctgcaataaatgtgttatttaaaatagtccttggctgggcgtggtggctcacaactgtaatcccagctctttgtgaggccgaggtgggcggatcacttgaggaggagttccagatcagcctggctaacatatataacatgtcatgtatatatatgacatgctatacatatatacacatgttatacacacacagataacatgttatacacgtatgcacatgttacatataacatatataacatgtacgtatacacacgttatatataacatgttatacacacgttatatataacgttatatatacacgttatatataacgttatatatacacgttatatataacgttatatatacacgttatatataacatgttatacacatatacacgttatatataacatacacgtatacacgttatatataacatacatatatacacgttatatgtataacatgttatatataacatgttatacacatataacgttgaatataacatgttatatatgcacgttatatataacatgttatacatatatacacgtgttatatataacatgttatacatatataacgttttatatatacatgttatgcctatatacacatgttctacgtatatacatgttatatatacatgttatgtatataacatgttatatgttatatatacatattatgtatatgttatgtatataacatgttatgtatatgttatgtatataacatgtttgttttataatgttttatatataacatacacatgttatgtatataacatgttatataacatatacacgttatatataacatgttttatatataacatacacatgttatatatataacatgtatatataaatgttataaatacatgttatatatacatgtatatacatatatacatccatatataacatatatatacaagttatatatatatgttatatatatgtattatatatgttttatatataaaattagccaggcttgctggcagttgcttgtaatccaagcttctcagaggctgaggcatgagaattgcttgaaactgggagacagaggttacagtcagcagggatcacaccactgcactacagcctgggcaacagattgagaccccgcctcaagaaaaaaaagtagtccttaattgaataaatttgtaaaataaacacctatatattgtgaatatttttccactaacttttttaagttgtttgaatctgaatagtattatacattcacaaagagttttcacatgcatctagtttgatcacagtaatgaccctctcaagtatcattttctttgtcattttactgtaagaaaaattagcataaatgaggttaagagatttgtccaaggatacatctgagaaatggaagacgccaaacttgaactcactgctttccaaaacatggtgggagttattaataaaaaaggaaaaaagtttcagtgtttaaacaattttggtaaacagtagattaagcaaactttccttactctataactttctagtgcgtttgatatgctaatgggattatgactttctatgaaggggttagattctatagactttcacatctagacagttgcagtagaaaagggaaatttgatttcagattgatgaaaggtttcttatttgagtgatggtgaaataagaatattctttagaaaaaaatgggaagaacatcaccgtatcattattcttctgttgtttgggatttccttaaatttaagcagagatgtacaagaaaagtaataacagaactgtttgccaccaccttatgtaaaataatgtctgagcctagatttaatggtctgctacacattttttatattgtctcctatcttgtaataaaagcaactcattttgagaataaaattaggggaaatatattgtctttgcataattgccacatagattttcttctttgccttgaaataacaacaaagattgtcagctgccagtgcaacatccttggagaatttgggaagataaatgattttcttatttagagacagaatgttctttagcaaatggaattgtaaatacaaaagactaataatggttgttaagggaaatgttgcaccaggatgtagctgtttgtagaatttttctcctctcagctcaattttgtaattaacatattacaaggattaaaaaagaaattagctaacattttatgtttttctagattgttgatgatcatagtggttataaatatttgtacggagtttttttgttctagtgtctagttgtgtagcataatcagtttaatggttaagtagaggcatgttcagcgagtatcagcttccagaaagatgacagactgacttaattcctcaccccctcacttcaaatgcgtggaaattctgaataaaatataatttttaaaagttttaaatacacagctgggctatggtggaacctctcttccctctgtgtgccatgaatgatcaaatcatcttacgtgaaactgaacctggattgagagcctaatggctaggaagaagttttcaagaccttttaggacaaaatatgtgaccttcaacaacacataatatagaggtgaaaataaaacccctccttaaagtctgaattttcaagggcttccctcagctgtaaaggggaataaataaatcctacccacaatggagaagaggcattatctgtagtgataatagcttaggattttcaaaacttaatagaaattccaatactccgattgggaaactgagcaaatctgaagcagaaaagattattaaaaaaaagaaatataagtatagatcatcactatgagacgatgaatctgatgaatccaaaaaaagcaaagaaataattttaaatactgctgtatttccttagaaagtagtgacacttaaaatggtacctggttttagagcaatgatagaagccagaagacggtagaataatattttcaaaaacaatgaaagaacatccacgtaggaacctagaattgtgtactgatagaaactctctttcaggaataacattgaaataaagatcttttcagacacacagaaaccgtttactagcataaaattccctttagaggacgtcaagattggtctttaagcaggagaaagatacaagatggaagatttaagctgcaaaagaaaatgatgtgcaaagaaaatggtaaaaaaatggaaaagtcttaaataaacatttaccgtgtatgaaagtgtctattaaaaaacagaaaaatgctggacatcaatgaaacatgagaaggtggttaagtttttcatccagtttacctgctacctttctatgtattgtttctcagtttccataggtagtacctacttctctaatgctgaaatgcctcagtgctcagtccttgggcacttgccatttttatttattctatatatgtcttgctgttttcatccagcctcgtgacttgattaaaacaaaattattcttttcccctcaaatgcagtggaagcaccgttctttcaaattttcagagaaaaaaaaaaatctacgcatgctttctttagcctatctctacacaatacacagggacaacatttgaaaaatataaaccatatttaaatctgatcataatccttcaatgaattcccatctatttttaagtgaaatccaaaactcttcatgaatttcaagggatatctgacctggctggcccacttcttaactcaggccttatctcttaatactttcctctgctccacctatgttgacccctttgctgctgctttcacagatctgacatgcacccattgcattgtgtgctacctctgcctaaaataatcctcccccgtttctccatgtggctcttttcgtttctgccttaacttctttactcaaaagtgtttttttcaatgaatctttctcatgtgtgcacatacaccacacacacacacacacacacacacacacactttttatccatgctttcctcatttatttttctcaataaagtgcatgaccaggaaagttctcaatattttccttctttatcttcttgagtatttatttccctacctagaagtagagctccaacccaacaatgcaaaaaaaaattgtctttttttcccactgctgtgtcctcaacacccaaaacagtgactaggtacacagtatatatttgtttaattcataaaataagtaattaatcaataatgaataaagcaattttaagattctcttagtgcttagaatgaaaacttgcaaaatttcttgtgcgtgttaagaattttatactaatcattaaatcgatagaagtatacaatttttgaatagtagagggaaaaataaagacaagctattaagttaaagcaaataatccaaatagaaaactgaggtttaagaacattaattgaattcatcaagggtagtaagaaactatatgaacataggattttgtgttttccgaatatctctagtccaaagccatcactatgtataaaataagatgttaattacagtttaatattcttgtaagtttaagcaaatttaccatttatacgtgatttatacaacatattacctcttgaatattgtctcaaatgactggcttcaagtagcacgttaaataaaaatagtagaataaatgtgtcaagctacacttactattcacaattattttatagttagattatggctctgttagatatacaattttatatttgcttatcttctgaattaatgttacagtaatagactacagtcatcatgcaatgtgttgtcaaatatattaataaacataagaaaaaacatagtaatatactgtgtcaaatttttctatcaagtggaaatttagcacattcttcaggaaatattgactgcaaaatctatgattaatatatttttcagaaatattggatataaatacaaaatgaagtgatgaattattgatatgtgcagttttactatcatataatgttactgataaaattaaaaaaatataactcatttttagcatcagatgaggaaacttggttcactaaagttagtattatctttatttgaatgctacaaccttgaaaaattattacatttgatagaactatttgggaacagtttgttacttctcattgtgactatggacattaatgggatgcccatattccttccattcccttttcttagcatagtggaaatgattacagatatcagttatgtttcttgactgatgttacagtcattccgcattatgaagtatgcaagactaaatttttacaaagggtatctcttatccttatgatagcctaaaaaggtgaaaatttgtcaagcaggtttcctaagatcctataaaattaggggacagggttccagcatcaagatgtagttttacttattgaattaacacagagttttgttgatgattttctttgatgatgggggtagtgatcgtggtattgttttattacattggtttcttcctttttttgttcatttttaatgggaacctcccaataatggtgaggatgcagttaaatggtaactccatacacttagtgtgagtctagaaataaattcaagttttattttgaatacactgaattggtatttctttcattgaataaacatttatctagtgcctcctaagtgccagacaacacaaaacgtaaaataccattggcaaatccatagcaatcatacaaaagacgtgatatttgataaatataactcatacaatgaagaaaaaaaagaacaagaatttatacacagcaatttgacctccgtttgcaacacaacaatataaagtgtaattttctccaatctaaatttgctttgaaaatatggaacaccagctggaagggagctcagatggcttctgcagtggggttggaaatatccttctgagcatgtccagaacaactggttaaaaataattaaatcacttgcaccatctgtgaatcattctgattcttcaatgattacttaagactctcattgtatggaacatattctgagaacagatgaataaaatctattcaagtgtatattgttttccactttgattttcacaaaataaaaggattataatattttcaagttggtaagttatctgataattctcctgccctcctttatgatccagttgcttttgaaataattaaggtttgtttaaaatttagttttatgaataatacaaattcacatagccttgatgttataacataattttgcttaaaaacattctatcatttttaccctttatttaatcttttgagtatagtttagcacccatttagtaacagccaagagaactaaatggaagtccgaattgattgcattctcaaatttagcaccatatgctataatcatgagcagtttttaaaattcctaaatagctattttaacgcatgtaaaacagaggaaagctatatttagtggtgactaatccatggatgaaagatgcatggattaaatataatccaagtgcccatatctgtacaaacttaagatgttcagataatttggaggcattgttaactgtttttctggatatcagtgcatgggcacttctcgccagaataaattaactggggaaagttccagaaggtccataattttccataataattagtgctttcttagttaatagactatctgggtgatgaaaaataaatgaattacctaacaaatacagttatctataacatataactccatctgtgacccgtataaagctcaaaatgtgttaactggttagtatctagacaatcataaacacacatgaaacatgaataatatcggtcactatattttcatttcttgcttcgtagatacactcgagtatttcatatgtggaaaattaagagatctagtcctcttcatatattggcctccctaatgggaaagggtctctttaatctgctacaaagccctcctcttctttaaacttgccaagatgtcttctacctcaggtcattgcaattatgtttcctttgacttgggcctctatttctggatatttccttgctggtctcccgtcacattgcaggatgcagagtgaacattatctccacaggtggcctgccttcgacaacctattttatgtcgttcgccacatccattctatccttaccatcatgctctagaacatcagctagacgtttcccttctaatatttactgcaatctgcaaatgttacctttgcatgtttacttgtttataatttgtctgctatcattagaatgtaggcttgatgaagtcaggagcctattctatcttgttagtcactgtttccccaagacatagagtctatcacagagcaggtatttaatgaaagtatgtggaatgaatgattgaatgaatgaatgtataacatcttcctgtggaaatccctgcagtttcagagttggttgttctgtatttttatgtcagtggtatcctaatgccagtctgccatggtccagaagttttcaatggtccataaggaaaagaaaaaaaagagcaattttttatttagcttttcataaagcaaagttttttaatgcaagaattgtcctttctttcaaaattatgggtttcaacagttttggaggtattaaaatggcctttctttttctttcttctcattttgttacaatgtcctttactagaaaaagtaaagggcagaacttttgtgatgttccctaatagttttttttttttgtaatgttgttattgacctatgaaatacaatgtccgtaaaccaccaacttagataaatttatttacatgaaggaataccattcctgctaagtttctatattggttgcttgaagtttcagaatgaggaagagaaagcatgaaaaccatcacctcctatatgtatggcctgttcggcaagcagtactggccccataacagttatccactggaataacattcttgaatttattttgtcacatgtgaggagcaaaaacaagacaaaatacacaaaaaagagtagaattagggtatcacgacatttgtctaacattgttcaacgttaacacttacaaataataaaggtaccaaaatggtattttcttgtgtataaatattttcatcctctggatttgaatctgtttttgtttgttttggtgatataaagaactcataatagtatcatttcctgatgatatttggaatccaaaaattaattcaaaacagaagtattacattttctgtccttttcataattgtaaacaatgcatcaagatcaaaaacttaacaaaatgcgttaatgttattatgcatgcttttttcacattctttatttcccagtgatcataatgactaataattaacataattatttgtgattgacaaaagactctaacgttcatcattttagttaattattatttaagaaataattggtctggatataatataagccaattaaatttgtattctgaaaagttttgagaagtgaaaaaaaatttattttttatttggtaaaatactttatttctgttgtagctgcttttacaaggagattgtggggaggaacagtcatatccaagttctcagttaattaccttttcaaaatatatgatctaaaatggagtgaaaattgattgtgtcaatatgagtttttagagttaaaacttgtaaattttctggacagaatagaacaattttatattggaatccttgccataggataatacaatgactattatttcctggaacattgacagagaacaagctattttaggagaaactatctggattgtaaagtagagcacattaagcctaaggtgtcattaaattcacaaaacttttaaaaaagaattgagcgtaatctttggtaagagaaaaatggttttcttcagtgactattaccatattttgcaaagttataacctggcaaaatatattattttgggaaaataatattaaatataaccatttctatacacacagtggcactttatttattcagaggtcagatggatatcattttaatttacctgcaacacagccaagagtcaggaatggagtagaacaaaaggcctctcgattcccaaaattgattttttaaggttcatgaaatccaaagcttacttatatttcattatgaaatgaatttccaaatccttttttggagattttttaaaaattttgctttgattaaagaggtaattctaataaacttaattatctctttttttttttgtgcccctagtagctttgaagtcaaaatgggacagaaggaataaatgactgaaacaggagataatagctgcagcctcgagtaaggtgaaaaagaacctatatatatggactcatagtttggggaaataatttagcacagggcaacacagatgagagagggagggatggaggaagggagacagagagagagaacagataattagtgtttatttcattttatacttatggataatttaattatttcaatagtttattcatatagttaggtaaatactttttttttttttttgagacagattctcaccctgtcacccaggctggagtgcagtggcatgatctcggctcactgcaccctctgtctcccaggttcaagtgattctcctgcctcaacctccagagttgctgggattacaggcaaccgccatcacgcctggctaatttttttatttttttagtacagacagggtttcaccatgttgtccaggcttgtcttgaactcctgacctcaaatgatctgcctgcctcggcctcccaaagtgctgggattactggtgtgagccatggcgcccagcccaaggatctttaatatcttacctatgtgcaaaagtgtttaatacataatgccatatggcatattagcttcctaaatcacataccactgccaccagctaacttatatctctatatttacatctgaggctgcataggcacacataaatgtattcatatatgttacacatatgcttatttatgtagctatgctatatgttatttgctatttacatctattaagttacttagcaaaatatgtcctttggctttgaaaaaaatgcctgctgaactcatcaagattatgatttttgtaggttattctccatcttttagtcgagttcctaaagttgtgtttttttaactgcctgctttttattgcaggtatatgaaattgttgtgcatatttcaaagaagaatagaatgcagggtaactctcaaacttgttatttggaattaggtcagataattttgtaaatactgttatcagtatatcacaatgtcattagtgtcccttcaagttaagggcatggaaataaagatggtctaatgtgccaggccaaagaggaaaacttttcagcttagcaaagtgacttcaaatacatggggagaattgaagcagtcatttcaaatgcaaacaaaaagttgtatttttatggattacaatatccttagctaaatgtttactttggcttgggtatttttctcattagtgatacttatttaattagttgcttataaattgaacctgggaagtgtagtttgcagtgagccgagatcaagccactgcactccagcctgggcaacagagcgagactccgtctcaaaaaaaaaaaaaaaaaaaattgagtacttaagatcaattaaaatatatcgagtattggatgctgtcacataagagtgctattagccattggctgttaaatttcctcatctccaggaatctcaggcacctaaaaataattctctttacttcatgggcaacagcagccactagtctttgccacgactcttctgtcaattgggtatgcagtgaggggcaccaatatggttttaggtgatgatgtgaaattgtttcaaaatgctttcattctcccttctgaattttgtcttagtctatgcttccataatattgggagccaattagtagtacatgccttcctgcagcttgaatagaagtgaagtctattatgaacaataaagtcaattagagggggccatgcctactgataaatatgttatgtaaagactcaatttaccttgaaatctgtatctatttgcatctactctttagtgctagttcagagctctgtgcgattattttaaatgtattgcagtattactttaatcaattaatacaaaggtagattaaggaaactttactactcttcatttcttcattctgctgattcctccctcactgaagcaaaaaaaaagtctacaatttagtctttaaaaagtctatagtttagtcttagatatctctttgtactatattccatatactgttcattcttaccaatgaatagtatatatagatatattttacttttttaaaaaatactgctttattctgtgtattattttaaatataacagtcaattagaaacatgttcccaggtaatgtatatagatcttatacattctttgtgaaagtcttagatgatgaatcaaaatgtattctattattcttctacatttctggattattatattttgattagaaaaggtggcctatcaaatctttctttttgatgcttttaaaagtttcctctctatgtaatttttgatgtcccaagtaaataggagaatatgctttttccagtgtgcacaaaatacggattaaatttagcttgtcggttttaaaccacctctattcttgttttttatttgtattttttgtctattttaatctaacaaattacagaagagttgtatgtaaggtaccaactacagctatgattttatcatgttctccttttatttctagtaatttttaccttatgtagaatgcacccaattgtttggggcatagcaattaatgactactgtgctttgggaagaagtgtgatttttgtcattacaatggttctctgagacccatttagtgcttttcggtcttgaactatacttcatttgatgctattattttgactttcactttttaaaaaatggttttctaaatcaccattaacgcagcattgtgaccttgtatttttatgtttcttgtgactttcactttttaaaaaatggttttctaaatcaccattaacgcagcattgtgaccttgtatttttatgtttcttgtaaacagcctatagatggagtgtgcattttaaactagataattttgtctttttaacttatgcaaatatttttacatctttatagggtacatgtaatattttgctacatgcatagaatgtataatgattaagtcaggatagttagggtatccatcatctcaagtatttatcatttatatgtgttggaaatagttcaactcctctcttctaggtattttgagagatacaatatattgttgattatagtcaccctactcttctttcaaacattagcacttactctttctatgcaactgtatgtccgtacccagtaaccaatctctcttcacccattccgcccacctacactcttcccagcctctggtatctataaaaaaaaatcacatattcttaccaatacgtgcttgatcttatgaagatataaaaatgatagatagttcatctttagatgagacattttaaccaacttcatttttacaataactcttataactgtgtctgttttaattccttgtcatattgatggtcattattttatcattttatttactcttatcccttgtctataattttataattcatcatcttcttcactgcactctactgcatctcttcccgcacttataggttatttataagttatactttgtactatcattttactagtgctgtttcccattttaaacaacaattttatgcctatatttctgtagtgttgcgccaaaattaaataagaacaatgccctcatcaccaagatgatttacttagtcaactcctcattattttcaatcaaaggcaaaatcctttaaaaagaaataatttataattttatttcctggctactattgttttcacttgtagtatcacatactagttcaagatgtcatgttattacttaaattacactatcacttcataaaatttgaccacaaacgacacaaggtgtatttcctgtcactgtttttttgtaccgtttatttctcattgttttgaaatctttattacacagtcatccttcagtgtctgtggggcactggtttcagcattttgatatcaaaattcaagaatactcaaattatttatataaaatggcatagtgtttgcatgtaactatggacaccctcctgaacacttcatatcatctctagattatttatagtacccaatacaatgtaaatgctatgtaaatagttgttatgcagtattgtttagggaataatggcaataaaaatgtctgtacatgttcagtgcagacacagccatccatgtatttttgcaaatgtgttcgatcgatgactggttaaatccacaaatgtggaacccatggatacagagggccaactgtacttcagttttaatttggttggaacacatgagaaatgtcctcgtaaaaacataaaggatgtaaactttgtaaaccttgcattttcgaaatgatctttgctttgcagtcatcatgatggatttattggatagtaacattctttaatatctctcctctttttttagtagtctctgtaggttatgaacaattgtcttccagtttccattgttttcttgtttcaactatcttcaagctactattgtttccagtgtaaagtctgattctagtccaagtatcatttatttgtatttaaccttttttctttctctcaaactctaaagttgctgtctgtcccatctattgaagtacagaaatttcattaagatataattttaaatgtttctaaatgtgtccctgtttattattttattttattttattttgtttttatttttgagacagggtcttgctattgcccaagctggagtgccgcgatgcaatcatagctcactgcagccaccaactcctaggctcaggagatcctattgcctcagcctctttagtggctgggactacaggccatcagtaccatgactggctaatttttaaaacatttgtttgtagagatgatgtgtcattatgttgcccaggctggtcttgaactcctggaatcaagtaatcttctcacctcagcctcctaaagtgctgggatttcagttgtgacccaccacttatttaattcttttttgcacttgggtaacgttttaaataaccaattaatattaataacttctttagctctggaaaattttctattatgattgttttaattattacaaatcttccatctcttcttttttctcattctggtacttatcattgcttaataggtatcttagatctgttctctaagtctcttattttttcactattaatgtcagtttatttctatttgtctttaaattgtgatatacttcttctggttgactgtaaagaacccatattttatttttagccatgatcattctcttttctaagttgtctattgttatttaaaaactaggtaacaggctttctgtgctctaatgttaaccttttaatgtttctaattttatttttattaaatgtaccttccgtatcttctagtatactacttgtatggactctcagctttgtctttctctccagccccttgtgtcttctgaaaaagcctttgctttattttctctcatgcctaagtcaaagaatgtaaaatgtcttggcgcaaatgcagttaaggttttgatattttgatgcatagtgattgattgagaagcaacatggatactggaagttttgttgttgttgttgttgttttgatctgatgaataattatttaacaagctgaaacctattcacaaaatttacatatgggaaaacatctctgatctcatggacaaggggtggaagtaaggctgtcctcaaccatgtagtacagccactctccagtaatgcctgcatgaaacaaactagcaggtactgacccccttcttaagtcaaacagatctccttaaatcaatggtctccaacagatcattccacatatatacttgaaaaccatcagatccatcatttctgtctcagatcgtgccaagatacacataactttgaaatatcaccagttcatcatcattctctcttcacctgcaatttttttttccataatttgaggtcctgatacatatattcttctaaattgtagcagttagttgtgattatcttgacgttgcatggactcagttcaaagtgaaacagaaaacatatctacgatgtgatttacccattctcaacatttctattttgtgtgtctgtatttgcacagacacgtacatacatacatgtgcatatatataattaataagctttgaccatataaataatgcaaattatgtataattcacaataataggtttttaaattaattatcttcagagttgagtgagattacttacagatttaggctgtgtctacctgaaaacaaaatacagtgtattagcaattcagtaaaatcaattggatatagaataataacaaattagttgagttttcaccttgtgacattttagtttggatttagtagcctgtctaaattacctttgtgaaaaaactaggctacaagtattttctgatagatataataccagcattagaattattcatataatcttagttttcacattatttaaaatagaacacattgttatattttaataagcaatttgaaaaagaaacaaatctttctttcttgtatgattgccattataaaagaatattaattgagtgctcattaggtaactttaaccacattaagtactagacagccctttggacagagactgagtagaataaaaaacgattacagaacatactttggtattaaccttttctataaataaaatgtattgtcattctctagattagcactgtcctatagaactttctgagatgatggcaatgttctatatctacactgtccaataaagtagctattgaggctactgagaacttaaaacatggctagtaaaaacagatgtactaagtttttaattgtatttgcttttaaataatttagatttacatttctttcgtcaagtgtagctaatgactaccatacgggatagtgtaattatatgcatctttactatcactcgcatttctaatgaagagaatacttccttgaaaaacataattatgacacatgcatatttagacatagatactgagttgccgcattaatctagagatagtgtccacattttctgaggggtgtgacaaatgtaatatagaaataaaagtgtgagtttattctgaaaaatctactcaagttgacagatccacaaggcaacagaagttaaaagcgatataggagggtgaaatataactgcagtatttaaggtctttccatacttattttttcttgtgttacttttattttcacactgaattaagtataagtatgtgtgtgaggtggagggagggttcgatttgcttgtcaacatacaaaaagattgctatagcaagtattcccaagctgaaattttggaatagcttaaaataaaaaatatatactagatatgtaaacgaaaacttttatgagaagagtttgggaagagttatcaaaggttaaaatgattttttgaatacaagtcttctcatacccttcaatttgctaatagacattatgatacccatgaagaagctaaaatcagtatatcttaatatcgtctatatgtcattacctcaaataattgcttatgtttgtattcaagtataatgagtcagattagtaactaaaagacaatttaaggacctaagcacgcatgtacaatagcatgtagctaatgtgctatgaattgaagaaatgcgacatagtgaaatcagatataccttttaaatctatgacaataaagattgcattataaaatgaagaaaatattcctgtttgaattctgaatattcctaaatataaattataaatgtaaatcccagcaattgtaaccacatatctatcttataattatcctgttaagttgatacttgttttttcattaatttatccaacaaatatttttgataacatactgtatgctaggtactaggcatgagtctttgctgcatttattttttgctgccttataagttggctagggtgtataaccttatctattaatttataggttattttttggagatggttttacaaagcaggccatgattgttggtgcttatatattgctgcttatgtgttgatacttatcttggtggcaaccaaagcccttttctttctcttctctcacaggccatacttagtgactaaaattttatcaagttactaatttatgttaattctttgaaaatctgtataaaaatgcaaatgttgtcctttgaaacgaaagactttaaaccactataagccattaacacattttccagattcagtttatcagcttaatttgatagtaattgagcttggccctgaggaattaggtaaatttcatggtgtagaaagtcagaatccacatgaggcaggtcaatgagcaggtctgtccagaccttttacataggacactatttatacctggccttctagaagcagggtgtatttaaagactggcaaatccagcatcatctgcatatctttttcgctgacagcctgccctgctttaaaaattaattctaactttagaaaataaataatatgggcataaaggatgattttctttcatattttaccttgactattttgtgtatgttagtgagttttattctttttaaacaaagggggtaaattgttcattgattctgaataattattctgagatggacaggccctttttttggttacatagcttcacataagcaattttttagatgatgcaataggaagggggaaatcacataagagcaaacactctctcattgctattttttctatgcacggtcataaccaatatgcttagactcattagattgattattcaacatctttctacccagtgacttgactaaaacagacaaaacgaagtactgtcagaatgctgttattgtcatgccattatatgtatccaaaacagtgacaacgcagattaaaaccatacccgtctcacctgcatcatgttgttttgtttttatgctttattgtttggggttttttaatcaccctggaccaatacaatatttttgcctaatttgtttgtgatttgcatttttatgcttacaatgcctattataattgtccaggagaaataaataaaaaatctctcaactttgtttattactgtaatgattcctagaaggaaacttgtctttctctgaagacttgtggggctaagagacagagctacttgtctaagacttaagtctttcccattgccttttcatttatgacccatcagaacctacttaaagcctgcagtcctattttggatttacatatcattgtgttattacttttaaataatccataatatttaagaatgtccctttgaggaaagataatcagatacaaactgacatactttcatattatggctcatagattttcatattatagctcacactaaatcattaataaatcttactttgaggatttgcttattttcatcttcattaacaccaacgcagttaaaaaaaaaaaggctccatcactattttactgtttttggtcaagataatagtctatttttgttacacttttgatgcattgatatatttttcatgtgccatatttatatgagatatatagttattttgtggcatatgtcataatcatatgtcatatagcacatttttcttcttgagtttctttgacctcataactcataaatgggccagtaacctcaatgcatttaaaggagaaagaagtcttttaaatcatggaggaaaacattttgtttaaaaacctagacataatgcaccatttgtttcaaaacaggattgcttttatcctttgcagttatggcccttcaagaaacaaattttatgtaatgaaaagaatgtgataacttaagtttcagatgaatgaaaatgtattcaaaactttgtgagtgatacctgtgcctatttacacagctcagaatcttaaaactgttttgactttaagtttagatcatacaaatcataattgtgttctataatagtcattaagcattgatcgaacttttcatttttaaataaaaataggcattttatggtttctttcacatatctttttgtttctagaaaatgaggctagtatattctttggggtatatatggttaaaaatgaaaataaacacaaagaaataaaatgaattaatcagattatagcatttccttgctaatgatgcatgagtatctataatgatataaggtggtaaagaacattaacaaaagcaagttgattttcaaaaggttagacgggatttgtacacatcagaactcagaaggataaaattattcaaggcagagttaatgaaattcaaatgaaaaggattaatctgaatgagtacctggattttgcataaagaagagaaaatgaacatgatatttctaattacactgatttttaaataactgtctgaaatttttattaaaccaaactgaaagtcattcaatggatgtagttttctcattatagattcgcatgactgtgtcaataggaatgctatacttttaaggaatagatagcaaactagatctccaaatgtctggttctcttttgattcaatttctggtagtttcttgtatatgaaaattacaaaaaagtctatatattaaacattattgtatatatcagattgctataataaatgagaatattcaaacttaataacacggaattttctagaaaatgagttcacagtttcccagtggtgtcaaaaagttattttggaatatttctatttctcaagaaagttcacaggatcaacccttagttttctctagtcagctgatctgtaccacttagtgtctgttatctgtgatgactggacactacgtatcaagatagtaaatctttcaatagatccgtcttcattaaatatatttaaagtataacattaaccttttagactttataacgtatagctgaactgttgcccataggtaattgtaatgagaagcatcttagaaattacaggtattctaatttatctttataatggaaagaaaaatttttgaaagattacttaattatcagtagttgaggatagaaatgatttttctcattcagatttttctaaagtaataaactatacctttttattgattatgttcaaccataagaattttaatatttctaagtgttctagaaaatgtgttcatgccatggctgagcatgtagggattatttccatgtattgacactggttgctctatggcttatttgtgacaatcttgaaaataatcacaatatgcatattattagagcattctcaacctgcagttcaatggctaatatttcttttaagagtatttcgatcaggttaataagagcttcttcattatttaaaagtttgtaaaaaatgatttctagaaccagatacagaattacaattatttgtcacttaggtatctaaaattttcttaaaaattgaactcttgtacagagagtaaaaggatgattaccagaaaaattggcaatttaaatagatgccacataacactcttctaaaagagattttctttgaaagataggtgaaaatggtttttagtttaatgttctgaagaatatttgttaaatcggtatataataatctatggtagacacatggggtcaggtggagagaagcttaacagatgagaagccagggtatggtgtgctgcctacattctttaagccctggtttaggactatgattaacactggatcttatttgctgagacacagaattctggtctgagagcacgaattattattttctaagtgaatctaatttttattttatccagtgtcactgaatgattttttctttttttttttaattatacttaagttctgggatacatgtacagaacgtgcaggtttgttgcataggtatacatgttccgtggtggtttgctgcacccatcaacctgtcatctacattaggtatttctcctaatgctatccctccccttgccccccacccgccaacaggcccctgcggccatatgttttcattgttcaactcccattatcagtgagaacatgcagtgtttggttttctgttcctgtgttagtttgctgagaatgacggtttctagtttcatccatgttcctgcaaaggacacgaactcattcttttttatggctgcatagtgtcccatggtgtatatgtgtcaattttctttatccagtctatcactggtgggcatttgggttggttgcaattctttgctattgtgaacagtgctgcaataaacatacgtgtgcatgtgtctttatagtaggatgatttataatcctttgggtatatatccagtaatgggattgctgggtcaaatggtatttctggttctagatccttgaggaatctgcacactgtcttccacaatggtggaactaatttacactcccaccaacagtgtaaaagagttcctatttctccacatcttctccagcatcagttgtttcctgactttttaatgatcgccattctaactggtgtgagatgctatctcgttgtggttttgacttgcatttctctaatgaccagtgatgatgaggtttttttcttatgtttgttggccgcgtaaatgtcttcttttgcgaagtgtctgttcatatcctttgcccactttctgatggggtcttttttttcttgtaaatttgtttaagttccttatagattctggataatagccctttgtcagatggatagattgcaaaagttttctctcattctgtaggttgcctgttgactctcatgatagggtcttttgctgtgctcttcagtttaattagatcccatttgtcaattttggcttttgttgctgttgcttttggtgttttagtcatgaagtctttgcccatgcctgtatcctgaatggtattgcctaggttttcttctagagtttttatggtttcaggtcttaggtttaagtctttaatccatcatgagttaatttttgtataaggtgtaagaaaggggtctagtttccgttttctgcatatggccagccagttttcccgacaccatttattaaatagggaatcttttccacattgcttgtttttgtcaggtttgtcaaagatcagatggttgtagatgtgtggtgatatttctgaggcctctgttctgttccgttggtctatatatctgttttgctatcagtataatctgttttggttactgtagcattatagtatagtttgaagtcaggtagcgtgatgcctccagctttgttattcttgcttaggattttcttggctatatgggcccttttttggttccatatgaaatgtaaagtagtttgttctaattctgtgaagaaagtcaatggtagcttgatgggagtagcattgaatctataaattactttgggcgctatggccattttcatgttattgattcttcctttccataagcatggaatgtttttccatttgtttgggtcctctcttatttccttgagcagtggtttgtagttctccttgaagaggcccttcacatcccttgcaagttgtattcctaggtattttattctctttgtagcaatttttaatgggagttctctcattatttggctctctgtctgttattggtttataggaatgcttgtgatttttgcacgttgattttgtatcctgagactttgctgaagttgcttatcagcttaaagagtttttgggctgagacgatggggttttctaaatatacaatcatgtcatctgcaaacagagataatttgacttcctctcttcctatttgaatatctttctttctttctcttgcctgattgccctggccaggacttccaatactatgttgaataggagtggtgagagagggcatccttgtcttgtgccagttttcaaagggaatgcttctagcttttgcccattcagtatgatactggctgtgggtttgtcataaatagctcttaatattttgagatttgtcccatcaataactagtttattgagtgtttttaacatgaaagggtgttgaatttatccaagaccttttctgcatctattgagataatcatgtggtttttttggtcattggttctgtttatgtgatgggttacatttattgatttgcgtatgttgaaccagctttgcatcccagggatgaagcctacttgattgtgatggatatgctttttaatgtgctactggatttggtttgccagtattttattgaggattttcttttttgttgtgtctttgccaggttttggtatcaggatgctgctggcctcataaaaagagttagggaagaatttattttcttttgtattgcttggaatagttttagagggaatggtaccagctcctctttgtatctctggtagaattcagctgtgaatccgtctggtcctgggcttttttttttttttttttttttggttcgtaggctattactgcctcaatttcagaacttgttattggtctattcagggattcaacttcttcctggtttagtcttgggagggtgtatgtgtccaggaatttatccattttttctagattttctagtttatttgcgtagaggtgttgatagtattctctgatggtagtttgtatttctgtgggatcggtggtgatatcccctttatcattttttattgtgcctctttgattcttttctcttttcttctttattagtctggctagtggtctatctattttgttaatcttttcaaaagaccagctcctggattcattggcaaatctcatttttatttaacgttcctttctgcaaataccaaaatagtcaaaatttgggtttgaaatttcatttaaggaagttaaatacaagttagcagacaaaagtgagtatattttgagtgtctttttcttcattatatttgaccatacagctaagtttcttgctggctataatccacaattactatatttattaagcaccaatatgaatttaagatagctgagagcatctcaaatgaaagtaatgaagactgagaaaactacatatcaaagaagaatcagaaaatagataaaaacatcttagaattatttttcttttaagaaaaagtgatgaggacatgcatcaaaacttttctgaattcccactgcttttgttaaggccacccagatttttttctaaatattttcaagatatgtccaattctgaaacaactcccttgattaaacaacaaaacaaattaataaataaatgaaaaactacaacttgtcttctacttactctgttcctgataacaaaaacctttgttttccaaaaacttacaggtgtaaaatgtatcattaaaggcagatttaattgcaccattaaataagtattataagaaatacgcttgctttagatgatgtgaagctatctttactgcaggggttatagcaactaacgtgaataagaaagacgagcttattaacttgtaaattttattaagaacaacataatggtcaccaaccaatgtaatgcgtgcaaaacacaagcttgtgttacttgtgctattgattctactgtttaatgtgtcagtgaaaatttcacattcaaatagcctgctgagttatttttcttttaaatgtgtaaaatgcttatgatgaaatagtgaaattaagaatttcttaagaaatctgttaaattctgaattttatttatcaaactctggctcaagtttctaatatccttttaaatgtaaatgagaaatatatatacattattccattgaacatgaaggaatgtgtgccatggatttggcccagatatacacaataaaacaaatgttgtaaaaggtataattatttaatagctaatttgtgcaattctgtgaatttgctatatcacaagtagatgagatatctaaattagaattacttcattttttatatcatgtaagaattgagtatgaaaatcctaggtcagagaaattaaaaacaaaacataaagtgaccagcttgtaaattttactcctctttgtgtggggttcagtctagtatccccaaagtccaatgtattacattactgcaaaaataagtatggtgttgtcataaaaggctgtgcagtaataaatggctacgttagcatgcttatcgtttgtacttccccagagaccctaccactgaaaccctcaggtgacctcatcaacaggcaggtggcagttgatcaattctagacaaagttattgggagaataatttcaattacaagaattttgctgcctatagtgtagacagaagagagcacaggtcatccatctttctgaatttgcctgccaagtagtatttattttttgctcttataaagaatagggaaagatgtattactgggaaactccaaaaggactctggagctggaaattctcatcatgtctagcacttggatcccagtcagaaaagtgtaggtgcaagagaagaggctagtgctcccttatatatcaggacattctggagttctttttaaaatataaattccgcagtcagttctgctcatatagcagcttcattagcagcttaacttagcaagagactagcaacaaaaacaggagctaatgtctagaatttggaggagaagagggcttaatacaaagttacataccagcctaactacttcgtatctgttgtatctcagtgaactttcctatagatacaggaaagttgcctgtgttaggaataaaacagatatgagtccccctcacccaatcccatatctagatttccaggaaaattagaattttaaatgccagttgcaaattagaattagaaatttaaatgccggttgcaaaaatcgtctttttcttaggataaaactactctccttatgacctcatggtctttcgtcttatatttatggtgctaatatgtgtgtgtcacttattatgaaatgcttttaacactttctggaaaaagtaggtatataattaataaatcaccgttttactagacttaccatcgtgaggttttgaatccattttcagcccagtttgtagattcaattgtcagctgtagaatgagacctatataaacttaatggaggaggtttcactgttaggaagctaaaaaaaattgttcttttgtatatctataccagcacactgtccgtgaagaaacgatgatggtgatgactgaagacatgcctttggaaatttcttatgtgccttctacttatttgactgaaatcactcatgtctcacaagccctattagaagtggaacaacttctcaatgctcctgacctctgtgctaaggactttgaagatctctttaagcaagaggagtctctgaaggtaaaaccaaagcactttcattcgtattttacaaggtgatcatactgatcattcatagtgccagaacaattgacttaaattgtatgcatcatgatggcattttgactttcacatggaattcttaaaaatacttgatagtgtggttggcttcagaaatctagggtagaaagacataagttagaaaatgtattttacaatatttagctttgagagacatcctaaaatgaagaaatgcacaaaaatgatcatttttacatgcagtagggacagaaaggaaccaccagtaaataaactttgatggaagaacagtttattcctagttaatggatgacttctgtttcattttccaaaaagggaaattagatttttcatttatatgtaatgtatattgtttttgttttatattttttatgtatacatattcaatttcaaattaatgtcaatacctgtgctataacatatggaataaaattgaatagaaatcaataaaatattttctttataactgccagttaaaggctaccaacaaaatccagctgttttcaaaccaccaacagcaagttactaaattctcaagtaaggcaaataatgatgatgaaataggctatgaatttcagaaggcagtgtctgaagataaatgaatgtaggatcaagaaaatgcacataataatgtgtctccagataattttcatgatcgtacattttacactcaaaatgaaatattatagtatacccagagcttggtattttcaaatgcaaacagtatgtgattataggcaaaagatgggtttgctatcagcagcacatattagctaaagtattttatactcaaatggtttcctggaagctcattctatatcacacatttgcctgtatgaatatacaaatggataaagctatttgtttgttttggaaatcggtgttgcagtatcttcagtgacttgactttaatatcttaacattatatcaaataagctataaaattacacagtaaaataagagcttcacagatctctggaactattccatccatgtcagtgtggcactgtttcttattctgtttgaagtaaaagtcaaatcacttattggtacaatgaagaaaagaaacctaatcagttaataaaataaagctgacatgccagaattcctgtcattatttctattaactaagttctcatggcagcatagtttgtaagtgcatcattgtcattcaataagtaaattattgccaatgagctaatatccattccttcccaggttcatggacatttggttcaggagagtagtgaccctgatcttattaagttgcccattgaataactctgtctccatacctcttagcctggcatactcagaatgttagacccttggctacactcacagtgaatcatttgttcatcctgatctatttaatattattatagctgatgtcaatcgtaatagtattgattactgcggtttataatatggtattattgtagatttaatttagctaaatggttgaatccccataagatacagttgtgggcatgattccttctgtctcccaacaaatctccagcaggtgaatgggcttcctaccttcattgacttttttgaagggggatagttttgagctcagtcttttcagtgaatatgtatttcctgttaaaggcattcatcattgtcattatccagtagtaaaaatggaaaagcagtgcataaattgtacagctgctggttgggaaggtttgaaattgtggttgattttattcctgacagatatgcatgaatcaaattacagaactatagtaagtattgctgtgctttaacatacatcttttttgaaagtgcagtacaacacaaataatatgtaatatgttaaaagaattactttctaaacaaaatacaactaaaatagcacgtatggtttcaatagatgtattgaattggaaagctacctaatcatgttgacagagactatgcagataaacacaaacatatatatatacgtatatatatatacatatgtggaaatctgcatttaatagcaaaaacactagctaaggcagagctagagaagaatgagaaacatacacataagtaatattttctttcttacttcagagccaatattaacagttaattgattgtgattgcttatatgtacaaagttaataatactcataacagacaagagtacataattttagaagaattgcaattttttggaagtttagagcaatattaacttgcatttcatttttaagaaaaaatcattttcatgataaaattttccaaaatataattactgtgttaaaccgtcaaatcctgccttaaagtatctcatatgaaagcatgaacacagaatttcttagcatcgtaagttttaaattaccaaaaggttttctctggagagagttaaatatttgaaagcttatcctaaaagcagaaatgatccacttaaaagacttaactgaaaggatttatcatcatgtgtccatatgcctaattttactgaaagcatcagttttattggaggatgaaacactcttgggatgtcacccatatcatttcctgactcagcatgccttgtactctgactggtagctgccagatccaagtgtctctgactgtttgccttagggctctctctagtaatcaaagctcatgagtgtcaggtagttaaagttctgcatcccccgtgttccccagcaaacctcaaccaataacaaataacttttggtggataaataccactactcactcattcttcagttagggtaactctgaagcatgatttatgctctgacccaaaattctgttccaggattaagaccccatcgcacacagtaaaaacctgcctcataggatacatttcacttgctccctgtcctaccttacacacactttactagcacctccttggatcattcccaaagacatcccttgtcttcgaatctgcttataggggaactctatctaggacatttttgaaataaataatgacatatttactgtgtagttagcatttacgtagagaaattcttagaaatagttcatgcctttggagtggaattcttcaagtgattctgctgctccctcattcagggaatccttagctgttcaattaggccttggtatcaataaatgtgaatttttaggacaaaaataagaacatagcttataataagaatgacaactatgctttaccttttgcaataatgagaatcaatttacagctaatattattctttatggtagagcagaatgtcttcacctgaagaacatgaacaagacaaggatatctgcccacatcccttcaatattccacattgcactggagtttcaaatcactgaaaggaggaggaaggaagggaggaagtaaggaagaaagagagtgagggaaggagggagggagaattgaagaaaagaaataaaataaggagagaaacaaggaggaaataaatggaaggaaagaaaaaatatcaggcacacatcatttcagttgtctcatcaaaaccaattatagtacagatgccttgtttggaatgaataaaatgtgctatactttgggtaaccaagagggtgatgaaaaacgtggccatatgaagaaagctcacgggtaggagacatggtggtcctaatgtagattttaaataggatcaagaaatagagacaacccttgttcaagttcgagaccacaagggaaagctggtagtgagcttataagccaaagatagtgtgaagccaggtcgttcaagtcctcttgagttcaggttttttgcattgctcttgagaaacaaaaaattgttaggacaagtaaacctaaggaatgtggattcgtatattccaaaaatagttattaagctcttagtatgtaccacacactattctaagtgcttataaaacagtgaaaaagactaacgaatctttgccctcattcagcttttattataacattgggagacagaatagaagcaagcaaacaaagaaaaatgataagtaaatattgcgtattactaggtgatacgtattttgggaaaaaaaaaaaaaccagaatctgttaaggggatataggaccactacaggggtagacgtaggtataattgaaagtggcggaattgccatttcaaatagggtagaaatgacctttgagcaaagattggaagaaggtaagggagtcagccatggagtctgtgtagaggaaatagagtagaggcccaaatgtgggactgagcttatcttaatcaagcaccaacaagaaggccaaagtggctgaagcaaaacaagccagtggaagggtagaaagagatgaggatatgggagttgtgagtgtccagattgtggagggcctttggggccattgtaaagaagattctaaatgagatgagagcaattgtaagtttctgagcagttgagtggcatgatctcaatcatgttttaaaaggatcacactggcttctgggttgagagtagaactgtaggggaccaataatagaatcaacaagagttgaaaaagagatgctggtggcttggacttggtcggtagtgagagaatgtcagattctggaaatattttgaaattagagatagcagatatatttctctggtcatacagaaacttaagcatgtgtctatgaaaacccattctcggccgacttggggctgagttagaactttggtctcgtaaaacctagcagaagatcccttgagagatgtatgatttcttctcatattttagtcttcgattcttcagtcttgccttgaagtagggacaaaagtactggcaacagagatttttaatacactggttaagatctttctcctctggaatctgtttcacagctcttaagcacaaatttaataatcccaattagttaaatgaaggcaaaattatgccatgagcaaagtgactgcttttctattctggtattaggagaattagataatagcaagaggcaccatatgtagaaatccaaacaaaatatctgaaggaaaataaaagaacgattgtttatatgcgtattgtaatacaggggcatattacattgtttatatgcatattgtaatacaggggtatttaataatattggaataagaggacattgcaattactctaaataatcatggatcatataaaatttcaaagcaaaatttgtttgcaaatgctttttgaattcgagttgaattttctaatagtttaatagttctaacagtttaatgcgtggaaaagatgatttttattaatacattgtgactttgtagaaactgatcttttgaactatacataaacatttgcaataatgtgatcagtggtttctcttagaaaaattgagtttttcaacacatttatttggttataaatataatttgtttcttcaacagcttatatgacttgggatttatttgattgatttgctatatataaatgtgtgtattttcaaatattaatcattaactgtagtttaaatcatgcttaaattatttccatagtacattatttttcatttgtattatatgaaaagatttgtactatagagaagagattatagatatttactgcctttcagtcatgcccagctcatatttatatgtgcttcggtacagttttcttttatattttatacaaatctctcttgtaggaaattatccattctttatccccaaccattattttatcaagcctagcagttgtcctaccttgactattatgctgcaatttactcccaactctgctaaaatgtactttaagaacgcactcctactccttccattctcccagcagcactgttttcataatccccatcgtgtaaagtgtagaaagcagaaacttccatattaaaacttacaaatcatgaggctggtagaaattttgaagttgcagttaagttgtggggaggttttccttttattcacaaacggttgaagctgtgcttcgaccagttataatgtcgttttttatgtgtgatatataattactgattcgttatttatgcaaagacaatgcatcatcctatgaagaatattttggtccaaatacgtagctgtgtttagaaagtgttttctcacatggggacaataaaccatgaagaaaaaattaaaaggtcaccttaccatagagccaccaaaaataactttttaactttttttggaagctccgtaaaacctagttaataagtactttaatgccttttgattgaacacagttcccaattcgatatgtcattaatgtagtgcctggtagctggatgggatgtgaagagtgtaagaattagatttatatagggtgttgcctttatctgtcagataaagacaaattccagagagtgaaaatgaactggagtttgagtctttggttctcttatttctctttttccattttaagatagatctactccccaacggccgctgtcacaacagttactaatgggtttttctaatccttttttcttagaaatgaaagttatgtgctcctctgttaaccaagttacaaagtgtctcaaggcatttctgatacctaaaactgcttaaagctattattttcaccttcccaaaatatgacgacaatagtgcctagagttttataagtctataaacactatacatgcatttaagtatatgtataacccatgtaactgcagtgctacatttttcaagaaggtgatacatacacacagccaccaggaagaaaaattagtatcttgtttgttgtttttttcctccaccactgtatctagaactcctagaacagcacctagcacttaaaggtactgaatgtacatctgttgaattagtgagtgatggtctgatacatgtaggtgtggactctgagatagaagaagacagggcagtgttagtaagcgctggtactaaaagagaaaaccaaatttacttctttttatattgtatcctaactcactgagttaaatcatctagacatgtgcattctacaaatctatatgcatataagcatgaagaaattgttctaggtttgtatatactgaatctaaaacaatcatttatgaaaatgtgtgacagggaacccacatataattaaaacattactaacatttttccacatcagtgagctttcattatgtggttatgataagcagtagagtagagagtttagcaaagtactgtattggaacctgaaaagcttagaaagatttaacctgattgttgatagttgtacccttgggcaagtaacataagatatttaggcctgttttttaacgttgaaattaaatcagtgataataactgcccctgcctactcaactgtactcttgtgaagatacagtgaaatcatgtacgactgtgtaggaaaattcctgttaaaatgtataattatataaatttcaagatttgtaaaatgcatattgcttcatcaaacatcccaaattctaagaaagttataaatttccacgtaaagtatcctaaaaacaaattacctttaagaatgtgttaaacattataaaattgcatatttatatcttaaaaaactgtaaataaaatgttaaccacataaaatatacgtaaagttatttccagatgtggcaaatattctaaagctaaaaaaactttaaaataagagaatacatacaagctaagccacgtttgcttttgacaaaatcttccttagaggatcttacaaacttttgatcatattcttctattgtacagaatgttccttgacttgtgatggggttatatccagataaacccattgtaagttgagaattttgtatgcggaaatgcattcaatacacttaacccaccaaatatcatggtttagcctagcttaccttaaacatgctctgaacacctatgttaacctacagttgcgcaaagtcatagaacacaagacctattttatagtaaagtgttgaatatctcattcaatttagtgaatactatactgaagtatggtttcgaatgaatgtatatcactttctcaccaccctaaagttgaaaaatcactaagtagaaacattataagacgggggccatgtgtatttccgaggctagttgttacttattcaggagtaatttttttattcttctatttatttaaggtataaaacaaataactcactttattgtatatttatcttgaggtgcagaaatgcaactctaaattattccaagattctgtgtaccataacttttaccaagaagaggatgctgttttctagcttggttttaattgttgttttattttgggctttagtttctttatgaaatgtgttgatttattttttccatttctagttcagtaacttaaaacccattgttctaattgtgagttcagaaccatgacaaaaattattgaaaaatattgaaactctaagcaaagaatgatttaatcagtagtgtttttttctcttttttgctttggagtcttgaaatttgcttttgttgtttattttttgttgtctttcctttgccatttaaaaaagttagtttgtatttattttctcctggttaaatttgtaaccatgaacatattaaaattataatgctattccattgaaccttatgaattgtcaagtctttcaaaaggtttaaatattggcaatatcttatagtttaatacaatgacttgtacccaagtctgcttatttctgaatattaatatatatcattaaacatcctgatggaaaaaaaacaagaactttctgttgtaaatcacgtatgattaacagacaccaattcccaaatttaatttgccaaaccacaggcaaaaattaaatagtgttatcagtaaggaaatctatggagcttccaaaaaggtaaacattgagtagagtgttagcttcctgctcccatatcatgccttttgtttatttcttttctttcttttttttttttttttagatgtatgcatttgggtacagaacaattgtatgaaagagcgattttgcttttctgtcccctgtgtaaaacaatatgatggaaagcacatttccccaacatcagaagtattagttatatataaaacgggcataatattaccaaatatgttttctgttttaccaaaatagtttactgtcatcaatattaatttttgcaggtttgattatattttatcatgtatggtagctacctatgaagttgcttaatcatttatactaaattttcatttatcaaaataataagatgctcatgattgcatatgtaaatagaattaaaaagtataacatgaattttaaaaaagcatattccattcattggtgatcatcagtttttgaggttttcttggattgttgtattgctttggaatttttcctccataaaacctacctggccctcctctgctgagtcacacaacactaaagcgtatcctgactctaagaaatttgggatcatagaatgccatatattttgaactaagagaaaagtacttacttctataaaaccccctttgccatgcatgtgagtcaatttttctatttggattttctgtaaaatgatttaggcgatgtgtacaacttaacacaaaatgtacgtatcataaaaggactggtaaaattgttttcaatttacttagtgctgatggactagaatcattttatctgagaaacacttggatcagtaaagtgcagggttttttttgttgttctttttgttcttgttgatgctctgtggcatctggagaaatgggcaggtgtaattctgaataaaggacttttttcttagatatctaatgtgctgtgaggaaaccataaggaaactcagccaggaaatgcatgtggacttctattccactgttcaacagctaatgtcttgtaaaagtaaagtagaataaacaaggaattacctgaatagctcacgtctgaccatacctgaatatctatctacaatggttgaacagagtaacaaatcttagaggttcaatgattgaattcaaattggattttcataagcaagttcaactcaactttttacttcaagtcaacagatatttattaatgctacaagtgctatgcttaacattctaaaagataagaaagaaatattaaggaataatccttgtactctggtagttgataacattattgaatatacatattatagttatacaaacaagttagagagtaataaagacattaaggacatcatccaagcaaaaatatataagacatgagtgtaactgaaatcatgaaaagaagaaagcagcacaaaaagcagaaactaggaggaattttatagaggaggaatccttagcttgaggtgtgaatataactggaatctggactaatcttgaatgtaatagctgacagttattatttttgtgccaggacacattctaaacacttagagtaacttgtatggtcatcataacagccctacaaggaaggctgtattattatacccatactcagatggagaaacggaggtcctgagcagttaagtgacttgctcaggtgagatcatttttaaatatcatagttgaagtcccactctggatgttcaagctccagagtttctgctcttaagcactacgctatacagtttcttgatgcagaaaatgttttcaaagttaaagatacaaagtcagtaagggtaaaaaaaaaaaaaattgtatcagaaggatgtgtctgaagaataacaaagagattaatccttcactttgttattcactttgattatcctttcaagtgtctctgctggcaaagcactaggaaatcaagttggataaaaactgtgaatccagttttttcttttttttcctggaaaaaaagatgggctaaaagatgggcttgaaagtgtccaaaaagctatatgtcatcatggatggattttggtcagggataatccttaaaatggcaggataaattggacacaaggaaaaataaagagataaaacaataagtaaggagatatttgtgttcagcatagctggaccgatttataaaccatacccttgattcagtagctgtaccaggactctcattattaaagttcactcaggagatgcccaacatcctagatcacccattttcctgtgttagtgcaaaatgtggactggatttcccgatacatatttctatctagttaaataaatactctgattggttaaggaaaggttttctggaaggtgtatataatcccaccatggcaacagaaccaagagtctctgactgtctaccaacctgtagacttgaattttttccctgtactttcttctagcttcttcgatttctgttatccccaaaacaccttgatgtagccttaagcagaatcaaccatcaaagggctaactccctcctcctgctgggtgccttctctgttgggccccagcagcagtgaatctatgctcccaacttgacatttttcttatcccctttcccacctcccctaaataaaattcctttgtgtcaaagtttgatttaagtgatagaaatggctaagattgtctacagggttgggtttggaagaaaagaggtctggaaagggaatatagcaaaacatcagtattttctgagcaagtttggaagagattaaaaattacccctagtgactctcaaatttatatctctagtcaagattcctctcctgaatcatgacatatatatatatgccttttatatattcacttagaagtataataaacatcttaaatttagcatgttaaaatcttacaccctaaccttatcctcctgcagttttctacactatagttaatggcaactccattattccacttgtctgtgccaaaattcttcatgttatccttaaggcctttctctaccaacacacatgtaattggccaccaaatcctaaggattctgcctttacaatgtatccggaattcaaccctgcctccactctgatccaaagcaccatcatctccagcatggatgattgcagttgtctattaacaagtttccccctcattgccttctcccctgtagactctactgtcaatatactagccagagatacctatttaaatggaaagtcagattatatccccctttctgcttctgttcaaaacccccaatgctccccatccccctcaaagtaaacagggaagtccttatgttcataagtaccttcatgggttacccaccccattctctgatatttctctggtagtcgctagctcatacactccagccataatcacttcctccatgttccttggccactcctccaggcacattccagtgtcagggcccttatacttgctttacctgtctggaatattattctcatgatttttctttcaatggttaatttctgcatttccttcagatctttacttaaaaactgccttcctggtaaggtcttccccgacccctcttacctaaaattctgacccccactttatccttcatttcttccttccctgctttagttttgctcctcagcacttaaccactatctaactgagtatatagtttagtcatttctctatttgtttactttattctcctgtagaaggtgagattccagagagcggggcttttgctttctggatcactagtatatacccaagatataatatatgactgtctcaggctgggcgcggtggctcacgcctgtaatcccagcactttgggaggccaaggcgggtgaccacagggtcaggagttcaataccagcctggccaacgtaatggaacccgatctctactaaaaatacaaaaaattagccgggcatggtggcgggcgcctgtaatcccagctactcgggaggctgaggcaggagaattgcttgaacctgggaggtggaggttgcagtgaacagagattgcgccactgcattccagcctgggtgacagagtgagactctgtctccaaaataaataaataaataataaataaataaataaataaataaataaataaataaaatatgactgtctcatggtaggttttttcaacaaatatttcttgagttaatgaatgaatacagcgatgtagctgtcagacacagagagagaaacctagaagatagtattactagttaaaactagtgtggctaggtctgtatgatgaaaactgtgcctaactgtactgaatcctgccaaggagggaaagatgaaatggggaagctattactaagtgagtgaataggaatttccttcaggaaataaatatggttaaaaatgtgaattataagtgcttccagctgtctgctaatgttagtccttcagagaaatgaaaactgagaaaccattagaaagcaattttatcacttcttttaaaaaataaagttcaatatatttcaaaccagaatatcatcgaaatactgaagtcattttcaggggaaaatgccctgaaacaacaatttcatattatcttatattttaacttatgcttttatacatttgaaattttatttcatttgaagacttttttctaattgaaatttttgactgagagaacactcacaacttctgatgtaaaattttattactgaggaaaaactgttaaacagaagacaaattagccaattaatgtttgtatatacatcccacagtggacatattatttaaaatcttggaaagagttgtagatttgtgaaggtatatgtgagcttatttctaggtatgaaataagggagcaaagacacttgtaaattatagacatccttatttagtaattggatgttgaagatgaagaaatggctgaattgaatgaccacagagacgggacagaggaagtgatgtttgtttgtttgtttaattgtttattgagacagagtttcactcttgttgcccaggctggagtgcggtggcacagtctcggctcactgcaacctccgcttcctggggtcaagtgattctcctaccttagcctcccaagtagctgggattacaggcgcccaccgccacacctggtgaatgtttgtatttttagtagagacagggtttcacatgttggtcaggctggtctcgaactcctgtcctaaagtgatccacctacctcggcctcccaaagtgctgggattacaggcgtgagccaccgcgcccggctgctattttaaataatagaactttggcacttttcacagtattcgggaagcaacgagctttgctataggtacaaaaatatatttaaaacttcagtaaattattttaagtttactttcatcaaaagtgattaacagtaagttcaatttgtcagatattactctcccctactctagttctcttcaggttctgcaatatctactttgacatttatacacataagtttaccatttagatggtaaaggcaggctctgcaatgaaaatctttgacagcaagggagtagttgtcactttacattaaatggaagaaaaactaaacagtagaagtctatcccttatgataaagaatggagcatagttaagggttgcttcatacctttatcttaaactgattagttggcaaataggtcccttgtttgtttcctagataaattttctgtattctctggcttctccttttatcctgttaaagacacatactccacaacacttgaataaacaaagcatttttatgttcaaattatttctgtatgtgtctcctttaaaaaccaattatcttcttaagggagagactcacattttaaagtctttattttcatatctcacatttgaggctgatattatgtctgtattatcaataaacacttatttaaacaataagcttttcaaacagataaatgaattgaagccacatggcttatagatttctgcttttccttactttaggtatctggatttcatctgccggttgtaaaagttactgtgctatctaatttttctctattcacagtgcataatcagggtcttctttaacttattggagactgtgaatcagagatgcaaatatcctattttaaaatattaaggactcgagttgtataaattcgtgtacagatgcctttcagaaattaaaattccatttgtatgtatatttagaatttccttttgcagaaagagtggccaaaaataaacatcttacagaatttcagcggaatagtgaagtggtcaattcataggggcatgtcaaaattaagaagggatttgactaaaaagttggtactttatcattttgacatcatattttcagataagataaggaactattcagggagagaaatagaaatgctatattctatagtgattctagggatgtttatatcgccatagcaactacaagggactatggcttcctttttagagggtcagaaactataaagatcacttatttctagacaaactaaaatagtaaaatactatcagagatctcatctctgactttaaactatggaaagtgctacagcattttctttggtgcacataccatttttctgtgtgcagtgccttgaggacacgaatatgtgcagggactttaaaaaggatgtatttcctggactccagccaattttgacagcattctctgagaatgcaccaaggagctattatctagatatccagggagtgtgacatcccctgccccagtttttgctttttgcttttctcctttaagatagaaagttttcccgcgttagtaacatgctgtacagcattgctaaaaccgttcataacttgatgctgagcaatgctacagcattccaaagaattggtagctccccagagactcagattaaaatcaggaagctttgcaagctcaaatcctcagagagtatacatacacacacatacgcacaaacacacgcataccatatcaaagccataactggataacttttatatgctgatggggaagatcctttatctcttcccttgaatgtttttctccatgggtgcttacagctatgcatttaaagggtttgggcctgctatgtactaacaaatgtgattggttgcccaatgtgaatttaagtaatcagcctttcattcagctggagtcttggtatcaggtggaggacttggcagagttatgtatctttgccattggactggcagccaagcaagaatgatggagacagtgacttaaaagaattcagagttgaatcaagtacttgtgaaatcaggctgcccaggtcaggcaagttaacagaagcagccaagaagatatgttggtgcacgtttctggtacctgacctaatcaggctagcggagtagccctaaacattccacccaagactccaggcttggagccatcagaagatggtagtaaaattctaccaggtaaataaaagtaaagaaataatactagagatacgcttgagttcaatggcttttagggcattaataacaggtattacatccattgtatctcttttattataatttcaagtgtattttagattcaggaatacatgtgcaggtttgttacatggatatattgtttgatgctgagatttgggatatgaatgaccccatcacccaggcagtgagcatagtatccaacagtttctgttttattatgagttttgtttttatcaatatgaaacttttcttcaataagcaagcctctgatgtcaaatacagcatactgcaatgtcgtacaaagctattttctattttatagtgaaagatgatgacagcaaaagacagtctggtctgcctacatttatgttttccacttccaacatgctgttgttgctctcgataagatcaccaatgacctcctaaattgcccgagctgacttttccctcctggtcctggctgcatctgacttgttgacaactccctccctccttctggttctcttcctgggtctgatgactattattctttagggatactcatctccttcctctgcccatgctttccacataggttcatctttatgctacctttcttctcactcttttcaccctaaacacctttcctgagcaatctgaccatccctagtcttattcaacatcacacacattccaatgactatcaattctctatgtgaaattgctaaaagacagttttaacctgcattcctccagataagtaaattctcagattgtttctgtgttggcttgttctttcttttgtatggtaatacctgacctgtcagataagtactttttccacagagttaaattgaggtgcgaaacaaaagaaataatgaaagctttccatcacaaggtgtacatagactggaagagaatgccttgaaattttattttaaaaacaccttctttctctgaaattcactcacatcacccataaccattgtatcttatcctgttgctgagctgataaataagacacgagaacacagttgctttttataaggttcccattgtaagcattgacttttaccttttacaactgacattatctgtagtctcacctgcctcttcagcttagttcttgctcaaggcaagtcctcgtggaccacaaacgtgaaatcttagaataaggcagaaaatcctctaagttttattgttaacttctttcctgtttccctctctgattgtgaagttttcttcagagcccgtcatctggaaagctgtacgatcagcagcagtcactccctatctaacacagtctccaacttacaaatgattaaaatgcttcccaattttgactgaaaataggcaagaatattccctttgttttgggaggctgaggcgggtggatcacgaggtcaggagatcgagaccatcctggctaacacggtgaaaccccgtctctactaaagatacaaaaaattagccaggcgtggtggtgggcgcctatagtcccagctactcgggaggaggctgaggcaagagaatggtgtaagtaaacccgggaggcggagcttgcagtgagcctagatcagaccactgcactccagcctgggtgacagagctagactccatctcaaaaaaaaaaaaaaaagaatattccctttgttgatatttgttaaaatttatatttatctagtcaggaaacataagatctctggatgagagaatacatcattaattactcaaaagcatctcagggcaagatgtttatctgtgagtgcaggggttgtagtacaggagagaaatcccagaattgtggatcttggagattatatagagcacctgatgtatcaggaggagagaaagtgagagagacagacatacaggaagacagagactttgctctgggctataaaccaatgatctaggtctattatttttggaatataagttgaaatgtaatcaaagggctcttggagataaaagtttttaaatctctccagagcaatgcactaaactccaaggtacgcttgccattcagtcaccctttaagacagttactacaactctttgctcagaaagcctagtccatgtatccaaatgtgaaaatatgtatggctcagcaatccctgccatcttactcctcttctcaaaatctgatttcaactgcctctggaacatctacagtttgatgcctcaaaggcttttcagaatgaccatgtccaaaattgaactgatcacttatgcacacatacacaagcatgtaaccatggaacctcttcatctgtctgaaatcctgttacccaatgacaccacaaatcatgtggatgcccaggccagatacctaagactcattcaagttcttcctcttcttcacccaacacacagtcactgaattctgctgagctgttttcctaaacttccttcccacttcagctcaaatgtgaatagcaactagatacttgattcaattaatgaacttttgttaagactgtaggtgtgttaatggtattatatatgtactttccgaaaaaagttctcatgagagaatatttcagcaagagaaaaatgctgaagtatttatggagaaaataatatatcagtttgtttcagaataatctagttgaagaggtgagtgggtggattgtccatggagtcataacagttggcactggattatagggttatgggagctatttgtattattttcctactttcaaatatatttgaaatcttacataatgataactttttaaaaatcatagttccccattagctactgaagtacaggcagaattttctgttgagattcaaagcacattattgaacatcctcagcctctgtttcatgccccatcttcccctaagcttctatgttactgaaaaggcagccaaatatgactgcgcttgttacctagctttgcgtgtgtgttacctactagctctaatgttcttcccacttctactactcagatatgtctactgcaatttgcaccttcttcgtgaattctttcctgagcctatgaccaaatatatgatacatgttttctctaacttctagaaaatgtttggtaccacttggaacactcatttcttccttcttctcatccagctaaggcttctatacttggatttttttcttcaattcttcaaaccatatcctttcttactactacaataaaacctacttaaaacttcttaaaggcaaactaaactgtgtttcacccacctttgtttctgctatattgctccttacacatgggaagaactcaataaattttgctcagtggaccttatgtataatttagatgatcaaaataacaaaattcgtactaggaagaatagccagaatgtagtttttagcaaatttattgagaataaatatgtttagatttttctttcttcccgtataacccatttgtggtttgtgatttttccgttaaatagaatataaacaaaacattatggattaaatttatgggaccatctattcatttattcaacaaaaaagcttttgccatctatcatgtgccaagcacaggtttgagctttggaagcccaacagataacaacatccctgtagtcatagatttcaaattagtggtatataccggctacttgatatatattttaatgttagtaataagtactataaagaaaagggaagagtaatgccaggaataaagagtgattgctggtgctatttaaaatagagtagtagagaaggcccctttaacgtgagaaagaagtaagggaaccactgatagaaatgtgggttaggaaaactatttttggcaggtagaacagcaagggcagaaatcttgaagcaagaatgtagttgttatactcaagtaatgcaataaacctaatgagggtgaagtgttgtggactatgaagagactgggaagagatgagcttggaatggtaggtagtatacaaccaagtcatgtagagatttataggtcatagtgaagattatgcttttttaaaaaaagtaaaagcaagtttattaagaaagtaaaggaataaagaatggccactccgtaggcagtgcagtggcatgggctgcttgactcaggatacttgtagttatttcttgattatatgctaaacaaggggtggattattcatgagttttctgggaaaaggagtcagcaattcctagaactgagggtttctcccattttagaccatattgggtaacttcttgacattgccatgcatttgtaacctgtcatggcactgctaggagtgtcttttagcctgctaatgcattataattagtgtataatgagcagtgagaaggaccagaggtcacttttttcaccagcttggttttggtgggttttgactagcttatttacagcaacctgctttatcagcaaggtctttgtgacccgtatcttgttctggcctcttatctcatcctgtgactaagaatgcccaacctcctgggaatgcagcccagtaggtctcagccttattttacccagcccctattcaagatggagttgttctagttcgaacgcctctgacatatttcccctctttcttttacaagggaacccttaatcctaagggtagtagagttacccttaggattaagtagtagaagggtaatacatcttctgtaacttcttcaggctgaatatgggtgatgatatttctgcctaactattagggtctcttgtattcagggtagagaggagctcagtcagcaagcatcagcttggtgagggccattcataactgataaatggtgatatctggaagattagtaagttttcaatctaagaaaacattgagtaagcttattctgcattcctatacaaaaagtaaaacagcaaatatattccacaacagtaaaacacaataagtaaaattatcccaagtaaactaaattagaaggctttccgtgaactgggcagctgttggaaccaaagtgatgtggggctgctagctgattccaatacatgcccagaattagaatactgatccaggtttttatattacccatccttcttgtttcttctgaggtgcagtcagagatcactggcaggttcacaggaataagcaggatcagtctatattgcaggaaaaaactcaaaaacagctgacgagactaataacaggtgtaccatagttcttaaaacataatttttttctctctccagtctcccatttttactaaagatggatcatcataggactgatttgctttattatacttggcctgattatttgtataaagtgttgcaagaataattatttttcatgtaggcttttgaaattggctgtgattgaactctgtgatgaagagccaccagaagattttgagcagaggagtgatatgatcccaattatgttttaaaagaatcttttcggctcttgtgtggagaattatccagtaggggggaaagagcggaagcaagaggaccatttagataggtagttctataacccagatgagagacaataatagcttctatcagatctgtagcaagaaaggtagtgagaagcagtcaaattctgcatatgtcctgaaagtcaagccaaaacatttgcccaataatttgaatactggagactgaaaaaattaaggatggctccaaagttgtcaatctgagtaattgttaattgaattactataattcaattgaaatcagtaattgccatttactgaaatgagggaatctatgggatgagaaggattaggaaatgcagttcagaattttgtttgcgtcatattaagtttgaaagtctcgtgagacctccaagtgttgagaaattagcatttgttagactggagttcggaggagatgtccgggcttgagatacacatttgggtgtcattgtcttatataagatatttaaaattatgagaacaaatgggatggattatggacagagaagaaaagaagtgcaaatactgagtcagagcactctaatattaagatcaggatgagaaggatccagcaaaggaaagcagaagaggtcaggatacagaagccaaatgaaggcagttttaagatgtagggagcgatccactctctcaggatgaggtctgtgatttacctattgaatttgaacatgtcaaagtcactggacttcatggttattaactttaaaaagtcaataattaagaattgcaacaccatttgctacctttgggatttgtatatatatatatatttttctctttctatagacagctaattcatttttttactgttttaaaatttttatattacagaatataaaagatagtctacaacaaagctcaggtcggattgacattattcatagcaagaagacagcagcattgcaaagtgcaacgcctgtggaaagggtgaagctacaggaagctctctcccagcttgatttccaatgggaaaaagttaacaaaatgtacaaggaccgacaagggtaggtaacacatatatttttcttgatacttgcagaaatgatttgttttcagggaactgtagaatttatttcagtaccctccatggaaaaaagacagggaaaaagaagtatcactctcattgaaaaatggtaagtaaaatgagaacaaataatgatgaacaattcagacaaatgagctgaactgtagaaattattcagtattaaatttagcgttatgttgaagcattatatcttctaaaatttcaggtaatcgtaaatcagattggggcattgaggtgctataaacagttgttcgatataacatatttatctttagtcaaatctgtatctacaaatttataggagtttgatacttagattaacatgtttaaaatactacctatcaataaaaaaattgattttcatttatttatattttggagggtgacactttacactttgcattaccctcccccacatttttttttgccatggggaatttgttaagttgatttaaaatcatgtttctttttatcttaattgaaatatttagctgttgacttaattggggggtggcagaaattcaattacattatttagcttcacatcacaagaagtggattactctttcttttacatttttagattaaaagtaataaagttctctaacagcttaaagtgattcatttcagaagtctttatcctcaaggtaggcttcttaattattctcagaggaaatcaaatcattcgtctaataattatagggaacctccatggtatctcttacatctgtccatttctaaccatctttactcctattttagttcttggtttactacatcaggcacctaaagagagatttctagcattaatctcagttgtctcaagtgattatctccactttgttctcaacgatctttcagtggccgtcatttttctaaagtgtaagagctttggtactataatctcattcccttgagaatgaaaccctgactccttaattgtgcaaaattatctggtcagcctcactgcttatttcttcgtgcctgccctatagcaagcccctccaattatgttctagcgatattaaatcaatttgcagatgcccaagtgttttgtactccctctgacctgcctgttcttcaggtctcacttcagatgttgtctttttctagaaatcctaaaactattagtcgctcctaacatctggaaacttggatattgtttcatcatttaatgtaatttaatatcaataaatcatttatgcatttgtaaattttccagacttggtggctaccgtgtagaatatatgatctgatgtgcctgctcctaaaacctaacacatagtaatcaatttgtttacttttctgcctcccacacaagctccttatagaaaagggctatgttttatttgtgttatatgctcaggactgatatagtgctgagcacaaagtgggtgttcaatgtgtctggactcaagcctcctctccgaaacctgagaatatttcccctttggatagtctaccagatttatctcactgcaccttccagggcaggtgcggtggctcatgtctgtaatcccagcactttgggagtccaaggcgggcacatcatttgaggtcaggagtccgagaccagcctggccaacatggtgaaaccttgtctccattaaaaatacaaaaatgacctgtgcgtggtggcatgcgcttgtagtcccagctactcgggaggctgaggcaggagaatcccttgaacccaggaggcagaggctgcagtgagcccaaatccaccactgcattccagcctgggtgacagagcaaggctccgtctcaaacaaaacaaaacaaaacaaaaaaacagatttatctcaacttccttgaaaatagctggtcccacagtatccaaagccaggcttgataaaggcaaagaaactcagccactctgtgtatatgctacaaatacaaacttaaacttataaaatggtggctcatgcctgtaatccctgtgctttgggaggctgaggcaggagggtcacttgagcccaggaattcaaggctgccacgagccatgattgtgccactgtactacagcctgagtaacagactctctctaaaataaattaacaaaaatatttgaataaacttatatcgccaccatggtgtactttctcccagcatttcacattgagacattatgaggctctgcgggctactccaatgatgtcagtttcattaccatcttttgggatgttcattccactcttgggaagttcttccccctctggtttgtcttcttatagtcagtgttttctccaagcattctaggccacccacaccatcccctaaggaccgttgaggtttcttggatagccagtgattactgtgcttctatatacacctaccagttttgcactaaagtagaaataacgctttctgctttttgaggtttctcctccgctttactcatgagtaatttttggcaaatgatccaggtattcccttctcactgggtcatatggacatttccctttcagtttaccttcaccttagacttaaacagaaacactaacgccattccacagagagggtcgctgaaatctcaccccaactctgaggacttttctggttttgacaaaggatagagtttctctagccccaatagatccaccctgtccttatccagaggttgaaattgtacttccattgacattctataggaattggtcaggagctgttaaatttcctatgacttttagtacaatctcagatacaaactgttttaagtaattgcttataagcacaggctctagagttccaacccgttttggaattctggcctttctgctatctatgtgcccttgagcaagtctcttaaatcttctgctccatacatttctgatgtataaaataggataagaatagtgtctatgtcacagggttgttatgaggattatctgacacaatatatgtggggagcttagtgggttgcttaaacacgataatggctcagttaaggttggcaattttgatgatgaaaatggtgatcttatggttctgatagtcatgatatctgttaattcattcttacatgctttcaaatttccctgagaactacagagagaagaattagactcagtccctgctttgaagagcttcacagtcttggagagaaaaggcacaaccagccagtaaaataagggttgatagactggagctgtacaagagggcaagaacaagatccctggggaatggaatgaagctatcttactaagaatggggaataagtcaaggtctatagaccattcaaggttctgagttacaactaacagaaagtgactctagttactttaggtagaattatataaattactagaaggatatcagatacctcatggaatcaataggaaagcctgagagctaggtttaacaatgggcagaaactataaaggaagagcaggctaggcatccagaatatatctactatcaagctatgaggtaaatctgaattattttgctgtcatgccagagtccattgctttaccaggagcaccattgcactggacattgcttgctatcgtcactgcaaaaaaaaagtatctaaattatttattcttgctgtgtgtcgctcattctacaactagggtctctggcagaagcatctgatagtcagaggatggatatttttttctgtaaaggggcagttagtcgatatttttgtccctgcaggtcatgtagtctctgtcacaactactcaactctgctgttttagggtgaaaaaaaccatgtataatatataaatggatggacatgttgtgtttaaataaaactttatttaccaaggcagatggcaggctggaattgctgatgggccatagattgatgactgctgttacaatacaggtttaggccacagaactaggttcttattgccagagatcagggaaaataaatagctgaatttgttcttcattgtagtggcagtcaacacctcgtgtcctactaagtcccatacaatggtagattcttgaatccttggagagatttagaagctatgcattcctgaatacacaaatgttcagtacagccttcatgtggtgttctcaacaaaaatctgctgagttttttagtaagccaatttgggttaaatcaaaataaatttgagctagtaagaagggctatattggtatttttcttaaatggtacatgtatggtagtattagctatgaccgcaataatgctgtgacacaaatcaccctagaacttgctgactgaaaacaacaggcatttctggctgtttaggttacttgtaccttgactgactcagctgggcttggccgggaagctctgcttcaagatgtgggttagtagagctaggttccatgatgcatgttggattaaggtctgctatatatgtctttgctctggacctaagatgaagggtcagtgacatgttttcatgaccagtcaccaaagtataaacctaaacctcccaagaacactcatggcctctgctcctgtgaagttcactgacatttgattggccaaagcaaattacgttgccaaatctgacatcaatagaatgagaaagtagactcttcctacagtggaaggggggagagatgttaatatttgctgaaccataattcaaattattagagatagttaataatttataacaggattgttttacagctagaaaatgccttagtggttttgccctgcttcattattttataagggagaaaactatatttcaaagatgttatgtgacttgcctaagcacatactaaatagtacatctgcgtatttctcgttcagtcatctctattaaatgtcataaggtaaaacagacattacgctttagatgagaacaggaagatatttaaaaagccagactaatttatgactgctcattcattatctaacatacctgcttccatacattgtctttcagcaaatagaatttcaacatgtatctcaacaagttacacatcatcaaagtattaaaagccttattttcacggacattctgattgttcactaacagtcaacacagtcaacagtaaatccacaagcaccatgaacgtatggatagatatgcctatatgtaagattactagttaactttttgggaaattaatattactgctaaattcagttttcattgattttcgggtgggtaactaactgcttataaaatatacctataggaaacatgtaaaaacaaagaatttacataagatctatctgggattagagaaacaaagctcttttcttctttcaatgaacacttaagaagggcctactaaatgtcagatgttatactctattgtcgttagtttctttctgataccatctttactatcctgtaagccattagtgagtgtttcccacttttagaaaatgacttcccaaagactaagagggtagaacagttcaaatgctatcatcaaaatgaaggcagtttctagactacaaattgctgtacagccataagatggcattattgtgtaacaacaaggtccctgtcaaacatcaagaaagtaatgttttaaaatcagtatttccttcttggaattctacttagtcagatatgttgggttgacttacccacccatataagtagttaaattcaagatggttctgagctttagatatgatgtaaaatagacatgagactaagagtatttatttctatattattacatttctatagcaaaaaaagaaacctctaaaaaaattagagaaagaagtataagggcatttaattaatcaaatgttcttattaataatatttcataaaataaaggaaatgttgaaaaataaaatatgaacacagtgttgtataaagtaagtcagaaataagagaacacttactgtatgaatctattatatgaaactaaaaaattaggcactttggagtttagaggtcagataggagttacctttgtgagttgtgattaacaagggctgaagcaggcttctagggactgggtaatgttttgtttcttgatgtggatgctgcttgcattgatgtgtttcctttagggaagtttatggaaccatacacttgtgatgtgtacacatttctgtgtgaatgctggactgaactaaaatttatacttacattttaaaaataataaatatgtactttaagtacaggagggacataaatcataattgttttaataaagaaggtgtagctttaggaaaagcataccgcattgttctatttttggcatttcaccatggacccctgaacattttataattgcccagtacagcctgtcagataaatatgtgggcactactgctttagagaaagtattttccaaatttatcaccaccattctggaaccacagttccacaggtcattaggatgctgagggtgggacagttggaagctgcttccccagggatttctccattgttcagttctcatagcagtaagcctgcagcattaaagcactcacaggctctggctgccatttgtgctacatgaagaaaaatgagaaaatgaaagaaacgaaaggagagaaaacaggagtagaaaccaaataaatcagattcgaagagaaagtccctaatcgtctctgtattcagacagtagggaatgagcatgcaattctgcaagcccattcctaatgtgagtttctgataagaatttgctatctcagttgtaatctttctactgagacattcaataaataattttctttcatgtcaaggtaaggaaataacctcacattacccatataaggaaagaatagtatactaatcctcacgttatcactatagaattttatcttttaaagtggaagctagagggacagatgcataatctgggagcttttccagaattgtttgttcctaaatgagacattcagctatagcagcattagcagcctcttctatttgtcacaatgccatatgtagttgggaagatacatgataagcacatacaggatgctgacaactcacgaaggattatcattgcagtcttagaattaatctctaccatatttgaagatttttatgcaagactggatcttcattccacaacccaggtataggtatatgtgccaatacaaaatacttactgttggtttctgagcttggtagaattaggaagtaaggggtaaaaaacaagcaagtcctgaacttaagaaagttgttcatatcctattccatggccactgttttactgactggaagaaaggaatcccgtggattcagtcatggggacaatgcagaagaagatacagtagacagacagagaagtacaaatttctatttatgttccacttttcaaaattttttatctttaaatgttatttttaacgtttgtgggtacatagtgtgtatatatatatatatatatatactgtatatatatatatatatactgtatatataaacacacatatataaatatatactatatataaacatatactatatataaatagatttactatgtatatacacacatacatagtgtatatatgtggggtatatatatatgtggggtacatatatatatgtggggtacatatatatatatgtggggtacatatatatatgggttacacatatatatgtgtatatatgtggggtacatatatatatatggggtacatgagatgttttgatataggcatgcaagtatcatggaaaatgggatgttcatcccctcaagcaattattctttgttttacaaacagtaaaattgtatttttttaattgtttaaaaatgtacaattaaattgttttgactatagtcaccctgttgtgctagcaaatagtaggtggtgttcattctttctaactattttttgtaccaagtaaccatttcaacctccccctcaacccccccactacccttcacagcctctggtaaccatccttccaccctctatctccaagtgttcagttgttttgatttttacctgccacaaataaatgagaacgtgtgatgtttgtctttctgtgcctggcttatttcatttaacacaatgacctccagttccatccatgatgttgcaaatgaaaggatctcattctttttatggctgaatagtactctattacgtatatgtatcacattttctttgtccattcatctcttgatggacgctcaggttgcttccaaatcttggctattatgaacagtgcttcaacaaacgtgggagtacagatatctctttgatatactgatttgctttctttgggatatatacccagcagtgggattgctggatcatatggtagccctgtttttagtttctgaggaacctccaaactattctccattttggttgtactaatttacattcctgccaacagtgtacaggagtccccttttcttcacactctctccagcatttgtaattgcctgtcttttggatatgtcgttttaattggggtgagagaatatcccattgtagttttgctttgtatttctgtgatgattagtgatgctgagcatattttgatacacctgtttgccatttgtatgtcttcttttgagaaatgcctattcgaatcttttgtctattttctgatctaattattagactttttcctatagagttgttttaactccttatatattctggttattaatcccttgtgagatgggtaatttgcaaatattttctccctttctgttggttgtctcttcactttattgattgtttcactgcggaggagctttttaacttgatgtgatccatttgtctatttttgcttttgttgcctgtgcttataggatattactcaagatttgttttacccagacagatatcctggagagtttctccaatgtttccttgtagtagtttcttagtttgaggtcttagattttagtcgttaatccattttgatttgcagttctctgatggccagtgatggtgagcattttttcatgtgttttttggctgcataaatgtcttcttttgagaagtgtctgttcatgtccttcacccactttttgatggggttgtttgtttttttcttgtacgtttgtttgagttcattgtagattctggatattagccctttgtcagatgagtaggttgcgaaaattttctcccattttgtaggttgcctgttcactctgcatcaattttgcatcaatattttttgcatcaattttgcatcaatatttatcacatggtagagttcagcagtgcagccatcgggtcccaagcttttctttactgggagagtttactaaggcttcagttgtgttactcgttactggtccgttcaggttttggatttctttatggtttaatcttggtaggttgtatgtgtctaggaatttatccattacctctagatttttcaatttgttggcatatagttgctcatagtagccactaatgagcctttgaatttatctggtattaattgtaatatctcctttctcatttctgattttacttatttgggtcttctcccttttttcttcattagtctggctcaagatttgtcaattttgtttaccttttcaataaaccaacttttcgttttgttgactttttgtatgttttctttattacaaagtcatttatttctgctctgatctttattatttctttcttccactaattttgggttcgatttgctcctgcttgtctaggtctttaagttgcattgttaggtgatttatttgaagtttttttcttttttgatagaagcacctacagctgtaaatttctctcttagtactagttttgctgtatcccataggttttggtatgtggtttttctttcattttttgaagacatttttcaatttccttcttaatttcttcatagacccagtggtcatttagtagcatattgtttaacttccatgtgtttgtatagcttccaaaattcctcattgttgatttctagtctcattccattgtggtcagagaagatgcttgatattatttcattgttactgaatttttaagactgcttttgtgacctactgtgtggtctatctttgataataatctgtgtgctgagaagaagaatgtgtattctacactcattgaattaaatgtcctgtaaatattagatccatttattctatagtgcagattaagtccaatgttactactttggttgagcttctgtctgggagatctgcccaatgttgaaagtggggttgttgaaggctcctgctgttattgtattgaggtctttctctctcctgagctcgaataatatttgctttatatatctgtactccagtgttgtatatatatttgctttatatatatatactccagtgttgagtgcatatataattgttatatcctgttgctgaattgacccttttgtcattatataatgaccttctttgtctcttcttacagtttttgtcctgatatcgatttggtctgatataagtagagctagtccagctatgtttgggtttccattggcatggaatatctttttccatccctttatttccagtctgtgtgtagctttataggtgaagagtgcttcttgaggtcaacacaaaattgggtcttattttttcatccattcagacactgtatctatttttcttttcttttcttctctctcttttttttctatctttctttcttttcttttctttcttgagacagcatctcactctgttgcccaggctggagtgctgtgacaggatctcagttcgctgcaacctccgcctcctgggttcaagagattcttgtgccttagccccccaagaggctgagattacagtcacccacaatcacgcgtggctaatttttgtatttttagtagagttggggtttcatgatgttggccaggctggtctcgaactcctgacctcaagtgatccacctacttcggcctcccaaagtgctaggattacaggcgtgagccaccatgcctggtcgagacactgtatctctcttgattggagagtgttgtccaggagctgagcctagaaatgggtcctcacaacactgtccagtgccctatcctactgtgactaagctggtatccaagatgcaagacagaatcctctttacttttcactctcctctccttaagcaaaagtaaggagtcacttttgttactgtgggctgcactgcttgaggtgggggaggaatggtgcaagcactcccttagccatgccagctggtgtctccctaggtcacatgccaccctagtcctctagctcttagcccaggctatgactagaagttatctaggaattgcagttcgtgtgtcccagactgcctctcaggtttacctgggactccagagcactttggcccacaatggtgaggcttgccaagaaacttgagttctgactgctgggatgggcgattcccttctggctggggctagttcaaatattccctccgtgcacaggcactgactgaggccagcatggcttttttctctactgtgacagcacagcagttagttcaatgtaaagtcccccagtagctgtactgtcccttccaaaagtgcaaagattccctctctgcactgcacgtccagtgctgggtgattgggaaggtgtggtgttggtgattcaagactgtgtctcctgcctttcctcaatgcctcttttagcaagatgaagttaaaaccaggtaccatgattccgtacctggtttttggttctggtgacagtgcttttctgtctgctcatagttgttacaatttgatgtttcagtgagggagattagttatataggcttctattctgacatcttgcaccactccgtctcacttttttgaattgttgaaaccatggtttatggggaaatgttctgttctggtttttaccctcaagatcttctttgaaaatcatgatttactaagtaactagttggatagaattcatttttaagaaaataatgaataagtagttcccttagatatagcaagcaatgttcttataaactgacacaccaaaacacttaccagttcacctaaacactgaaagtatttaaaaatttatttttaacctttaagtttttctccatttgagtatcttgtgcactatacgctctcctacatatgtctacaatctttggtctgatttattttattggttgttgaatgtcagaaaccacctgaattttgcttgtatatataatgcccagtagagtgcacattggtaatcaatacgacttgatgataataatggtaatgaacactataatttgatagcatcaacttggcatgtatgccagaaataaaccatcataaacttcgagaaaaacaagtctcattaatctgtcatttattataatctccctccatcaagcgtagcctctatatactgtcttttttgccatatgtaagtttcttcttgtatatttcagattagagcttgcctcctcccacacactatcttctatttcacactgctctgttcaagtgtttatgtttctgctgaaggctgtataatctaagataatccctagctattgtaaatatcattcactggccagtcattgcattttgcacaccactgagagagtgattgtgagccaaatagaggagattttgtttccacccagcaacccaaaatgaattgtgtgatttgactattgatgccaattacatggaagttttactaccagaggcaaagctttaaactgcaaaagattaaccccatatagttggtgtcatgaggtatttaatgtatattggactatcaaagcgtctccttacaacaaaccaattatcaatgaataatattcttatcttattgtgacttattgaaactctttaaaaaacatgaaccattcagcacactataccgtctaaattagatatctaaactagccttcatttacatttccttgtttagttttaaatataatttcttctgaattcttagttgttaagagcaggtggtgaaagaatttaaagaagaaaatttgttgtatttattaagtgaaagagctttttgaaatgcattaaatagaagtttgtttctgcccatcagcttatcttctgcatattcctatttatagttcaaagcacttaagagttgcagagtgatttgctttttatgatcaccgcttcatccaggatcatttgccttatatcttcaacattttcagattcttataaatcttcacagttcacttagaggttagtttaaaactttcttcagataagaaattgactagatataaaattcacataatctcagagttagccatagatcaatatccccagtctttttctcaaagtaattgaacatttttgtttcccaggatagttgtatacaagcattttcatcctcaccatagatgattcttgttcttcagtatatgaggggactgtatttgcctgcttgttatctaaataaacatttttattattgtcaaaggaaaaagactctaatacagaaagaaattttgtgtccataggactagcctcattttggaggctgatattaatatttgactttattcattgtgtatttcttggttttgtcatttcacaaatttcccttctctaaatatgcattttttctctacctggaatagatgagttttaaaagacattactgtaaaataaaactgtgctaaatgtacttttcccagaaactctctttattttatcaattataatttgctttggctaagtgttacagaagctcaaggtagaaatgacttaaataaaagagaagcctatttctttctcctgaaaaaccctggaagtttgcagccaaggcagatatgttggccccgctcatttctgttttctactgagtgagttatctttacttggtggaatttcatccacatgttgcaagatggagctctcatgacatccacattccaagaaggatgtaagaaggccagaagaagggtcaaagggtgcataccaattgtcttttagggaagtttcgtgggagctgccatgttatatttccacttacgcttcattggccagatgtctgtcacatggccacatctaagctgcaagtggggctgggaaatgtgtttatttcacatgtgctctgctaaaaactgttcagtcatgaaaaaaaaaaaaagaatattggaagagaactaacagtcttcaacatgtatatttaaaaagagcgttatttttcttttacttatttatttttttttgagtgagagtgttgctggggctggtctcaaactccctggatgaagtaatcctcccacctcagccttctgagaagatgggattacagaggcacaccactgcacccggctcctgttttgttttgttttgttttgttttatttaaggagccctaagaagagtgtaaaaagggcaactttgtctttagttaacccttccctttttttttctttcctaattttatgaactctgattcagcccgcatcttactctggcttactaaattctgccaatataagagtagaagttttcatcatttccctaggtacctactcttctgtttctccatattctcaaagtaatttctcattcatcaacttttgtctgacttagatttaagctactgcttaggaaatgtgagaaatggagaatttggttgtcatagcgctcctacttagagggctaatgctttcctaaattttactaaagttggatcctaagttatataagttacctaaatttaattagcaagttttgcttactaattcactgactaaccactataaaacaaggacctaagtttaaagctgatattatgacaatgtactgaaatttcaagacattactttttctggacacgtaggatggaccttgcataagataaaagagcttatttttaggcacacctatgtgccaggcatgggttcagagccttacatatatcatttcattctcaagagaaccttaattttagagacgaataattttgagttttagaataaataattgtcttaagctcacacatgaagtatgtgccagagtctatatcgtgaccccagttatgaattcttttccactacatagcctgcctccatggcatttcacataggatttcttatgctcaaggattatgttcttccttccagatctatagacatcagtagaaacaacacaaatacgtataatgactttttaaagtctcatatacaagaccaaagtactttaaaaagatgtttaaatttttgaaggtgatatctttatgttcgagatcagtagcagaaatggattgtaattcattacaagatgcttagcaaagccaagtggtaaaggattttctgatgtgcttgaggagtcctgacttgctccttagcaaattcctacacaccattcagcattcagtgcaaataccacctcttggaatccttctctgttcttgatcaattattccattgtctggattcatagaactctctgtttacctatttatcttacaggttattatcatgagtttatatgtcttacatagctgtttgcaacatgttaccattcagtggagtactttttcctacagggaagaggctgtactatataccttttgtcacccctaagtggaatgcagtatggtttcatgttagatgttcaatacatgttaatattttattgatgagcccttaaatgtatataataagcttctcactcaaaagctgtaatattctagaatgaataagtttcttgagaaactctttggttaacagaatctccatttccatcatagtgtattcaataaattattaatgcagggtaaatttccttatatttcctttcatttcgctatactaaggtcaaatcatgacttttaggtgtggatacagcaatatataaaataatctaagacctggatatatgtttttctaattagggaattggagatacatgaacagtctctcatagagaaaaatatatccattagtcactaaagtcagtataacattctggtgaaaggtttgcttgcttgcttgtctgcttacttgcttgtttcaccttctattctaggaggatgtttgtcacaattatgaaattctaacgctttaaaaatctgtttaccctatgaaagttgcaaattcttgcctgtaaggcaattttcacaagaattattttcatattagttttagtttatccgtggatagtctcaaattcctcttgaaaatatcagtgttctcaagggaaaactgcccattacaagccacagatgtggttttttgagagatttctgcctgaaatacaagttttaaaatattctttgtagtttcctagtatggctagatacttgtaggaaatgacaatttagatgcacatttgaaaattcttagcctttgagtaatttatatgtttgaataaatttaaactatctttgttcataaaaaggcaaattttgtctgtttgtcttgaaatgcttttttagtttcttcttcagttctttcacttgtctttctgtaatattcaaaattatagcatagtacttgaaaaccaaggatggtccagtctgtgtcctttgttttgaaggaattttggaatcatcagagatataattctggaatttctttgggtaccttccataaaatagtagcatcctgataaggacgtagatgctaacttttatttttatctcattttctttcccctatctctcagtaatgtaggagtgacccaaggtagctgtttattgggccctcaccaaagtcaatcaatattagtcagctacaaccacaataatgctgtgtgacaagcataccccaaaagaacaataagcacttatcctcatattcacaggcctactttgagtaatctctgattcagaatctgactgtaggttgaccaaacatgtctgatctatgtgtctcattctggggctcaagctggaatggcagtagatatttggggcacattcctccatggctgagttctaaagatctcagaagggtaagcagaaacacatgatggttcttaagacccagatttataactagcgttctctcttccatccatagtcaattgtcaaagcaagtcacgtggcatatccaaagatcagggatagagaaatacacttggcagttagtgaacccatttcaagagtgtgggtgtataacactactacaaaacagaactgagacttgcaacttgaaataccacaccattctagtagaattttattacagtattaattaaacatttttgataaaacacagacaactctgttagaaagcccaacttacaatttgttgatcccacttggaaaggtattctgaatccattttttcacaagttttctttctaattcaatgtgttggggtacttttattttacccagaaaagtaatattataaagcataaagttaatgccccctgtaaaaatagaatactgaaacaaactttaagtcacaattttattatttactgacttgagaatctccttgtgcttcagcacacttggtagttggatttccaaatagcatcatgactttccatacccagctgtctgctgctcaaaactaccataagctgactatcacagctcacaggatacccttgaagaagaccatctggtttatgtctcttggcaaaatttgtttaaaaacaagcagctgcatgacaaagtaagaaagagtctctgtctagctgtggtaaataagtagctttgcaatactcataataaagcatttttctaatccaagccaacatcttcaaaaggaaagcattattttcttacaactgaaagaaaaatctacagaattcagtgatgagggaaggactccattaaatttgtttcagcagcttgagatagtgagaaaaacaaaacaaaataaaaacctgtttgtgattagatacagtcttgtaataactagttttaaaagtatttatttagaatctaatacttggatattattttaattctttatattaagagatttacatttcataaaagcttgtcctttgaaccctaatactcatattgtgatggtgagccggaatgagtaaggtcacttactatatagtcggtatataataattcgttgaataactctctctcctcctgttactggcagtgaatccatacgggtcttcagcaaccttaattcatgcctcctcagaagaaagaattcgaccaaggaggcataaggcagaagaagagactgaggcaagtgttagagcaggaatgaaagtttatttaaaaactttagagcagaaatgaaaggaaataaagtacatctggaagggggccaagtgggcgacttgagatattaagtgtcctgtttgaactttgatttatggttttgtattttggcatacttccatggtcttatataccttctccccaattcttcccttggggtagggggctatctgcatgcacagtggtctgctgacacttgggaggggagcatgcacggtgtatttactggagttgtattcaagaggtgttcccttaccagtcaagtgtttccagaggaaggtcgtataccagttacactatgacattttgcctcttagtgcgcacgcgggagcccatttgcccaactcctgcgatcttatcgggaagctgctgatcaccaatttcaggtgtttttatctattgggagactgcctttccctggtattggctgtgaccaattattattttaaagacacagtttaataaccacctgactgaccatcacttgatggttgcctgacattcctggttggggtggcgggggtggggggtctcctaccctgctcatatctgactagctatctactgtaacactactattaggtatgtctgtatcccattacactcactctctattacaaaaaagagtaccttattcatttttcaaaagaatgagtgaattttctgctccagttaagtgcttttccttacctctatgtagagtgtcaaactagccatgcttaaggattgattctggtattaataatataaattcttgcattatgagtgtctcagtttgggttcttacataagcaaatcctgagacaaggatgtgagttcaaatagtttctttgggcagtgattctaggaagctgtggtaggatgttggagttgtgagaaagttaagagaaagcaacctgtaaagagtatgttatcaagccaaacaccactgtgagaactagggcttaattccctggagaaagtctgggaaggcataaaacacttgtctcagagttatcttagacaaggtgcaggagctgaggtgtttatatttcaactcttgttagtcacttttaaagggccgctcagggtgtcagggtattaatttcctcttgcaactacttccaacctgtttttgcatgtggttgtagctactttttctgcgtcaaagatagactttaggctaagacatgcagtttccggctgtaggacatcaaccagagtaccctggagtgtccaggcccaagataatgggtgagctccacctggatctgtggcaatgtgagggaggggcattattaccctagcaagggccactgcacttccctatccagctggtcactcttctgcgtatttgtgttacttttctgactcctgcattcctctggatcctgattcaccatcagcttttgtattctgaggcttgtgtggctgtgtctttctatttcttccttattgacttacttgtttaatcttttgctaatgtatacctttgatattcctatgtactcacctttggttagctctgtgaattattgagtcttgctttacagctttaaaaagatcatagccatggtttgttttttaagtgtgattcataacagttagtgacaaaattagaagtggaaattaaaggtcacgtgcacaatcctacacaagccaatttcttgaacgacataaaatacttgaatttgtcttttactatcaccaatatagaaataatttgggggtatttctcaaagtattgatttaacaaaactttatttttgtgtgaagattttttcaagtctcctggaaattattcaaattattgtctttaaagtcaaaggaaaggttaatattagggttacttttctttggtcacagaattgctggaggcttctatgacttgctttgaagcagctgactttatgcacagttttggttagaaattcactaccaattccaacattttcaaagtcctaaaagaccaaaagtacaattcttgaaatatccctagagaaagcaagaataaattagttttcactagaaatgaagacaaatttttctcattagttcattttgcctcatgatcagaattctttgccacatgaaaatattttggttaataggttgtaacataaagagtaatatgaatagagatctagcccaattagatgacagaaaaagagcaaagcttttgaaatgtataaagaagaaagtttaagagagacatgaacaaggctggatgtagtttaaggttgaagaacacagaaaaatgagataagtgaagttaagtgaaaatccttcccttactgagaagaaagagaactcaaaattatgtgaaggtttttgttttactttgttttgcttcttaataaggaaacaacagtggcaaatctggggcattaggaatggtggaacttctataacagtgatgtttcaaaggtcacaaaggaaattaaattgtagattgggtttaaaagcactggaattacttccagccccattttttcaggattttgtatgtagcaggaaatagatcaccgcatagctaaaggggagaatttaggttttaactggtctcagtgcaaactgcttcatagttcctttgcatttggtggtgtatgtaaaacatgaaaggtataaacatttattatcataactttattattatacaactatttattggctgcataggaccatgtgtcttcttgcaggtataatcaaaaataaaaagacagaaatgtatcttatatgaaggctgccattatcgctcttatcaatggccataaaatcagatttcttacatgtacaacatatgaaaatatattaaatatgaaacgttttccattaaataattctgtaaatgattttcataacatttctgtccatgatgtgtaaatctgtagatcaaatactgcaagtgtacagaacttaaaatgctttggtcaaaaaaattctcttattaatatgacaatggcgttcaaaagtaaaaaggtaaaaatacagtttagcattaataagtaaactcagaaagtaaaatatattgatcatacagtctgtattagtctgttctcatgctgctctaaagaactgcccaagactgaataatttataaaggacagaggtttaattgactcacagttccacatggctggggaggcctcagggaaaacttacaaccatgccagaaggggaagcaatcacatccttcttcatatggtggcagaaaggagaagtgctgagcaaagggggaaaagccccttataaaaccattggatctcatgagaactcactatcacaagaacagcaccatggggataaccgcccctgtaattcaattacctccaactgggtccctcacatgacacatggggattacaggaactacaattcagaatgagatttgggtggggacatagccaaaccatatcatttcatccctggcccctcccaaatggcacgtcttcacatttcaaaacacaataatgccttcccaacagtcactcaaagtcttaactcactctagcattaacccaggagtccaagtccaaagtctcatctgagacaaggcaagtcacttctgcctaggagccataaaatcaaaagcaagttagttactttctaggtacaatggaggtaccagcattggttaaatacacccattccagatgggagaaattggcccaaacaaaggggctccaggctccatgcatgtcaaatccaatgaggcagtaattaaatcttaaagctccaagataatctcctttgactctgtgtctcacatccaggtcacgctgatgcaaggtgggctcccacagccttgggtagctccactcctttggcgttgcagggtacagcccccttcctggctgctttcacaggctagcattgagtgtctgtggctgttccatgcacacggtggatcaagccctcttctcacagctctactaggcagtgccccagtggggactctatgtgggggctccaaccccacatttctcttctgcactgacctagtagaggttctctctgagggccccatctctgcagcaaacttctgcctggatatctagacatttccatatatcctctgaaatctaggtagaagttcccaaagctcagttcttgacttctgtgtacccacaggctcaacaccacatggaagctgccaaatcttggggcttgcaccctctgtagccatgggctgagctctatcttggctccttttagccatggctggagtggctgggatgcagggcacctagtccctaggctgcacatagcaggggggctctgggcccggcccaggaaaccattttgccttcctaggcctctggtcctatgatgggaggggctgccatgaaaacttctggcatttcctggagacaattttcccattgccttggtgattaacatttggctcctcgttacatatgcaaatttctgtagtcagattgaatttctcctcagaaaatgagtttttcttttctattgcatcttcaggctgcaaattttctgaacttttatgctctgcttcccttttaaacataatttccaattccaaaccatatctttgtggatacataaaactgaatgcttttaacagcacccaagtcaaatcttgaacactttgctgtttagaaattccttccaccagatgccctaaatcatctctctcatgttcaaaattccacagatctctcggacaggggcaaaaagccaccagtctctttgctaaagcgtagcaaaagtgacctttactacagttaccaagaagtttctcatctccctctgagaccacctcagtctggactttattgtccatatcactatcagcatttgggtcaaagccattcaacaagtctctaggaagttccaaactttcccacatcttcctgtcttctgacccctccaattctctaggaagttccagagtttcccatactttcctgtcttcttctgagtcctcccaactgtttcaacctctgcctgttacccagttccaaagttgcttccacatttttgggtttctttatagcagtatcccactctctgtggtaccaatttactgtattagtctgttctcatgctgctataaagaactacctgagactgggtaatttataaaggaacgaggtttaattgactcactggtttgcatggctggggaggcctcaggaaacttacaatcactgtggaagcagaagcaaacacatcctttgtcacatgatggcaagaaggagaagtgccgagcaaaggaggaaaagccccttatgaaaccatcagctctcatgagagctcactatcataagaacagcagcacgggagtgaccaccccccatgattcagttacctcccactggatccctcccatgacatctggggattatgggaactgcaattcaagacgggatttgggtggggacacagccaaaccctatcactgcctttaagatctatgaattgtttttctacattgaagaaatttgtagacatttgttttttattctctttttggtttgctgagagcagtagtctcttggaagtgagtttcatttacattttttcctttgggtgtcaaatatataaaatattttttaaaatcaatggctgagggataaatgagggttggtagaaagggaaaggataagggttgtagttaacggaccatgttttaatgtgtctataattagatggaagttgtctcttaccattcaacatcctggatggccttcctatagaggacattttcatcttcttttgtcgtccagagctagcatatgtgtttcatgtctttagatagtgaaaatcaattcagattttcatggaaaatgctctctcttcatcctaaagacagaattgtcacggctatttcgtttattgaaaagtgaaacctgctacagttagcatatagttaattccatatatgttacctgtatcatttaatacattcacaaagtaaaaaaccaaattttgccaagttcttgatagtaacaatagtaaaatggaatttctgttggcatattttcatgttattctgaaatgctgaatggatttattaagattgataacaatatgttgtacctttatgttctaaaatttaataacagttattcttccaaacatgccagcgtcctcaatagttgacagtctgcaaaatattctattatgcaatcagccatatctccttcttgagctttctttaagtacttgtatcctgtatttttccctgaaatctagcagtaagttgaagaaatgataaacaaaattgtatcattgtatataatggctatttataaatactgatgtacattttcataatgttatttaaatgattacttcagatatgtatttctgttttctacattttaacttctcaacatattaggttgttatcttagattggattttctaagacatagactctaagacagagatttccatgcagatggtttcttagtgagtgcttttaagaaaaatgcctgggagggagtaaaggcagcaggattgaggagagagaggagttgaatgatgatgcagtgaaatggaagatcttatctggtcccatgtggggttgggatgaccatttagagtattaccgtatgaagcaaggaaggtggaccattgtatccctaatccattagtcattagatgtgagcctcccaactaccagcttccgggcaatatcatcttggtcaaagaagtgcctgtctgctgagagaaatttcttggaagagcttaggtatgatctgttagtagataacaatcccagcaactgggagaatgaatgcttcatttgtaattggtgaatctcggtggcacaccacagtgttcgctacggtaatctttatacttattgagacatatattgtttttaagtaaaacttgtatacctagtaatgcatttaggtagtgtattggccaagctagtcctttttggaaacaatttcattgtggtataaatgatatacaataagctacacatttaaatagtacaatttgataagttttgacatatgcaaataccagtgaaactattagcacagtcaagataataaacatatccaatatcctcacaagtctgttttcggtaatcactctctcctgcccctcccttgattcccaggttaccactgatgctgactggcattatagataagtttgcgttttatagaattttataaaagtagaatcatgaagtatgtaccttatttctggtctgccttctttcactcacaaactactaactttcattttgtgaataatatgatctccgtgtgattacacacattaagaaagtcaataaaaacattgtaatttgattccgatactagtttatgggtctacattatgtatttaaagatactatcatgtttggattagcccttaggtatcaagtaaccctggagttgaggcagttactgttttatttgctatcaatctttttataagctcaccttccactaattacccaaaaatatttgatttaatacctgagtacagaaaaagaacatattcacaatgtttaaattttataatttaatattataatttacaacagtttaaaataactagtcctgaaattgagtatttctcacctaatattctgctctatttattacccactccacgaaaaaatttcccagaaaaatcacaaacatgtctcttgagtgtattattacccaacccacagaagaatttccaaaaacagtcgcaaacattctctcttgagtgcaaccattttctcgggccagccattcattgaaacaaaatagcctgtataacttctgtgggtagacatttgtaggttgttcttttgaggcattagtgctattgcatttaagataaagaaataacgaattcacaaattttataaagttctcttaaatttaccaagtcaatagcaccaccactttgattcctataacctgtgacttagttaggcttctcaattccaagaacataccaccattatttcttataatgtcctcagattaaaacatgtgttgtcctttctttatacctccctgcactttaattgaatattttgccatttactggattctgtacactttttatgttttcatgccctcccttttcattctcctggacatcaatcgcaagtcagtagataccttgtaagagatctctctccacccaaatcactgtttcttttgaaagagttaacctttctgaagcagcactcctgcttcacatttcccagcacaggaaccttcagtgtttctctgttgatagctttgatttcaaacgggtagccccaggagaaaagagagctgaaggatatgttttgcttggctgctttgtttgacctgcaaggaacattaaaaggcaatgaaaccgggcagagactggactgatcaacaccatcagtttagcacttattgctatactttctaaggctttacaattttatgtgtcccacgtgtcccctgaaggcatttgattttctaacctcctaggccagaggctaacatccagaattcatagtctggcacttataaaccctaacttagcttctgtcacttgtatctctatgcaactctacagcaaaatgtacttattttctctaaaatacccttattccatacttctttggagtgtaattttatatataaaagtcctcaccacctgtaaacattaggaagctttgattcgaagaagcagaagccatctccatttaactgaagtgaaatgaaacttactggagggataatgtatagttcttggaaatgaaggaaaagaaggcaactgtggcagagggagggcagcactgagagtcaggaactccagggaagttactttttggatgctgtcattaaaatgcttcagcttcaaattgtactgactctacctttctcaattctagattcaaatttctaaatgtaattggcataaattaggaacttgtcccaccagtttatagagtttacagagcactatgattataggtccccctaagatcatgcagaatgagggaagagtaatttcatccaaggaaaagcagggtaccattcaccaaagagtggagatacttattcagaacaattaatgttagatgccacaaaaaaactaaccctgaaatcaaagtggcctaatgaatgcttatttattgctcatataaagtctgatataaatcaggtagcattccttcacagtgactcagggacctaaattgctttcatcttgtggctctgccatgtcaacattgaaacttcagaggtattgacaaaggagagctgagaaattgacactaactatcaagtacctcaggcaagaagtgatgcatcacttcctacactttcccactttccaggattcaatcacaattgcactcacgaaacctcaagggaacatgagaaacataatgaaatcaataccaagatatccaaagagtactaattttcttcaccacagaagggatattggacagacaaaaaattttgggacagaggaatatccactaaatgatccttccatgccctgctcagatgctacattttccattaaggctctcttgaccaacccataaggagatgatctccaactcctctgaacatctggaacattgcattctacttatttttactgtctcctattgtaataattgttggctattccttattagacaaattataagcttttatgggacggtgatcaaaagtcctaatttatcttgtcttcctacagcattcaaagcattgtagaccttcaatacatagcagtcttcgaagccagagtattagtattttttctaaaactgtattcatcgcaacgaactcgatggatgttcaataaaaatgtattgaatagtcattcatgcagatagcaaatttcttaaaacatttcttactcaatgtttacttatattcatcatgaatataaatttaatataataatatcaaatcccattacatttagtacaaagtaaatataccaataattttatatatgtttaagtgaatttttatatttcatattatttgtgaatgatacacatcgtcgtggaaaatttacaacgttgaagtaaattatacaatatagggtatttgtattaaaatacatttcatagaaggtgctttaaatttaaaaagttagcatgaatacatattaaatgtaaaagagtctttaaaatgaaaaatatttcacacttgtgggtttgatctaaaaatatcagtcgctatatgatatggctagacagatttgagtaggtataattttaatgaataatattgtgtgatattttagggtccaaaattgaatgtttctattaagtaacagatatttaaatgccaagcagaagctacactggcaaaacaagatttagtatgttatcttaagtgtatcctaaatcctctttcatcttatggagaagaaatacatgcttttagtttccagccactcctgtctatattcatttaaaataaactattatttatatcagatatgatgccatgtgagtccacaatttgtagtatagagaaataatttcattgaattattttggctgtttgtacctgagacctgattctgaatcatttatttttctatttaagttgtgctattttatgatcctacctatggctatgttcaaaacaatgacaaaatatattttaccctgatctttttttcattattatactttaagttctgggacacacgtgcagaacgggcaggtttgttgcataggtgtacacgttccatggtggtttgctgcacacatcaacccatcatctacattaggtatttctcctaatgctatccctcccctaaccccccatcccctgagaggccccggtgtgtgatgttccccgccctgtgtctatgtgttctcatcgttcaactcccacttatgggtgagaatatgtggtgtttggttttctgttcctgtgttagtttgctgagaatgatggtttccagcttcatccatgtccgtgcaaaggacatgaactcattcttttttatggctgcatagtattccatggtgtatatgtgccaattttctttatccagtctatcattgatgggcatttgggttggttccaagtctttgctattgtaaatagtgctgcaataaacatacgtgtgcatgtgtctttataggagaatgatttataatactttgggtatatatgcagtaatgggattgctgggtcaaatggtatttctggttctgtatccttgaggaatcgccacactgtcttccacaatggttgaactagtttacagtcccaccaacagtgtaaaagcgttcctttttctccacatcctctccagcatctgttgttgcctgacttttgaatgttcgccattctaactggtgtgagatggtatctcattgtggttttgatttgcattcctctaatgaccagtgataatgagctttttttgatatgtttgctggctgcataaatgtcttgttttgagaagtgtctgttcatatccttagcccactttctgatgggtttttttttttcttgtaaatttgtttaagttccttatagattccgggtattagccctttgtcagatgtatagattgcaaaaattttctcccaatctgtagtttgcctgttcactctcatgatagtttcttttgcagtgtagaagctctttagtttcattagatcccatttgtcaattttggcttttgttgctgttgcttttggtgttttagtcatgcagtctttccccgtacttgtgtcctgaatggtattgcctaggttttcttctagggttttgatggttttcggttttaggtttaagtctttaatgcatcttgagttgatttttgtataaggggtaaggaaggggtccagtttccgttttctgcatatgactagccagttttcccaacaccatttattaaatagggaatcctttccccgttgcttgtttttgtcaggtttgtcaaagatcagatggttgtagatgtgtggcattatttttctggcctctgttctgttccattggtctatatatctgttttgctaccagtaccagtctgttttgcttactgtagccttgtagtatagtttgaagtcaggtagcatgatgcctccagctttgttcattttacttaggattgtcttggctatacaagctcttttttggttccatctgaaatgtaaagtaatttttcctaattctgtaaagaaagtcagtggtagcctgttggggatagcattgaatctgtaaattaatttggacagtatggccattttcactccactgattcttcctaaccacgagcatgaaatgttttttccatttgtttgcgtcctttcgtattttcttgaacagtggtttgtagttctccttgaagaggtccttcacatcccttgtaagttgtattcctaggcactttattctctttgtagcaattgtgaataggagttcacccacgatttggctctctgtttgtctattcttggtgtataggaatgcttgtgatcttttcactttgattttgtattctgagacttggctgaagttgctcgtaatgttaggggcagccagagagaaaggctgggttacccacaaagggaagcccatcagactaacagtggatcactctgcagaaaccctacaagctagaagagagtgggtgccaatattcaacactcttcaataagggaattttcaacccagaatttcatatccagccaaactaagtttcataagcaaaggagaaataaaatcctttacagacaagcaaatgctgagtgattttgtcaccaccaggcctggcttacaagagctcctgaaggaatcactaaacatggaaaggaaaaaccggtaccagccactgagagaaacataccaaattgtaaagaccatcgaccctatgaagaaactgcctcaactaacaggcaaaataactaaccaacatcataattacaggatcacattcacacatgacaatattaactttaaatgtaaatgggctaaatgccccaattaaaagacacagactggcaaattggataaagagtcaggaccatcagtgtggtgtattcaggagacccatctcacatgcaaacacacacataggctcaaagcaaagggatggcggaatattttccaagcaaatggaaagcaaaaaaataaaaaattaaaaaaaataaaaaaaaaaacaggggttacaatcctagtctctgataaaacagactttaaaccaacaaagatcaagaaagacaaagaagggtattacattacataatggtaaagggagcaacgcaacaagaagaactaactattctaaatatatatgcacccaatacaggagcacccagattcgtaaagcaagttcctagagacctacaaagagacttacactcctacacagtaatagtgagagacttttatactccactgtcaatattagattaacgagacagaaaattaccctgatctttaacattccaggcaagtatgttttcagtcatacatagtacgtgaatctgttatattttaaatccaagcttttggaggacaaatgatttcacagttatacaactcagcctctcccagactcaagtctctcacttgatgcagtattcccaccccatcttcaataaaagaagaaagcatgaaacatcgcattgatatagggaaagtatatctgagttttctatatagcatataaagaagtaaaataactctgtgatttgtgatgagatagatttagctgcaacaatgaggtctggatattaatattggattaacttcctttgagattgcaacttccatgtggcattcagcactttccttgttttctcatatgtaggccgagaataaaattatcctgtttctatttcccaacatgaaaggtcttttaactgtttgaagacatatgtttcatgtgaaaccaaggaattgctactgcaattttgtaagacagaagttagcaaacttattctgtaaggaacaagatagtaaatattataggctttgcgggccatatggtctatctcacaactattaaactctgccatttttttttttttttgcaaaagcaaccatagacaatatgtaaatgaatgagtgtgattatattccaataaaactttatttttaaactacaagactagttcttaaaataaaatttaacaaagaactattatatgatccaataattccacttctgggtatatacccaaaataattgaaaacaggtattcacacagatatttgtacacccaagttcatagcagcatattttactgtagagaaaaggtagaaacaaatgtacactgtgtacactgaccaagaatggagaaacaaaacgtggtgtatccatacagcagaacagtattctgctttaaaaaggaatgaaattctgtcacatcctaaaatagggatgaactttggagatattccacctagagtagttaaattcttagacaaatagttgcatggttgccagggaccagggaggggtaggggaaatgagcagttcttgtgtcattggtatagagtttcagtttagaaagatgaagagttttggagatagatggtggtgatgtttacatatccatgtgaatgtatctaatgccactgaactgtatacacttacaatggttgaaatattttgtatattttcccacagttaaaaaagacaagcccatgtgcccaaattgctgatataaatctgtattcctattagtgagcagtaatgagccatgtttagtgcagctgatatggttaagatggaacaattgcatgtaatgcaatggtgggtaacatctaataaaaattggtactcaccaatttccatttccattgtggatataaacacccttcacattatgaatcatgttatttgttatttgtgtacttacttattaaatcacttttctccatctctctcacctctatgactctgtacatgtacaaacaacatacacactgtgaacttctttagaatgacagttacattttcgttacttgattcattgtttggccaagtagatacccagtaagcataactagcaagtgaataatgtatatgtgatcattttccttttcaaaaaccacttcttatctctaccacaccaccacacattattatatgctacacttcttatataaaacaaaaaagaataggccaggtgtggtggctctcgcctgtaatcccagcaatttgagaggccgaggtgggcagatcacttgaggccaggagttagagtccagcccagccaacatggtgaaaccccatctctgctaaaaatacaaaaattggccaggcgtgttggcgcatgcttgtaatcccagctacttgggaggctgaggcaggagaatcactggaacccaggaggcggaggttgcagtgagctaagatcatgccactgccctccagcctgggcaacagagcaagactctgtctcaaaaacaaacaaagaataaataagctttaataaactcttttgcagaagagttttcatttttaaacatagaggaaaaagaagatgaggatgaacgatagtgatgcccagaagagaaaattgtgtaagacaaaatcaattgaccaggcgtggtggctcacgcctgtaatcgcagcactttgggaggctgagacgggcagattatgaggtcaggagttcgaaaacagcctagccaatatggtgaaaccctgtctctactaaaaatacaaaaattagccgggcttggtggtgcacgcctatagtcccagctacttgggaggctgaggcagaagaatctcctgaacccagcaggcggaggttgcagtgagccaagatcacgccactgcactccagcctgggtgacagagcgagactacatctcaaaaaaaaaaaaaaaagattaaatcaattttagattgatatagagataaataattccctaagtacaattaaagcaaggatcagaccctgatgagtaaggatgatctaacaaagggctgacaatataaagtgaatgcgattgtcaccaaataaacatctcccaagagctttgggacaatcttcagctaagcatattctgcactttacatcgttctgccatatgccctatgtagcttttcatcctccagaaatttgaatagcacacagtattttttggcaccgagtaattgtggaacttaaacttcctacaaagagagaagctgtttcagtcagctaagtgaccagttagtaagcaacttctattctcttagtgtcgatagggttaaagacagtcataagctccccaaacccttggccgcctcaattttttcatttaaatacttatcttcttatcttcatctattttttagagtcacacataaactctgtctatgaggttcttaaagacctggacaatatatttaatctctgtatccttaaatctcaccatgatatctcaaagatggtagataaaactgttttccctcacttctctgactccataccaatacttaatcgatcgggaaagttttataaaccatttaccgttgaatataaatatatatacacacacaaacatatatatatttatatatatttatgtatatatatatttatatatctatatatatttatgtatatatttatatatatttatatatatttttatatatttatatatttatatatatttatatatttatatatatttatatatatttatatacttatatatatttatatatatatttatatatatttatatatatttatatatatttatatatttatatatatttatatatatatttatatatttatatatatttatatatttatatatatttatatatatatttatatatttatatatatatatttatatatttgtatttatatatatttatatatacacatatttatatatttatttatatatgtttatatatatatatatatggcactatatatcagtgagcaaaggcatcataatctttatttttatttctgtattcatttattcaacatatagtaattctgatcctgtctcaaaaactctacagaaattaacaaagaacacattgtttctgcctttttggagctgaatgtttagtgggggaaaatgtattttaaggcaataatcatatacatgagtgtatatttacaagccgcagtaggtgctatgaatgaaaagtataaggagctatgagatattctaacaaaaagaaatgctgcagtctagagactgagagtaattatctgtgaggaaaagtattgaagcagagacctgcaactcagtaaagagtgtagggagtcacatgaacaaagtcttgagatgttggtagagatcttggaatgttcgaaattctaaaagaaagcccttgtgtatggggtatggtgagagagggagagcgtggcaagttttacgttgtacaagtcattgtaggccacaaaaataagtatagattttatctaagtgcaacggaaaaccattacaagtttattttttgattcttaaattttgttttacttatttatttatttcaagacacaatctcactctgttgcccaggctggagtgcagtgacatgatcacggctcactgcagccttgaactccttgggctcaagcaatcctcccatatcaccctcctacctcagcttcctgggtagctgggactactacaggcatttgccactatgcctggctaactttaaacaattattttgaagagacagggtcttgttacgtttctaagtttctaaggctgatcttggattactgggcccaagcaatcctcccgcctcatcctcttaaaatggtgggattacagatatgagccacctcacccagcaaggtagtgacataatcattgtttttgctgaaaacaatgtactttagggaacctccctgaaaacagaatggccacttagaataccaaagcatagaccaagccttgagatggcaatggaagtggaaataaacatgtctttgatacttatgttaatggagctattagtagcaacttttgacagatttgaaagtggagttgaaagacagtgaagtgtcagggatgatccctgagcatattagataatattgagctggagaacagaaaagaaggggcagatttggaggtggagacctttctagatttatattcaatttgagatacatctgaaacatctacatgaaacgtggatgaaatatctgtgaccaagatacatacgtgggatacctaggcatgtaaataatatttaaagttatgtgagtgggtgcaataacctaaagagagactgtaggtagaagattgatcaggacaaatctttgaggaacttttttttttaattattattatactttacgttctgggatacaggtgcagaacgtgcaggtttgttacataggtatacacgtgctatggtggtttgctgcacccatcaacccgtcatctacattaggtatttctcctaatgctatccctaccctagccccccacccccaacaggcaccagtgtgtgttgttcccctccctgtgtccatgtgttctcactgttccactcccacttacgagtgagtccatgcagtgtttcattttctgttcctgtgttagtttgctaagaatgatggtttccagcttcatccatgtccctgcaaaggacatgaagtcatcctgttttatgaggtacttttaatgcatttagtgactgggtaaggaataaccctgaaaaggagcacaaaaaccatcgaggtatgaagaaagccaggagatgtagtttcacaaagcagccagtggacagtaatggacaccagcataagcttaagacagcagtgatagtgttcatcagtgctgaaaactcattggaagtggctgaccatatgttgattgcgaatgcaatgccttctcccatctcctattgcttttcactgtttccgtcatgtccagagtgaaaacactggggaggcagaactgtgtaccaagaaaaatgttttgtgtcagaggaaacaagagctcattaatttccttttgacccgcatggataggaatacgataagcaggagaaaaataaaacctgctaaactaggcaaataaagcttaatagaaaagagagaaaatattgcttacaaagggaagaagacatttgccacaatattagctaaaaagagagtgaggaaaatccacatttaccatttttattatgtgtttccaaagtcgacattaagtgaatattatcactttgaagacagagaatagattgtaagcagaagaggaagtgggattttttaaatggcatatatttaaatgttgaaaaacccatttccaatactcccactgagatatatgcaataaaaacactccgcaatcagtaatatacatgtgaagctcctaaaaatcctccattgagaagattctataaaactataaagtattattatttctgctatcagaaaataaacacatactttctaagaacaagatgaagaccttaattcatcttcccaggaatatacttgtgtacttaatggttcaaggcgtttgtgatgcaaaaaaagtgggacattatgtacaaaatagttttaatcagaaaatgaaggaagtttggtatggtatggttctagggttgcaagttttcctgcaaaaagggagtacttatggctaggtgatgcagccaaggaagcatctctgaggacaggttatcctggctcctattccaaaatatttaggtctccttgagtgttcgatccttgaaccaaggacaagaatagaaagaaataaaagccacttgtataaaggttgccttcattttgtgtcgaatattgacaggagaaagccagatttgtagcttttccagggataagtgagtctcagacacagttaagagcttggctttggaattagattgacctgagtttgaatcgtggctccatcaatctctgattgtgtgaatttttggcaagttttagctgaacctcaattttctcataagtaaaataggcataatacagctatgattctgacccttgccattagcactctgagctacttgtcagtgtatcctggtctcttcctcaagcacttttccactttgttatttcaagattctttgaaattatgaacagtagctcttgatcaccaaacaaatgggagaccatagattcaaaggaacattttagtaggatatttgataagctttgtatttttttgtgctttgaaaattagagtagatttagatttaaggaactataaagctatatgtttacaaaactttattcagttgggcagttctgactcagtaactgaaataaaattgatgaaaacaaaacatatgttttactgttgtgttcacatttaaagattatttaatgcataaccaaaataggttcagcaaatgtttatacatacatgtacttagatatttgtaattcttatggtagagcatgggaatgaatgagaattctcctaggctggaataaaactaatgtctaactaagaattggcctttcacttcacgaatatatatcattatatataaaagattcatcctttgttaacttatttgtttagcttagtactttctaagtacttttctatcctgtcttggtccctatataagaatgatactattataaaaatgaacatcctattatttcataatgattagcatatcagcatatttaagagcaatgcctatatctttaccttcattattattttcatgtttaaaatcctgataattctagaaaaacaaggttgtaattatccattcataataaaagtcacaccaagttattcttgataattaacttggcatagtggagtgcactgagcaattaataattaattacgtggttactagctcaaattttattgagaaccaaggagttaaaattaatagtattgtgtttgcaatgagttaattactttgtttctttgtttttttttttggaatagtgccataattagtatcctaatagaaacagaatataaagtgggtttctgagtgcttgcttgtcgaggtgtgtaacaacatatattttaattataatttgagtcactaattgttgtcaaatacaattttaatttcttagttcagagattaaaagatatgtaaacagctccaaaaaagaatatgataagatggtttatacaagtaaataaataactatatgacttcagaagttttatttaacaacagttgtataagtgttttaactaatgttaacaatgccttttttgtaaatctcctctaccacaaatatgagataaatttaagaacggcattttcattaaatattgattattaaaattcatatataagtattggctgtacctgagcatttacagtgaaaccatgaaggactggcaggtttggggctgtttgataatatccttccttaatctttcttcgtagcatcattgtttaattttggctgaccacaatcacttatgaaaagaaacagctcaaataattagtataacctctttctcttcataaaaccttcaaatcaatgtggtcataattatgaaagtgtaagattataaaatcttctcatttaaatatacatcttcatattagcagacttggctaatttcttcatttatccttgacatccacacttaaactctgtcaaactggtcattcatagactcattattcattcaacaaagattagtgtgaccctactatgattctgagggctagaaatataaaactgaataacatataaaccctgatttctgtatttatatatacagaaaggaattatgaactcacagttttaatgcacagtgacgagtcctcagttcatgtctgccttgggagctaggcatataccaaagcaggactgtctaacacagtttgggggtctcagtctggaaggatccgggtgagatgatccttgaattgagttctaaaaaatgaggagaaattatccagataatggaaagtttaggagaaattaaccagataatggaaagtttaggaaagaaacactatttatatgtcaaggacaaagtttgaccaaatgtgtctctgaatctaactggctttatgtaagataaaattaaaaaataattgtcactaaggtttttcacatctgcagcaactaccatcatatctggctcaatatttaaaagaaatacttaacgatttttggcatttattgctactataatagattgtgctatttaaagagaaattctagatacatgccaaagtattttcaggtgaagtaatgtgattcgtgggttttgttttgacaaacttccaaggaaattatttttaatataaagagcaatggaggaagattaaacaagattcgcaaatgttgataattgctcaaggtggtgacaggtgcatgggggtccataatatactgttctctttacttatatatgtctttgaagattttcatgatgtaaaattttaaaatcagaattacagtaatacctctttctttgacaatcgttttcaaacttggttcaacaactgaatttaaattacctacatggctataaaaataaattagatatcctggttatttggtctggggtgggtcctggccatatctgtagggtgtgtgggtgtgtgtgcatttagcttcacatttgactctgaagtacgtggaaaaccaattctgggctctacatatgcaattccaatgcctgacattaggtggtgctggttgtgagccatgatttcaggtttgacttgtagagttaacagaagtgatatcaccaccgatcccacagaaatacaaactaccgtcagagaatactacaaacacctctacacaaataaactagaaaatctagaagaaatggatacattcctcgacacatacactctcccaagactaaaccaggaagaagttgaatctctgaatagaccaataacaggagctgaaattgtggcaataatcaatagcttaccaaccaaaaagagtccaggaccagatggattcacagccgaattctaccagaggtacaaggaggaactggtaccattccttctgaaactattccaatcaatagaaaaagagggaatcctccctaactcattttatgaggccagcatcattctgataccaaagccgggcagagacacaaccaaaaaagagaattttagaccaatatccttgatgaacattgatgcaaaaatcctcaataaaatactggcataccgaatccagcagcacatcaaaaagcttatccaccatgatcaagtgggcttcatccttgggatgcaaggctggttcaatatacgcaaatcaataaatgtaatccagcatataaacagagccaaagacaaaaaccacatgattatctcaatagatgcagaaaaagcctttgacaaaattcaacaacccttcatgctaaaaactctcaataaattaggtattgatgggacatatctcaaaataataagagctatctatgacaaacccacagccaatatcatactgaatgggcaaaaactggaagcattccctttgaaaactggcacaagacagggatgccctctctcaccgctcctattcaacatagtgttggaagttctggccagggcaatcaggcaggagaaggaaataaaaggtattcagttaggaaaagaggaagtcaaattgtccctgtttgcagacgacatgattgtttatctagaaaaccccatcgtctcagcccaaaatctccttaagctgataagcaacttcagcaaagtctcaggatacaaaatcaatgtacagaaatcacaagcattcttatacaccaacaacagacaaacagagagccaaatcatgagtgaactcccattcacaattgcttcaaagagaataaaatacctaggaatccaacttacaagggatgtgaaggacctcttcaaggagaactacaaaccactgctcaaggaaataaaagaggatacaaacaaatggaagaacattccatgctcatgggtaggaagaatcaatatcgtgaaaatggccatactgcccaaggtgatttacagattcaatgccatccccatcaagctaccaatgcctttcttcacagaattggaaaaaactactttaaagttcatatggaaccaaaaaagagcccgcatcgccaagtcaatcctaagccaaaagaacaaagctggaggcatcacactagctgacttcaaactatactacaaggctacagtaaccaaaacagcatggtactggtaccaaaacagagatatagatcaatggaacagaacagagccctcagaaataacgccacatacctacaactatctgatctttgacaaacctgaggaaaacaagcaatggggaaaggattccctatttaataaatggtgctgggaagactggctagccatatgtagaaagctgaaactggatcccttccttacaccttatacaaaaatcaattcaagatggattaaagatttaaacattagacctaaaaccataaaaaccctagaagaaaacctaggcattaccattcaggacataggcatgggcaaggacttcatgtccaaaacaccaaaagcaatggcaacaaaagccaaaattgacaaatgggatctaattaaactaaagagcttctgcacagcaaaagaaactaccatcagagtgaacagggaacctacaacatgggagaaaattttcgcaacctactcatctgacaaagggctaatatccagaatctacaatgaactcaaacaaatttacaagaaaaaaacaaacaaccccatcaaaaagtgagcgaaggacatgaacagacacttctcaaaagaagacatttatgcagccaaaaaacacatgaaaaaatcctcaccatcactggccatcagagtaatgcaaatcaaaaccactatgagatatcatctcacaccagttagaatggcaatcattcaaaagtcaggaaacaacaggtgctggagaggatgtggagaaataggaacacttttacactgttggtgggactgtaaactagttcaaccattgtggaagtcagtgtggcgattcctcagggatctagaactagaaataccatttgacccagccatcccattactgggtatatacccaaaggactataaatcatgctgctataaagacacatgcacacgtatgtttattgcagcactattcacaataacaaagacttggaaccaacccaaatgtccaacaatgatagactggattaagaaaatgtggcacatatacaccatggaatactatgcagccagaaaaaatgatgagttcatgtcctttgtagggacatggatgaaactggaaaccgtcattctcagtaaactatcgcaagaacaaaaaaccaaacactgcatattctcactcataggtggggtgggaattgaacaatgagatcacatggacacaggaaggggaatatcacactctggggactgtggtggggtggggggaggggggagggatagcattgggagatatacctaatgctagatgacgagttagtgggtgcagcgcaccagcatggcacatgtatacatatgtaactaacctacacaatgtgcacatgtaccctaaaacttaaagtataataaaaaaaaaaaagttcgttcctcttgttagaattttcatacaaatgcaagactccttattttcaaagagaaaacaaaattttatataaactaatacctgagaagaataggaaaaattaatgatgtatgggataggtactgataagaacctcttcttttgtgtacattgtgataaactaatgtttaacttgagtcgatgtgctggaaatacttgttaaattttcaagaattttgagatctgttaaacacaaccattatcaaaaattaaattatggtaacttacattaaatgaaatatattgttcacaaatgtactagatgcacaaaagtcatcactacctaattcttttattatatttcactattatctacgggtttgttacctgtataatggaatgactgtataatggtgtagtgctaacttcatgtttggtgacattataatgatagcttaaaattaaacatactgggaatattcaaatatgtccttcctctcaggggatctgattgttagacatttaccagcatagcactgtcttaattaacatcatataattgtcttttatccttaagatgttgagccagtaaatatcacaggagagtttgttccttaggttttaatacttgctttaccagtttactgtagcatcatgtgaaaccagcttctagaccagctgtctttaattggtatgtacccaagctaatccttgtcaggctatcatcaacccaagcacttttgaagttatttttattattacgctacagaaagattttatggcctttttgctcttttctttaccctagccctaggatcatataatttcatctcctatttattcctatttatttccttatctaaaatcttacttaactagcttgcttgcctgcctgtctgcctgtctgcctgcttgcttggtttttctttttttctttcttttctttacttctgctttcctttcctttcttttgtttcttccttccttccttccttcttcctttcctttccttctgttccttttccttttccttttcctttgcgttcctttgctttccttgctttcttcgcttgctttcttttcagtaccacaaaaaaactaacaataacaaaaatattgctacaaaaattgtgacctcccaattctatcctcatttcacggacccataaaatgattatatatctatgccaatgcgttctaactacatgatattattattgatgataagagaatccaaccctcaagaaatgaagtattataatgttttagaacacacagaagcatttttaaccaaaatgttccatgtgattttatagggtgcatgttttaccttttcttatttggaaaagtagcaaaagtattaacaaataaaataagttacatactctttgtatataaatctttcgtgtacataataatgccatttcccttctagtgcttccattattgaaaaaaaatagacatatagcaacgtgctagacattgaagttaactgttaaaaagtcatcagagggtaatgttaaaggtggtatttcaggtaataaagcatatgcagaatgattctattggctttatttccaacatgagtgttattagtaccaaggacactgaagtttaaaggaggggagtgatgagactgatcattactttgtcttctgtaacaggacttaggtggcccagagtgatccttgttggttgattggttagttgaacttctatttttgttactaggcctgcagatctgtggaatctccagagtgctgtgtaatgttacataggccacacaccagacactgttccctgaaggactgaaggtggaattggaacaatatgtagacagttcttgttgcagttaccaaggaaatttggttaggattcaggcctccatgtcagaaaaggaagtctattttatgtgctagaaaaataaccctaatcatcttatcttgggtctctctggggagcatgatgatctacctggtcttgtaaactgtatagaaccggctgggttgagacacatatgtctcataacagagcttccacttaaggctataaaatagtggtccctctattgggtatatgccttatggaaaaatatacgttatgctggtacctattataaaaaccaatgcaaaatgattagagatttctaatccaagtgttatcctcatctgctcccaaaatacagcaatgaaaaaatagaaaataaaaaaggatatatttacagaactgtatttacagaaatatatgttgatgacaagataatcaaatacatatcaaatcatgatgtgtatttacagaaatatatttacagaaatgtaaagcagagaatggggcggaagtccctgacagacttgacactgaaccacaaaacaacagtggaagccaggaatttggatgctgcgggatagttgggattaaaattgcttcaagcaaggtgtggaactggagacaaactcagtattcaaaaccagaggctgggctgtggtgcttgcattcgtgaaagaaaacctggggaaaaagtgcttcttcaggctgtagcctgacgctatggcttgcctaaacttatgggcctatgtaggtgtaagaataaagacatagccttgctgctgggaactgtgttgcatctgttctcttgcttgatgaatggattgaaattatccccagtaacattgcagtgcaagaactttaaaccttaaaggggtggctggagaccacgggacgcgatgcacatgcaactactaaatgctagatgaggatacctgaggagagagaacaagacacaaacgtgaacatggacctccaatagaaatgacaatcgaaaacatacatttatcttctctctctcccaaattgttcaaagattacgctaagggaataaaaacaatacagtcataaaatgacaaataaaatggaagaagagacatctgcacagacatatcaagtcaatgagatgaaaattaggacaagtaagccaatttgtttttcaggatcccagaaaaacttgtggattgaagacgctaggtgttttagaaggccatatattcccgagaggggctggaaataaaggggttgttttgaatcccttaaaaggggcaattacatttcatgtccccagctcagggtagttaattagacactactcctctctcatcccagcagacgtgagtgagtggtttgctttctggtgaggctgaaacaacttttggcatttggacaacaggattagttgatggaagagagagccaccatactgaaaatacaggattaagttaaagtcaacatatttaatggtgagaccagcagtccctcttcaccttcttggctcttaagtttctatcctctgggcagtagattataaatttattctcctgagagcctacctgcaatacgaaaactatttttagtcaagttttattgctataacaaaataccatagactggatgccttataaacaacagacctttatttctcaccgttctggaggctgggaagttcaagatcaaggcactggcaggtttggtgtctggtgaaagctcatttcctgtcttctcactgtaacctcacaaggcagcaggtccaagggaactgtcttgggcctcttttgtaagggtactattctcattctggatggctttggccttatgacctaattaccttccaaaggccccacttcctaatgtcatcaccttgagggtgaggatttcaacgtataaattttgcaagaacacactcagatcatagtaacctacaattaatgatatgtaatgatccaccagtgaaatagccagatctgtgcctaatgaccatatattgaagcccaccaagtataagccctacatacgcacaaggaatttccaaaagcatttaatgcctcagttttaagagacaatcaaggatttccagatatttgaacatgtctcaaagatggaagacagaaaccaacataaaaacaaaaagcagaaatattgggaaaaaaacaatagccacataaatgaaacagaaatctctgcagaaagagagacaaggcatagaccttaagaaaactttttaaagatagctataaaattattatctcacagtgagactagtcactgtattcataagaaagaacaagagactatagaaggtggtatttccgagaaagataagggttatttaaattaatagtatagcaggttaagtttttaaattcttaattgtataaatttatgggttaccagtgtaattttgttatatgaatatattttatagtggtgaaggcagagcttttagtatatccaccactggaataacatacatggtatgcatagcagttttagagcaatgaaactactctgtgtgatactataatggtggatacctttcattatatatttgtccaaacccatagaagatacaacatcacaagcaaactctaatgtaaactatggacttcgagtgttaatgatatatcaatgtatgtaagtcagttataacaaatgtaccactctggtgtgggatgttgatagcggggtaggctgtgtgtaatgaggaagggggccagagagtatacgggaaatctctgtactttcccctcgattttgctataaatgtaaaattgctttaaaaaatcaagtctattaaaaatgaagagcagaaataaaagttcaaaagtagaagataaatttgaagaaatatctcataaagcagtataaatagccaaaagcatggaaaatgggagagtataagaatcttagaagatcattctaggtaagtgtttcacaaatagaggtgattttgtcctgcagaggacgtttgacaatgtacggagacctttttcgttgtcacaaataaggaaaggatgtactactggcctcttgtgaagagtgacgcaagaggaatgcaccatgcagccatccacaaccaagaattactcatttcaaagtgtcaatagtgtttatgtttagaaaccttgttctatgtaatccaacattcaaataatagatgttaaaaataaaacagaagagaggcaactgtggagagaaaattatcaaagaagtgacaacatcagttttcttagaactgaagaaaatgagtgtccaggtttaaagggcttactaaatgcccagcacagcaaatgagctaaaaatctacaccaaggctcatcatcataaatttttacaaaaacaaggacaaagagaagttcacagatcagaaatcagaatggctttggacttttcagcaatagccatggaaaatagcagaaaggaacacttcctttaaacttctaggaataattaactttggctttgatttcatatcctatatgaaattatgttcacaaattctgtgatgctcttctattcaagagttacagctaaatgtccctgtcattgagtgtggactagattcagtgactcttttgtgatgatatgtcatttccaagtgtaggttgtagaaagactgtggtttatgtcttgtgttctccatccacgcctatctctctctgtgtctctctttctctctctctctctctctctctctctctcatgcattgcttcttctgtgggaacacatgtcatgagcagccctatggagatgcacgtatgctgagaaactaaggcctcctgcaaagagccacaagaatgagcttagaagtgcatcatttaacaccagacaaatctcgagaggctgcaagcatagacaacagcttaactacaacctcataaaataagctatgccagtcccaccctgctaagccactctcagattcttgaccttcagaaactgccaaataataaacatttttgtttttaagctgctaaattttggaatgacttgttattcaacaatatataaattgtacaccctgataaactataaattgtgcggagaaaataattttcagagatagccttatgtactcccctaaaccttttttccccagaaatctattttcaaaaatatactctaccaagtgaagaaagaaaccaagaaagacaaagaatgtttagttgtgattggagatcagaaggagagtgttttaggcatgattcgccttgttatgctgcaataataagcaattccaaaatattagtggctagaaacacaaaggttgattttgtatctttgcaacatatccaacacaagtcagtcaagggttctgatcattgtagtcactcaggaatctaagctgattcagtctctagtattctatcattctaccgtaacaataagaagctttagcgttcaccatgtcagtcaaaaatgcgtggaaaattttaaactgactcttacatgcctctatgtaggagtgatatatgtcattttcatttcacttcatcatccaaaggaagtcacgtggtcatgcctaactctgaggggacaggggattataatcactaatatttttaagagaggtaagagaattaggaaaatattggagcattagtattacctgcaaagcctaggatccggaaaacagagaacccaacgtgggaggaagatgcaaagtggtgccagaaagatggtggaggagatcctgtaacaacagctgtataacagttgtagagagaaacctgtacagattggagaagaaaatagtgctccaggaattttgttaccaagaaaaaaaaaatctaatgtattcgaatgtattgagaggtggtattcttattgtgtaagagtataatatatgacatgtatgacagacagaagtaccatttaaaattttattaaacataagaattagatccctatctcacactgtacataaacataaaaatggtaaattgatggattgcctaaacatgaaaggcaaagcattaaaatatataaaaatattttggggcatgtagggcaaaagaggtgtcccttaagcaacagcacaaagcaaaaattgtaaagaaaaagacatatatttgatcattttaattaaaaacctgtacaatgcaaagacttcataaacaaagaaaagacataggctcagatagtatatttgcaatactaaaacaataaaggatttatgtcataatttaagaaaaatatttacctatcaatagaacaaaataaaaataacctaacaggaaaatatttttaaagtttaaaaaataatagacagttcacagaacatctgtatgtcaaatacacttatgaatagatgctaactctcatttattattggaaaaattacttcatattagtcggttttcatgctgctgataaagacatacatgagactgggtcatttatacaggaaaaaggatttaatggacttacagttccacacagctggggaggcctcacaatcttggcagaaggcaaggaggagcaagtcacatcttacatgaatggcagaaggcaaagaaagtcccctttataaaaccatcagatctcatgagactaatttactatcacgagaacagcatgggaaggacctgcccccatgattcaattacctcccacgaggtccttcccacaacatgtaggaattcaagatgagatttgggtggggacactgccaaaccatatcgtactaagtgagataacgtactcccatcggactggaacaagtaaaaaataaaataagattgtgaaaggtcacaaactctcattcttgtagaaatttaagttggtacaaccaatttagagtgtaatttagcaataatctagttaaactgaggatggcatgtcctaccaaacagcattccagttaatcacattgaagatagcatgattgttctcaggcttccatattttctgttgaacggtaagttgtcagtctaattggcattcctttaaaatagacttgtttcctcttgatgattttcacattgtaattttgtctgattttcagcacttcaccggtctttaaatgattatgtaagattttcattgctgaggaggaaatcctatcacctcaaatactatcttattagttatattttcattttattttaccatgattttaaatgaattccttaaaaaattaggttagagaactaataaatgataaagagaaaaattattcttcatcctgatagctgttatgtgagggtggaatggtatggctggtttttttcactgtcattttgtaacttggaaattcttattttttaatacaatgacaatattttcatagttaaaaaacactaaaactaaaacaatagtctgttaatgacaaatttaagggcgatttcattaagttaaaaatccatgttaaggcattataagatgaataaatactccaaatgaaaacaaagtgaaggccacttttatttaccttttgtacatgatacttatttttcaacagttgtcatgttagaaaaagttgaaaaaataaaacaagatacacccccttttggcctctaaccttccaaaattgtaatgggtagacttcaaattaaatatctaattcgactcctttccacttctaccctcatagcattagagacatttggaaaaatgaaaaaaatatagtattttatggcagggtacctcaaccccagagccacagacccgtaccaatccgttgcctgttagggacccgattcgcaaagcagtaggtgagcagcagcgggctagggaaggaagcttcatctgtatttacagctgctcctcatcactccatttctgcctgagctccacctcctgtcagatcagcagccacattaaattcccataggagcacaaaccctattgtgaactactcatgcaagggatctaggttgcatgctccttatgagaatctaatgctgcatgatctgtcactgtctcccatcaccccccagatgggaccatctagctgcaggaaaggaagctcaaggctcccactgaatctacattatggtgagttgtataattatttcattatatattataatgtgataataatataaataatgtgtgcaataactgtaatgcacttgaatcatatggaaaccatcctccaacccggtccacggaaaaattgtcttccacaaaatcagttcctggtgccaaaagggtcagggaccactgttttatgggataagtgaaagctggatttgaatccaactctaccttttacttcccatgtgaacattaaaagatgacttaatgtctctgaatctttttttccttctaagtaataactaccttgcagagttattacttgaattggccataaggtaaagaggacaccaaatacagtaaataataacataataataaagaaaccttatgaattctattcagtgatatccatattgaggtatttaaggtgaatgatactgatgtcagcagtttacctggatatgcatcaaaaatatgattgattgatggatggatcggaggaaggaaaagatatgtgatcaaaacgagtatagtaaaatgttcatggtggaatctagatatatagatatcacttgtaatttttaaaaatgttattgcatttttgaaatttgttatgttaaaatattgggtgaaaattctgatgccctggccatgtcccaaatcagttgaatcagatctctggtgtattttttttttaagatccttggatgactccattgtacagcaagtttgcaaaccactattctaacttctcaccacccccttctttatagcttacaaaattatatttttaaatgtcaaatgtcacaatttcactttccttcttcaagaactgattagacttctagcttctcctatgctctcatcttgcataacgttcatttgcacgtggttaaaactgataggcaataaataataacccatctgtcttttcctgacccaacataactaaaaccttcctttcaaggcgaaaatgaactataatctcacagacaagagtagctatagacaactaattctttctggtctctcgtggtcatgggactattcaccactgccgtccctgctgtctatttggtggaccagccagttttactgtgacccataccatggctcttgagaagcatgaagctgccgaaatcgcagttgtagggttaatggaaaacatggtgaagtatagcttacatatatatacaattttggcacaaaatgaagcctaagaaattgtaccgggctgggtgtggtgactcatgcctgtaatcccagcactttgagagaccaaggtgggcggatcacctgaggtcgggagttcgagaccagactgagcaacatggagaaaccctctctacttaaaatacaaaattagccaggcatggtggcgcatgcctgtaaccccagctactcaggaggctaaggcaagagaatctcttccaccctggaggcataggttgtggtgagagaagatcacaccattgcactccagctggggcaacaagagcgaagctccgtctcaataaataaataaataaataaataaataaataaataaataaataaataaaagaaaaagaaattgtaccaggaagtggattgggaatgctctatatattctccccctccaagaagtttttttaatttattgtattgtgaaagatctgcagctatttattttgtgtggtactcttttgcaataaactacttctgcataaatgaactcaaaaactttgatattcatgaaccttcataatgttgatctagtacatcttgcccaactagcccttgggccattccttccatgccactggttgaaaaatatgctccccaccccagtaacatcagcatcagacctctgcaaccagaaagattccataggtaatgaaatccaaatgctggcatttggaagtcaaaccagtgtattttgaaatggaaaggcaaggggaagtgcatggagcaagtacagcatgtgctacaacttcagttcataccctccttaaaatactgtgcaactaaactgtcaattgcccattgatagagatagtatctttttcagctttacaccttccgaattcaacacactgctagcctcaggactaagcgctcaataaatgtttatcaaaagattgagtaaatgaatcagtggtgaaataaaatgtacaaacacatacgcttcatacacgtttaggaagcatttctagtgagctttgtggatattttatttcttaaaggttctttttctttccatgttcatgttattctttattttttaaaatgttgcttctgcttatttctctttctacggcagctatatttacttgcctgagagcacagcatatactgatgttaatcaaactttagatgaaacacctaaaatgatagaaaagaatctgctctaattaaataataaagcaacccctacaggtttagacatgtgccttccggtgtgggaaagaaaaaatttaatgaatgtagtagttttatgccaagaacatttccctcgtgcacctgtgttttaataagatagaatataaaatagcaaaaggggcccgacttttgtgatgatatttactcataaggtagtaagtcagatgtgatgacattttctttgacttagagctgctatacttgggtcagatttcagttcagtaaatttgcagtgaagttgtctttctaacatggtgtcatcctggaactgccctgctcccacagttacatacaggctagggagtgggtaggagtgggggtgaaatcctcttaatgtttatggtgtcagtagattcaaactaaaattagccttacagccatactcctaataaggggcccctggcatatttaattgatttaacaaatttatcaaaaatagataaactgaaatctgccttgaaattaattactgtatctctatttttataagaaaatattttggacccgttccctctgccttatgggtgcaactcccggcagaataggtcatgtctcctgaaaatagttcttattttctttactacttatgacctcttatagcctagaagtttttccttgctatttctagttgaaatgctaatctggcataatttctagttgaaatgctaatctggcataatttcagaactaattttctgttaatgccacttggaacatctaaattcctcctttttcaataatactatatttgtgtgttgcaaacacacacaaatcatactatatttgtgtgtatatatagtaaattccaacttataaaagtaaaattggaatttttttctttctttggaaaattattttataattgagaattataaatgtcacttttttaaatgctgcaacctttgagattggtttcaataaagtaaaacttagtaaacattaagaaaaatgatagcttgatatgttcactaatatggtaaatgaaaacttttatgtgtgtataggctcttgttaattataactaccttcacaggaaaaacagtcttgtggaaggtaatggtgccagtgagagaaaatagagaaagtagaatagtagtaagagagaaaatagaatttcccgtttagaataaagctaagtaaaaagtgaattgtttcagttttatttatgtatttgtaagtgtggtctcatgccatatatattcaaagatagacagagatcttaatctttaattttttatggccaaagaaaatgagtcccatgtaaaagggacattttcgtaagctgatctcaagtggtgtattttgatttgccgcagcagcctatggaagaaatatcattttggctgcctaagaagaaaaatgtcatacctttctattttttattcatactccgcatatttggaattcgtattctcaccatacttttgggaagataacacgaaattgccttacttgcctcgaaatcaaaatctgccattcgttttaaaataaaatggctttttcatctcattttcctttagcagaaaaaagtaagttaaatttttttgtagctgtgttaagtgtactgttcctccctcgttgagaacgaaacaaagacatatgattccatttactgtaattgttttggtttgcccaattacaatagcagtaaaatcatttacacatagtaaaatgtttgagccttaaagggcaagaagactaaatttagctgaagatatacaactttcatgtgccaatgaggaaatgtataaaatcagttatacatattttcctcattcatagatattgaaaatattcatatatgtgtacatgtatttgataacttaatattttctaaataacagaaattatatactgtatatatatttggatattatgattattgttattgccaccattgagcacttactatgggctcagaaaacttcactgtattatttttaattcttataacaaccctgtgaaatatatattatgcctatttcacaaatgagaactctgaaatcaggaaattaaatcacttgctgaagtttacaaagcactgttaggcaataaaacagaatttcaaactcacgtttgcttgtcttcaaattttgtatgctgtacaacctgattgttttactacttgttcttaatttcaaaaaaaatcttcatactaaaagatgatactttgggagttctaaagaacatgtttttggccgggcgcggtggctcacgcctgtaatcccagcactttgggaggccgaggcagaaggatcacgaggtcaggagatcgagaccgtcctggccaacaaggtgaaaccccgtctctactaaaaaatacaaaaaattagccgggcgtggtggcgggcgcctgtagtcccagctactcgggaagctgaggcgggagaaaggcgtgaacctgggaggcagagcttgtagtgagccgagatcgcgccgctgcactccagcctggttgacagagcgagactccgtctcaaaaataacaaaacaaaacaaaacaaaacaaaaaaaaccatgtttcttttcagaaggtatactcatttgaagtggataccaattatttgtattaaaattacttatggataaatttgaatctgcaaaaattaagtgcaacattattttttggcacctgttataggaggtaaaaatggtgattcaatatagtttctacccttagggagcatttagtgtggtttagacgtaatgacactaatgtaaattagagtagaataaattctttaaagcaggacaaaaggagtgttaaagactacaaagtttcagttatggaagataaaattctggagatctattatacagcatagtgcctatagctaataatgctgtttcggacacttaaaatttcctaagaaatcttatgttgtgttcttaccaccagtaacaacaataataaaggggacaagaggaaattttgagtgatgacagatatgtttatagccttcatggtggcgatggttttgtgggtgtatacttattcccaaactctttgattttatatatatatatatatatatatatatatatatatatatatatatgatgaaactctttgagatatatatatatatatgtaaaatatgtacagctttttgtatgtcaatcatacttcattaaggtggttacaaaaaagaatcaagaaaaataatcaccctaataaaaagagtgttattaaagaggggagggattacttctaattggtagtatcagaaaggttctcatggaggaaggtatagaaaaatttaggacaatataagcaacgatactttaagaaaaggaataatataaacaaaaataaaccaaaagatgaagaaccaccaaggatgtttctgaaaaatcaagagaaattccattttgatttgagagtatgaggtacttgtcatgatatataatgagaagtgtctagaaatatgttattttgagcaaatgctgcttagaaaggaggttaggttatttattaatccattcctttgaaatataaatttcatgatcagaaacacgtgagtgtaactatccaataacaacatgatttatttccaagaggatagtatattataggagaagtaggattttttctctttcacaagctaatacagtgtttactgattcaaatgacacttaaaaaaaacaagaaacaaaaaacatacactataagctatccttattcagctatgttattgtcttgcattcctgattagaaacatacaagttagactcccaaagtctcagttttctcatttgcaaaatgaataaaatgatagtacctaccccaaggtgctgtggagtatatttaatcatgtacttaatctgaagttttaattagagtgcatagcatatatttgtggttgcttttgctcctatttctgggtaaaagttcctacacctattatatatgttttgtgtttgaatgaagagaaaggcatcattatttcaaatatcccctctagccaacaaatgaaagctaagacttggaagctaggatgtctaacaccatatcctcttcatgtggactatatagtagaggatatgtaaattaagactcaattaaatgctcacattttataaaggagacccttgaatatatcaaatcctcagagagtatgtcagtttaaacttattaagaaatttaaattatttaacttagcctgctgagtcagtttctgtagctgatttctccaaaaggtcttggtattaaaagtagcattacagatcactaatagcaaactatttctgctactttgggtatttttacagggtgctaattgtgccaaatcaagacattgaaattgcataattttaggttaatattagcataatcctacatattttttcagaagcagtgcaggaatagtacaccctgaatatttttccatcatgatggaattttcaaatatcacaacctttacattgtcagttgtctgctggaacattatattgtgtcaaagagatttataaaagagaagggcaaagaaaatttgcggagttctagacaatagtaatatcagggacacttttgctttctttgttattactaaggagttaaataatcagataccaagcataggtaaagaaatgaatctctaactatttgagtacttatcaatttatctcaaggatatttacggtgttttcccctaagccaaaatagagtgcttaattaaggtccccttagccccctaaaaatcactcaggccaagtttctgatatgtgtgtatacttatatacatattaaagtatatgtatttttgtgtgcactttcagatcaaaaagtcctcgtttatctaaagcaatttcagcttattgatgaggcttttctgttacagcgtcctcctccacagatctgcctgtctagagatttaagcccaataagagtccagcaaagtttaaacaacactttagaaatctaaagaattttaagatttattttaatagtcttagtgataacctgaattgtttgtgagttcttacaaataatgcaatcaacatttaagtaattttattatttttttgtttgtataaatttaaggtatacaagtacatttttgttacatggatatattgcagagtggcgaagtctggttttttgtgtacccatcatgcaaatgatgtaccttttctccattaagcaatttcctatccttcgcccccatcccaccctctcgcccttctgagtctccagtgtctattattccacactctgtgcgcatgtgtacacattatttagcttccacttgtaagtgagaacatgcaatatttgactttctgtttttgagttattccacttaagatgaccaccagttccatccatgttgctgcaaaagacatgatttcattctttactatggctttgtagtatttttcattgtgtatatgaaattgtttattccatacgcaatttgtgtgtgtgtacatatatatatatatatatatatatatatatatatatatatatatatatgcttagacttagaagctaggatagacacacaatggaatactacacaatggaatacattcattcacacacatataaataaaagaatatgtggagatatatctccacatattctttatccaatcatctgtttttaaataatgctattgacttctttagggtgaattttatcaatattgttttggtttaaaacactcaccttaaaagagtcacagtccctaaatgtgcatcctcatatttaaattaggtctcagtaaatttgtgcaaagtgtattctttttaggatggtgttgaacttgctaaattatttatctttaagaatcatcattttgtgtcttttattaatgaaaacaacaattatgtgattgctgatatatttggaaaatgatttctgatgtagattgatttttttattctaaattctgtgtcggtattaaaaatttatagattactaactgtattaatatcgataatactaaattttattgctatttataacttggagtgtactttcatcctcctgaaaaagctgaatgaggtaggcagtattattctgggtttatgtgtgagataactgagactcagaggtaaaatagtgtatccaagcattcatggctcttaaatggaagatataaggggtttgtgaaattactcatggacttttttattcattcattcagttattaaaatgtattcaacatttatcatgtaccaggaacagcgcttagtaccaggaattcaaaggtgcataaaacatcttccttattctaagaggtacatagtgtactggaacaaacagccttgtaaatacataattagaacatgaagtagtatgttaatagaggttttcacaaagctgtggaagcttgtcttatgaagtaactaattccaagggagagaagccttatggaatagtgacattttagatagggtgtcattctaaaatacagcaaaaggcccacagtaaaaaaggaattttggttgttatgaaaattttcagattttctatgttttcagtacagtatacatggtgggctatgtgaatgtttgtatagggaccaaagtaggaagtgaggttgtctgttagagagcgctgagaaaccgaaaatagggagagatgagttggaatatgctgaggaaaagttattaggagttttcaagaaaggccacgacagtggggctagagagaagaggctaaattaaagagtcatttctggtttagaattgataaaatatagagacaagcatgataagaaagaagtcgagaagtaaacgatggtctcaagatttctagcttggaaatcattgactaaaattaaaactaaggactggattaggccattcttgcattgctataaagaaatacctgagactgggtgtttataaagtaaagaggtttaattggctgacgattctgcaggctctacaggaagcatagcaacatctgtttctggggaggcctcagggagcttttactcatggtggaaggcagagcaggtgtaggcatttcacatggcgaaagcagagagagagagttggtggtgggggtgggtggctacctacttttaaacaaccagatcttggagaactcactcattttcatgaggacagtaccaagaggatggtattaaaccgtgagaaaccaccctgatgatccagtcacctctcaccaggccccacctccaacattggggattacaatttaatatgagatttgggtggggacacagatccaaatcatatcaaagacttgcatgggaaaataaggaattgttgacataacatctttgaggttcacatcaaatgttctgatgaggatagtccaagtagcagttggctatatacctcagataagggctgaaatttggagctatgtcataatcagcctagattaagagtcaataatctcctgcccatgggccaattacacccaccacttgtttttgtaaagtagtattgaatcccagccatatccatttgcttatgctccatgtataccttttttttgaacttcaaggcagagttgagtagttgtaacaaaaaccatacggcccacaaagcctgaaatatttgttctcaagatctttatctataaagtttgccaatacctgctgtagatgttagttgaagctttgaaagcaaatgaggtttcataaggcagtgtccatacaagacatttaacaagtttacctataaaaactagaattcctttgaggggaacacatcctagtctccattaagcacagtagaagagtcccctataatgggaaagaggtcactttaggtgttgatgttggtggtacaggtcaaagaaaatttatctttgctgtttattcagaatgcaataagtgaagttatgagaaataagggaaaaaatgtgtagaatttcaacagcgaagagaggggataaaggcatgagaatgagttcctaagctcaagtattataaacactgtgagaaacttaaaatcaaagtatgactccaaacgtatttgaagcctgagaacaaggctcacaacctagggaggattagggatcaataaaatagagtgttacaaagtataatgtcaatccagagttgtaaaaatatcagcattgaatatattgaaagcagtaaaactgaatgaggagactatcattttatatcactgtgtttatttctttgccttgttctataaatatttaaaattataaaatttttattaacagtgagagcagaactaccagagtgagcagatcaaaattgggacagatgcttttcactgcacacacttttatttttctgctgttcatgcattatcttgtacagtgcacatgttttacctaaaaaattaaaatggagtctcctgcttaggaaaaaagtatatattctgtttcaaactatatacaaaaataaaatcccaggtgactaaaaactgacatgagaaaaaaacaaattgataaagcttttacagtaaaatagaggagaatatgttaattaatatagggtaagaaaaaattgcttacacaaatgatgaagcactaatcatgaataaaaataataaagtggactaccttgtatattaataacatctatacatcaaaagacagcactgagagagtaaaaatgaaacccacagagtaggataaattatttggaatacacacataatggatgaaatgtgtgtattcataattataaagaattcctacaaatctttcagaaaagaacagataatccaatagaaaaatgggaaaagttcttgaaaagtgaaccatggcacaaaaagggcttgtggcctgctggcaatattctgtatcttgacctggatggcatttttaaggtgatcactttatagtaaataactaatgtgttttatgcatcatagtaacgttaagatttttgtcatctttacaaaataagaaatccaaacggccaataaatatataaagaatttctaagtcccattaatggtccaggccatgcaaattaaaactaaaatgaaatatcactgcttaccaaccagaatcattgaaatttataagtctgacaattccatgtggtggtgagaatatacagcaattagaaatttcacacaatgttacttggtctgtgaattgtaaatagaagtgtaaaattacactactgcttcttggagtgaaatccatttggcactatttagtaaattcaaagatctgcataacctatagcccaccaatttcacttctatatatacactctacagaaatgcatatgttcatattccaggagacatgtttgggaatgtcatagcagcatagtaatagccccaaaccaaaactacttcagtatttattaatagtaaaatttgctatagtttgaatgtgtctctttccaaattcaggtgtcgataatgtgctagtactaagaggtagggtgtttaagtggtgattaggccatgagggctccttctttgttaataaaaataagacccttataaacaaggcttcacgcagcattcagtcagcttgctctcttgcccttctaccttctgccttgtgaagatacagcaggaaggccctcaccagacaccaaatgccagagcctttatcttggacttcccagcctccagaactgtgagtgaatacattggtattatttgtaaattacccagtctcaggcattttgttataacagcacaaacagactaagacaatcatacagtgagaaattaatcaacaactaataagcaaagaggtagattaatcttgaaactatgatatagagtgttccatttggctgctggaagttttatttcttggtctgggtgatggtcaccatgggtttatatgaatggttccctatattatgtttcacaacaaaaagcatttaaaaagtaaatatatgtaatgtactcagggataggcatggccaaccatggattctatgctgaaataatgattcagatttcatcagcaggctaatgacactgcctatttaaatactttaagtcctgaaattaaagaaggtaatttctcaagaaggaatttctaatttatgggtgggtctattccccaccagagagacactagcatggctcagattctatgttggtcattttatttgcatttaaagtcttaagccaaatagaggtacactaataatgacaacaactactactactcatacttgtggaacactgccagatgctgttttaagaaatttgcattttcatttgtaactgagcttacttgaatcttctctctttttttcttggttaatctaactactggtctatcaattttacttatcttttcaaagaatcaacattttgtttcattgatcttttatatttttgtttcaatttcatttagttctgctctgatctttgttatttcttttcttctggagctttgtgttggctttgttgttgattctctagttccttcaggtgtgatgttaggtagtcagactgtgaactttcaggctctttgatgtaggcatttggtgctagaaaatttcctcttagccttgcttttgctgtatcccagaggttttgaatagattttgttgtgaatgtgatgaaaacggaacatttgtacactgctggtgattgtaaattagtacaacctacatggaaaacagtatgaagatttcttaaagaactaaaagtagatctaacatttgatctggaaatctcactaccgattatgtacctagaggaagagaattcattatatcaaaaagacacttgcacgcatatgtttatagcagcacaattcacagttgcaaagatatggaaccatcctaagtgccagccgaccaatgagtggataaagaaaatgtggcatatattttcatataccgtgaaatactattcagccacataccatgcaatactactcagccgtagaaaataatgaaataatgtcttttgcagcaactttgatggagctggatgccattattctaagtgaagtaattcaggaatggaaaaccaaatactgtatgttctcacttataagtgggagctacgctgtaggtacacaaaggcagacagagtggtagaatggactttgaagactcagaaggggcagagtgggaaggtagtgagggataaaaaattacctttggggtgtaatgtacactacttgggtgacacgtgcactaaaatatctgattttacttctatacaattcattcatgtaaccaaaaatcacttgtattccaaagactattgaatttgaattttttaaaaacattaataaaataaaagatgtaaaaaaagaaatttatatatactcatttattgagctcccacaattaaccttaggaggtaagtacttcataattggtagtatacttatcttttactaaatatttgtattacttgggaagttgagggttggggagaagtagcaaggtactatgatttggggcagataactaacttatttattcgcacatacagtttggaccatgagacacgagctcaggtccctcctcctcacctaatcaaagatgaaatatgtgggatgggatgaaataatcagcagtccaatgctgagtttccagaccgaagtataaagcaacaatggatatgtcagaagtctactagggtgttatttatttaaatctatttcatggaatttactaccaccttaatggcccgaaagtgttaaagtatgccccagagtaccgaattactccctaaatgtaatttatgcttgagaataatctgactaacttgatttagaacatcagaaaataagttatgctgcacataaatgaagcagcagtgtaattttaaataccggttgcacggtgaatgagaattttaatatttgcaaaattctaaaatcacttgatttattatccttatgtttatactgacatttttttgccctttgttaagttccatccatatttcttcttactgccaagaaaaaaaactttttttcctagaaatattacagaaggcaaaaattatatttgtttccctgaatgctatttttgatgtctctacttgtttctcattgttaccatttgcttcattcatgggcagcccaattaatggagcgagacaaatttagggagcacagtgactaattagatattaaattggtaaatctaactttgtaaaaccagaaaaaatatatatatatttttttcatttggaattttccttggtggaaaagagtttaaaagtagtcatgataaaaaatgtaattttacgtagtaaattcaagaatagatttagactgtgctattaacagcacctattaaatactgaaaagtgtattttaaaattttatgtgaggcttgaaatggagtctaaagtattattactcacattaagtgtcatcacatgtaaagcccatgattttattctttaatattttgtttgaatagttacttatttcaacagtaatttcaataataaaattaaatcaactttacagttttcaaaggtttagcagttgcatgctgtaataaatacttcatatttatatatttataaagtgacagcataagtcatttttattaggtccttgaggatgcaaaagtttggattatacgaggagacgagagaaaaagggaagaagggcatttcagaaatatgctaccgatatgcaaattcacaagtcctaagacagtagcaggggtcgggcagaaagtccatcctgcctccctcttgtgggcctggaacaatggtgtaagtggaaggcctgttccccttctcttcctacctccagctctgtcttacagagctacggataccatgagcaagtgtatgaacccttacggttttcttctcttgggagaatgtaaaggaaagataacttgtagaaacttgtagataacttgtaaaaaggaaaagaattcagggtgagagggggatttgttgaatttgatagaggatggcaattaccaatatgatgagtgattgagaaacaagtctgtgcaacaggtttgaaatcgaaaatctttgaggtgtacaggatcctgaaatgaagaatgggcatttatagcagtatgtcagagaaacagtcacctcctagtagctaaaagtgttggcaaaagtatagttcaagtgattgggtaggaaaaacagcaaaccaagagtggagactgatggttgctacaaaggtggagtggtaagtcgtgaccaactggtacttctctgtgctctggttagctgctgactgtttctcagactgtggtagcaggaggagggttggagttagcagtcatttgcatatgagactgccatttaaaaaaaaattttaaattatttcatttttctgactctcaatatgaaaagcacattgtagacaaattgaaaaatatagaaaaattatataagaaaatatagtctcaccagtatggaacaatgctaactatgttgcatagatttttagattctcattcaaaagcaactctttgactccagtgatgcaaatgcatgtaacatatgcaatgtgcaattcatttttaaagggaataaacttacgatatattcataggtcatttattgtgtgttatataccattgaaaatatatgaatgctaaattattagtaaacatgcaaaaacattggcaagatcattttgttgtggaaggatatattgtatctgaataactctagaataccataaatcatcaaaggcaacattcttatttttcactaactacagttagagaatacctcttcggctaccttcggttgccttttttatgctaccaaaatgctgtctgttttacaagattttaaaggttaagcatataattattcattaaatacaatgagtgcaatgtacatgtagatacattattaaattttgggtagttaataaaaataaggggaaaaaacctctagaactatcacttttaattgtttaactgataaagtgaagcttcatcttggaaaaataatttcacaagagagcatgtgcactggtagaaaagtgccattgaaacaagagatatttgggttagaagcctctctctactatttaataccattttcaccttttggcaaattacttggcctctgttttctccaatggaaaatgggaataataattgttatgctgcagggttattgtaggtgtcaatgaaatgatgtgtctggcactataaaagcacagagcccggtgcctggctattagtaactgtttaataaatgttaattcctttctctgcccaggacatcagtaggcagatgtagcaatttaaaacttctagtgttactttaaattcctgaatgaaggtagaggactgaaaagatatcatggtattcaaaagtatgatccattgcttcttaagaatagagttcagaaaagcttgacagattcctgtactctgaggcagcaccatagccggtaatctgtaggatggctattggttttgtgctcacaaatgcttgcttgggcaggccccaggaaatctggtagactgtaagcccagtaagatttcaaatcttactttacggcagtgtttttcaccttgactgtacattgaaatcacctggatgctttgaaaaataacagcgtcagtgtccaacctccagaaatactgattaagttggtctggaatggagccccaggatcactgtttggttattgttgttgctgtgttttaaatgccccagttgattcttatgtgcaactgtcttaggtaaacatacagccctggttcatattatttctgcctcagtctcttttatgactggaaggtgaccaaatgcttgtttcctaatattctttccatgtgtagtattaacacatttgacttgtactaagttcctgcagtattccaatctaaaattttagtgactacaataaaataagaaggattaaagaaggcatcgcatagtttagtatatcggttatttaatgcttacatgtgagcctacaatatgaattatatctgtcatcttattttaaatattgacagaatctttaatgatagtgacgaattattgatttattggtgtgataatggtattttagttatatttttaaagttttatttgtaataactatatgtatttatggggtacagtgtgacgtttcagtgtaatgtttcattgtgtaatgatcaaatcaggtttcttggcagatccatagcctcaaacatttataatttctctgtggtgagaaaatttaaaattctctttcactattttgaaatatacagcacaatattggtaactttgttcatattactatgcaatagaacactagaacttattactcctttcagttgatgaacaggcagttttggatcaagaataatattgaaagtgatagaatttatgaagtaatttttatccaaaaatattttgaaagggaatatattgcttccaaataatttattacaatgttaagatatttgtaaatttctagaattaaaaaaatatatttttaggaaagaaaatgccaatagtccaaaatagttgctttatctttcttttaatcaataaatatattcattttaaagggaaaaattgcaaccttccatttaaaatcagcttttatattgagtatttttttaaaatgttgtgtgtacatgctaggtgtgtatattaatttttatttgttacttgaaactaaactctgcaaatgcaggaaactatcagagtgatatctttgtcagtataaccaaaaaatatacgctatatctctataatctgttttacataatccatctatttttcttgatccatatgcttttacctgcaggcgatttgacagatctgttgagaaatggcggcgttttcattatgatataaagatatttaatcagtggctaacagaagctgaacagtttctcagaaagacacaaattcctgagaattgggaacatgctaaatacaaatggtatcttaaggtaagtctttgatttgttttttcgaaattgtatttatcttcagcacatctggactctttaacttcttaaagatcaggttctgaagggtgatggaaattacttttgactgttgttgtcatcattatattactagaaagaaaattatcataatgataatattagagcacggtgctatggactttttgtgtcaggatgagagagtttgcctggacggagctggtttatctgataaactgcaaaatataattgaatctgtgacagagggaagcatcgtaacagcaaggtgttttgtggctttggggcagtgtgtatttcggctttatgttggaacctttccagaaggagaacttgtggcatacttagctaaaatgaagttgctagaaatatccatcatgataaaattacagttctgttttcctaaagacaattttgtagtgctgtagcaatatttctatatattctattgacaaaatgccttctgaaatagtccagaggccaaaacaatgcagagttaattgttggtacttattgacattttatggtttatgttaatagggaaacagcatatggatgataaccagtgtgtagtttaatttcaacttgtggtgtcctttgaatatgcaggtaaagatagattagattgtccaggatataatttggttgctaaattacatagtttaggcataagaaacactgtgtttattacacgaagacttaattatttttgcatcttttttagctcaaattgttcatgttgcaatagtcaatcaagtggatttgaattgtagccaatttttaatgccagaaaatactgattaagacagatgagggcaaaaaacacccagtagtttattaaatactttagatatttcaaaatgctggattcacaaaagcagtatcacatttgactttacaagtcttcattctcaaatatgtttccatagtaaatatgccctttaatattaaggagttaagcatttaaacacctatttatatgataagctatttaaacacagaaaatatttttaaaaccttgtgtaattatatgtgtatcaatcaaacttgcatgcacaccagcgttggcatttgtatagagaggaaatgtatggattcccaatctgctttaatatagaagatacattttaaaaatagcactgaagtgaattttgggctaatgtagcataatggggtttctgcctgagaggcagaaacatattagagttatataaaatgttttggggtagatatagaaaccacttgccattttcaatgatatccaacccaaggtagttatatatttcaatttatattttattatcaaattagtacttattgtgaaaaaaatcaagtaacatagaaatttgtaaaagtacctccattctactctttggaggatagttgttcagtatgaattttgctacatatttcaggctgggtttcttggaaagccattgtaaaatggagatttgtatgtagaaggttaactagggagtacttttacgatgaagcaatttgttttgatgtaacttggtgtagttttcttcatgtttcttgttcttgaagtcagttaagctcttgaatctgtgcatttaacatttcatcaaatttagaaacctttcaaccatttttttaaaaaaaatggaactccaattgtacatttattaggctccttaaagtgccccactactcactgatgttatgttcattgtctgtttggtctctcttttctctgtaatttgttttatataatctctattgtcaaattgactaatctttttcaaagtctaatctatggctaatcccatgtagtatatatttttaacatcagacattttcatctcttagaagtaaaagttgggtctttttatttcttccatgtgtctactcaacatgttcagtctttactttcttgactatatggaatacagatataataactgttagaatattcttctctactaattttatcatctgtgtctattctgggttaatttaaattgatttatttttctcctcattaagtgtgttgtttaactgcttctttggatgactggtaatttttgactatatgccagacattgtgaattttaacttagcgcgtgcttgatacttcaaataaattcaaatatattgaaataaatattctcaaacctcgttctggaacacagttaattcacttggaaacaatttgatcttttgagaatcttccttttatgctttgttatgaccagaacagtgtaagtttagggctactttttccccactactgaggcaaaacccttctgagtactctctctgatgtcctgtgaatgataaaatttttcactggggctcgtgggaacaggtggtattactagccacgtgtgagctctggtgattgtttcctttaattcttttgtgaagttctttccttagctttgagtggttttcttgcatacatgaactgatcaagactcagatgaagaataaaataaagctttctacaaatctccaaaatttcctctgtgtatatatcacctctctggtattttgccctgtgatcactagtcagccttgggctgctgaaactctcagcttcatcttttaacaaaagcctcctggcaaggatcactgtccttcaatgtctgatgttcaatgtgttgaaaaccgttgtagcatatattttgtctttttttttttttttttttttttaagtgtttcaggtgtttcaggcaggagattaagttcagcctcctttactccaacttgaaaacaagtccaaaacaaactattttgatgtaatttgatcttttaatacattaacattacacaattttgtgaatatatcataatttaaaattttcagagaatgtctaatggtcctcatttcttgacagtgtggtttagttgaaactgatgaacattttatcaaaacttttcccctcaattggatacttttttttttttgagatggaattttgcttttgtcacccaggctggagtggcatgatctcagctcactgcaacctctgcctccaggcttcaagcaattctcctgccttagcctcccgagtagctgggattacaggtgcccacccccacacctggctaatttttgtatttttagtagagacgagatttcaccatgttggtcaggctggtctagatctccgacctcaggtggtctgcctgtctcagcctcccaaagtgctgggattgcagacgtgagccaccatgcctggccaactggataattttaaaaagaccattttatttagtctattttttctcaatctatagatgagataagaaaaatcattctagatgtccaaggaaaaattctttcagaaaagagctgtgaatgatatcacaaaccccccaaacagttaaggtatttctttcctggttattttatgtccaaaatcatgcatatgaacatgtgcacacacatgagcgtgcacacacacatgaatacatatacacgcacataatgtaccttaggttatctttccattctgagtaattatcgtaaaatgggtaaaatcaaccccgtaagataccttcatcgataaggcaaatcaaagctttggtaatttctgctatcttggcctttgttgattgactaataatgaataagagaatgagtttcaatatttactatgaaattattttagaagacaggatgtagacagtggctgttagcaggcaattgtttggcatgagccagtaatggttactgtgaaaaaaatcaaccaagcagcccatatattaaacaaacacacgcagaagcacgttggagtctgaagcctcatatgtacaattttcagtaaagaaataacttttagatatgaaataaacaaatagatatatgttgtaaacttgtccctatgtattttgatcaaattgcatcatatttttttcactttaaagaagagaatttagtgctttaactgagacttagtgttatcattcaaaatatactgactgccaatagcagtagaaagataatctggttccatgcaactctattttttttcctctgtcgcaagtaaaagacaaaattaagtacatgaattagtgctttttgaagatattccagagcaatataccatgccactatggagaacctctctaaaaatatcccatttttttacctgagaaaaatattgatcatgttatatgccactcaaattggtttattaaattcgttgaatgatatcagcatctcttaatgcattcactaaacaagcagtaattgagtgcatatacaaagttttatcatccaccaaaacagtgacaatccacatgaggctctaatagaagtttagaaagggggttaagtggttaaatgctggactcagaaagattggattcaaatcccaggtcctttagcttaatagttgtagaatcttgtgaaaatatcttaattcttttcatgtctctgatttctcttctctaaaatggaaatataaatgagatgtgtataaagccacttggaatagcattttgcacaaaataattactcattaaatgtaagcccctattataactaatcactctttataagtgattagttcatatcaatacaaactaagacttatttactgaattatcgtctctaaacatccacactgcagaaaaaccaacctggaaatttcataaaaccttatttttatgtagtataatttcttctcaaagcataagggctcttggattaggaattgaggaaaattccaattcagccaaacgcatctgtttcagatagctgacacttctgcctactcatttcctagctaacaagaagaaatgttaatgggagttttcaaaggaaaagctgaacaccatgaaggaaagtgacacaaataatgttagctcatatattgacagggtgaatttgtgtgctttcaagtcccttcagtgaaaataggaaagtagaaattataaaatgccctaacatttaaagctagcatgttcttggagactaggaaaaaataagttttaaaacatgggctatgatagaatgagatggaaaatgtttgtagttgccagtagaaacaataacaattaccattagattaagtatttaaaccagctgaatatttttattaatggaaatggcatctgttttatgaaataatgctgctgaatgaaccatattaaaaatgaccagtatttcctgcagaacgttgtcgcagacatacaagcctgagaccctaaaatcttaaggtattccatttgaaatcgaccttaagacattaacagtagtggtattgtttagatgaaattttttaggctttaaatcaacaaatgttaagcagacatggggagcgaaacaccagtgtgttattctgacatgaataaactgctgtttttagggaaaaaatatagtcttgttaaggttaagctaattggttttctggtatcttttgcaatgttagtgtgttttactgctccataacctatgttatatggtaaatgtgcaatatatttatatatgttgctgtaaagaaatgtaataaaaaactgtttactttgtgatatgaaagtaaaaatttattcattgtcattgagcatacagaagtaaatatggattacatatgtcatattttaatgttcacatggtcccaccatcaaatgttgaaaaacttatagtttaacgtcatattctattgaagaaaaatacactcccttttctcaaatgtgaaatgtccagagagaatggaaaattacatataaagcatgtagttatagcatggtgaccctgctgtgatctctcagatgaggaacaaaagggagaaagaaagagcacactggtgctttggagttgagagaaggcaaaaaaagagtacaaaaatgtcaaagccaagtttagctgctcttcagctctccctttagctgctcttcagctttaccttaccatggttattagtgattgaagaaaattctaaagcactttttaaaggacccaattctgaagagtttagattcagagagcacaatggagttggagtgactcctgctcaaaagtttgagacaagcgagtccatgaaaagaccgtcctcctcttaatggaaatacccaggttttctcattcttctcgccttgctttcagcactcgcagcccagaaagcccttatctaacaggtactgccgttgaaaggtcattgacttgtacaaaaatgatgagtgctgaatagatgtgcataggtcactgacagtatctgctacagagaatgagttttcgtatttttattaggatacacctaacatggcaatctactgcctcaaagaactctataggaggtaagtgaatttatattaatacagattgaattaaaggataatctagaaaaaggcatatgatgtaaaaaaatcagacacaagtatattttctgtatagtcagtttttacattgtgatttcaccagctggctgctgagtttgacggcttcttaacagccacactgctgagattcaaatgctgatagaaactttgatggaaaaatcactggagtaaatatttctaccatctgttgcccttcactgggaccctaacgttaagaataattcataccattgcttgtcctttatatttccccagcagtaataaaatttcataagattttgttttgtggtcacaaagctatcctggtttctgtaactagaagacatacactagcataagggaatcagccggaaaatttactgctaagagaatttgtctctagtcacttactttaaggttacagcaatgtgtaagtgtgggaatacattttaaaatgagcttttcaaagttattagctggtagtggcatgagagttaagtctcttaatacagttaaacagttgggcacttcatccttgcgtaaatattgttacccttttattgctgcttggaaactcctctgcaactttttggcccctatccatcttttcagaagtagtaaataaccaatttactgggagtgtggtaccaggcagaaattccgagaggggctttcaatccttgcccatcaagtgtatctttcagaaataagtatattaaaataattggataatttcagtggcttgttattagacttccgttgtccagcatggcatgtttaagaagatgacagattttcatacattattggaaagaagcaagaacaaaaaaacataacttactgtagtaaccacggtaaagaactgcttaaaatgcaggataaacatgtcatccctaagggattcccattcttagagcatgaaattatcaagagagtaagagactacaaaaaatgagaagaatgctgattgcaaattccaaatagaaaaaatcaaaacaaaactgcgcaccatcattctggaagcaatgagaagcagaaattgtcatttaatgaaatgtaagattaaagttaatagaagtaattttcatgaaataatattttgcaaggacgatgttccagccatattgatcttcgtgttttcttttcacatcccttcttactgttccctagaatgcttgtttctacctttaaatttgcttttctctctaccagagggctctaccctatctccagtttctcaccatgtcccaatctactccctctcagaatttttgtacacttccctttatatatatttgtgctctaattttatattcacagatatgccttttgtaactcccccatcttaaagaaagcacacacgtacgcacacatgcacacacacaaaattgaactctttctgggagatctgcttaactttcttcataactctgtcacttgctgaaactgtagtatgtgttttcatgtttattatcttttccattagaatgaacatattttgggtacttggtctttctcgatcaccaatatacctcggtacgtagaaaaattgattcatatattgaaaatgtaatattcagtagaacgaataaatacataaataaatttaaaaatgatacttttattgtattacctgagacaaatgatccccaagtttgtccttgcttttcatagccaaaacattctctcttacattgagcttccttcacctcttctgtgtacagagcacttaaaattttcacattgcctgatactttaacaatatgatggccctgttctcttacccattggagcatatgttaaataccagaacccatgtaacaaacatatattgtgatcctactgtgtgcaaagcagatactgcttgctgctaggaatacagagctgactaagagctccttttctctttatgagctcacagtctcatgagttcaacgtcttaaggcacaacgtctaaagcaaagggcagtaagtaaacactccagaaagtactggatctggcctaggacaaatggtgggttgtttttccagctgttatttttcctgccccctaattgacagtcctccattacacctctgggatacctagtctgacttgggaaaacctgactttgggaatcagaggcagtctctcttgcttatatatgaggaactctaatggatacttactgtcattagagaaactctgcttctagcctggctccttttgtaaagaaggttgagtccccttggagagcctgcagaacataaccatttgcatgtaatgaacagtttgtaatactttgagattgatgtgcaatttctatttgacaagggaaaaacaattaggattaaccgtggtcgtatatcccagaataccaacgttgtttccacactctaagtgttgttgggtcattatatgagattcataattttgtcctgttgtacccacgtttgcattaccattcagtcttaatttattataccctattaaaagtttttttggtaatttgttcttattgctactcaggcattaaaatgtctgcaggctgtgaaaatgaataaatttaatgtggcagcatagttctcaaaatcctggctttacaactcatagtacaggcttgtattgtaaatcctagttaacatggatttatttgaaaatccaattttactgctaatcttaaataacacatttttcaaacattttatccttgaatttctatttttttataatttatggctgttgtatgtatttacaaaaggacaatgtgtgtacttttaaatactagtaatggattgctgaaacaactgtaactttaaaacaatgcaattgttaaaaaaataaactgtgcagcctggcttaatggaggcttatgaacatatgattaagatatatgctataataagcaaattcactcaactgatagttcataggaactttcaaatttaatctcataaccagtgctatccttcaaagaatggtcagggcaatttaacgagtacatgaccacgcaagataatttcattgaagagtggctgaactgttgaaatattttctagtctccttgggatatcattaagagcagaaattttgaaatggaattgtaatgatgttcagaaaagataagtaggtaactctcttaatacgttttgtgctgctgtaacaaagtacctaagactaggtaataatttgtaatgaacaaaaatgtattggctcacagttctggagactaggaagtctaacattaaggtgtcagcctctggcgagggcctacttgatatgtcatcacatgatggacgattagagggcaagaaagatcaaaagggggctgaactcccacttttataagggaaccaaacccactcgtgagggtggagccctcaatccttaatcacctcctaaagctcccaccccttaatactgtcacaatggcaattaaatttcaacatcagttttggagggaaaaacattgaaaccatagtagtgatactgactactaccacacagggcttgggaggctaccctagctgttgcacccaagagatgaatcttctaatgtgattacctttatcattttttttactttattaaaatacttttattttacatgtatacttttgtctacccaccatttccatgtctgaccactgctactactatgtcctagcataacattccatacatccttaaaaccaagcaaagggtggagttccatctttaaaaactaaacaggcattttggacaacacattcttggcaatggaatctggacaacatttatcaaacatggtagggaaggttctcactctgcattatcaaaacgacagccagatatcaactgttacagaaacgaaatcagatggaaaatttttaacaaattgtttaaactattttcttagagagacttcctccactgccagagatcttgaatagcctctggtcagtcatctggaagcaattcttcacataattcatgaacttggcttccactttaggaagagaaccacctttttctatacttgcttgcatttttgctttaatgtcttctacagaactaggtcctttgggtgttttaggagtttttccttgttttgaaggattcttgtccttttgatcttggtgttgacggttttgagtcttttccattccgatttgacttttgtgcatttttggctggagtatctcatatagatttcttcactggcgctttttcttcagtttcctcatcatcaaaatcatcatcatcatcaaaatcatcatcttcatcagcagcaagttttacttttttctgtggaaccttgctaccacctccaggagcagatcgctttccagatatacttatgagtttcacatcctcctcctgttcgtcttctgactctgtatcttcctccccagctactaaatgctgtccactcacatgcactggccctgaaccacacttcaaccgtaagaccactgatggtgttatttcaaagccctcaagggaaaccatgggctgtacagacattttcaaagctgccagtgttactttaattggactgcctttgtaactcattgcctctgcttcaacaatgtgcaatttatcctttgccccagcccctaaactgaccgttcttaaagataactgttgctcaatttcattattatccaccttaaagtgatcatctttgtcggcctttagttcacaaccaaaaagatagttttggggcctcagaggactcatgtccatcatcgtccatcaggtggcaggacgcacttaggtgggagagaaggcagatgatgataaaggaccactgctcaagagaacagctgtgcaggacagaatcacaccagggagattacctttatcttagaaaacctgaacatcttgtgtactttgacacttctctacatttcacctaacctttaacatcaacacatttattcagaaaacttttacttttggagctgctctgtgtcaggctctatgctaggtgctcaggatattgaaattgatacaatcctaacctattcacatataatccaaggtttgctgaaattgatggacatttaaacaattgaaacatttaagtggtataattagcaaatggacatttaagccataaaaatagcatctaatagatataatagaggtcggtacaccattgatgagtcagagcagaggcaacccaaagagtaactagccagaagaattgggaaagcttcatagagagagcgatatgaaaataagggagagaattgtaaatccatgaaaatgagaaaaagttgaaaagtgatggtgtcagaaaaacttgtggtatgataatgacaagatgagaggaactcttggtaagcgtgttggatgcatggaaagaaatggcacaaaataatgctgaggacattttttattttattgttggttttgttttggttaatttcattttttaaatctagtatgctagtgttcattgtccaaactgtgaatcataaactcagtttgtggatcaacaccggcctttgatttttagtgaaacaaaatagaaaatatcagcattcatcacaaatagatgtttcacagattttttgttttaattgcgactgtgtgtgtgtgggtgtgtgtgtgtgtgtgtgtgtgtgtgtgtgtatgtgagagagagagagagagagagagagagagatggcttggatgtttatcacctccgaatcttatattgaaatgtgatttccaatgttggaggcagggcctggtaggtgtgattggatcatgtgggtggatccttcatgaatgatccctttggtgacaagttagttcatgctatatgtggttgtttaaaagagtatgagacctcaacccccacctgtttcctgctctcccctttgccttccaccatggttggttgtaaacttcctgaggctctcaccagaagtagatgccagtgacatgcttcctgtacagcctgcagaaccgtaagtcaaaagaaaaccccttttctttttaaagcacccagtttcaggtatttctttatagcaatgcaagaagggactaacacagttgtatgtgtatgtgtgtgttgggtgatttctggttgagtgtcacaaggttgtaatatggtgagtgtaaggaagtataagttttagaaaattaagaagccagttcagaaaactaatacttttggaaaatagtacaaaatcaactttacaagaatatacacagaaagatgtaatacaagatttatttcattgcagtaatttataaagttggtttagtgccttgcttttgcatgctgttttaaaaattaccaagaatatgacttcatgtgattttgaaatactcccagcaagataggtagaaaaggtattcttataactcttagacaaaaatttcggaaagtttaaacgctttatcccaaatcataaagctaataaatgaagaatctgggattcaaacaccatattttttttactgttcatcagctagaagttagaaatgttaagccaaaaacattaagtcactgctctgcctaataaatcttgaggaaactaataaaaagaataataccactgactacaggacaaggtcttcctaagagaccttaaatatattaagtgatgaagatgaaacttcttttattcataaaaatgttatttagttatgagtagagctctaattaaacttattttatattgtcatcagtaaagttgagacataacatatttattaatataattataatttgacccatagtgtattaaaagaaggatgttaaaaggagttgttattagagatgatgttagggttgttgatgataataacagtagtcataacataacaaagcacttcataatttaagaagtgccttcaattacattgttactctcatggtaatctctgtttgatatatagatttggcggattctatatcactctaagacataggttactgaggtgacggaggaatttagcaagcggctgtcaaatggaggacatgagcattggattgtgtatggcaagggctgatggtctctaagaaagcctcttggtttccacagggcagaagccctttgaagatcatagccaaggatttagtaattgcctccctttcagaataccctcaagagaaaagcccaccataagacatggttccctacaggcaaaactgcttttccttaaaatttactgttccctgaatatcagccttctttggctcattcaacatagttttcttaagtttcaggacagtgctgcagaccaaaagtttcaacattgaggaaaacaatactacttgtgcagtgaccctacctcagtcagggaggcagatgcctgcctttatgtgagggaataaggaatcaatcatatttccagcactcaagaaagccagtctagtgcagggagagatagatacataaacctcaaagttatgatatagcataatagttttaaatttccataataactgtattttaaaagttttatagaaacagaagagatgacctcagtctggaaaagccagcttggagaatggcaaccaatattaagtggcaaaagctttgggatcccaggcctccagatggagggtgatagcatgggccagacaggtaggttaggaaaactttgcaaaggacattacacggtacacagacaagtctgtgttttagcctataaaccacagttgcagaatgtgtttgagcaaaggcttttggggatgagatttgcacttttcaagatttaagtttgtttaggatacttacggtttgctgtatacttcctgggtttttacattataattacggtttgaactttaaaggaaaactgcagtttagcatacttgaaagagtgcaacttcaagtcatgattggagacagatatttaacagattttgtgatcctgtgatgcttattttcttctcagacataccacatgacaatcatttttaaacagtttatttctactttagcatccatctgaaggtgttgtgtatgttttctgcttgaaaataaagcagtgggctgggtgcggtggctcacgcctgtaatcccagcactttgggaggccgaggcaggcagatcactaggtcaagaaatcgagaccatcctggccaacatggcgaaaccccatctctactaaaaatatgaaaattagccaggcgtggtggtgcatgcctagagtcccagctacttgggaggctgaggcaggagtatcgcttgaacccgagaggcggaggtcgcagtgagccaagatcgtgccactgcactccagcctggcgacagagtgagactctgtctcaaaagaaataaaaaagaaaataaagcagtgaatgcgattaagatggatttattatgatcataaagtactcaggagtcttattttaaaagacagcattactgtaattaaaaatatagggaagaaactaatgctgttttgcgtatcattctcagctctctcaaaatcagatattaagctcttgctgccaaaggagactatactgcacggtgctcacctgcataaactttgagagggttgaattgtgccaagcaattctctcaatacataaattaaccaaatatttgttgacctactgtgtgacaagtattattccaggaaataagagatccagcaatgaaacaagtatggcttcttatagagttcccaaaaaggaaataaaaggatatacgtatagtgatatccctgaattaaatttctcttttgaaaataaaaattctatcataagctgtaactgccaacacttcaatactcattcagcagttttcagggatttgtaccttttgacttatgagaatttggaagtctaattgtatcattgcactggagtcttaaagaaacagataagcgaatgactttgcctgtatcattgttgactgtacttacaatcagaaaggggcacaggacagatgccagggagtaagtggacagcccataaatggaatggtaagaaagaagaactatagtggatttggaaagttcccttcagcattttccctagacaatctttggctgtgtttgcatgatcagtatttcattcacaggatattgagctcttgatatagttctcaaaacccaaaatgaaataagaagtctactctttatttaaattcaaattccagagagttaagtaactttccaggaggtaatctaaatatggcctccttgttggggggggggggggtgtttgaatttgcatataaatagtctcacccttaaaggaaaaccacagatggtggtaatgatgtagtcataatgtacatctccacagtggtggaacaaaatatccacagttttgctttccccagtttcagtgacccatggtcaactgctgtctgaaaataggtgactacaatacaataagatattttaagagagagaaagaaagatcacattcacatgattttcattacaatgtattgttataattgttctatttttattcatgatttttaatctcttaactgcgccaaatttataaattaaaatttatcacaagtacatatagtttatatagggctcagtactatctgcagtttcagacatccactgggagtcttggaatgtatcccctacagataaggggtaaaccactgtatcctatttgtgtgaatgctacaggtgttgtgagctcataacaatatgacatcaacactgaactaatccaggatttggtagtgagagtgatgtatttgcaaggagtgagacgtggtgcctcatccaagcagagaaataattttgaaatttgcctgacaataaaaatcacaatgtgaggtctctctttagagctgcaaagtccaattcagtgccccctagccacataagatactgagctcttaaaatgcggctagtactaattgagatgggcactgagtataacacacatgccagggtttgaatacttagaaccaaaaaggaagtaaatgctcatttattgcatgttaaaattatggttttattatagttgattaaataaaatatataattaaattgacttcattttgcttttaaaaatgtggctatgaaaaatttcaaattatatatgtgtgtgattacatatgtgtgttttcacatatgtaactgatgttacatgtgaaattgattgttacatgtgacatgtaaaacacgttacctaacacgtgcatatgtatgcaacacatatgtaacgtgttacatatataacacgttacatatgtattgttacatgtgtgcttgcattacacacatgcataatatgaaattacatgtaatttcaaattacatgtgtatattttgaaaattacaaattacgtattttgttatttttgctttacaaagtcaaatttaccctatttaataaagcatcatgagttttttataactagtaaactttgagacttttgtaggagaataaataatgcttattataaaaactgattggaaaagtgagctggagcagggagcggaggaaaaaggactagagatcacctttcttcccagctccgctcctctcccaaccttttttctttccattctctcatcccaattcaaaagtgcagagttcacagttggtgtgctgatttagaaaacagatatataaacagccttaaattttctccaggcttttacaatgaaaagaagttcaatatcaaaagtaacaatataatctgtggaaaggtatagggggctatgtttttgaggtagaaactataggtgctcctggccaagcatggtggttcaagcctgtaatcccagcactttgggaagctggggcgagagtattgcttgagcccagaagtttgagtctagcctggcctacagggtgaaactccacctctactaaaaatacacacacacacacacacacacacacacacacacacacacacacacaaaagccttgcgtggtggcgcttgctgatagtcccagctactcaggaggctgaggcgggaagattgcttgaacctgggagacagaggttgcagtgagctgagatagcaccactgcactccgacctgggtgacagagtaagactgtctcaaaaaaaaaagaaaagaaagaaagtataggcactccttatatgcagctgctcacacccctcctccttcacacccctcccccttcacacccctcccccttccccaaaatttgcaaggggaaaaatgtgtgtaattggcagtatttagtggcgtgcaaccgtgagtcatcagactgcacatcctcacttctgctagtggctcagtacccaacagcactcagtgaaaactaactcatttcaaaggtgaaaacaagtgagtttggccaccagggagtgttcaaaactgtcagtgctgaagcaaatgtggagggtgttctgtagtttgttcaggttgatatttgtggtccaacccctagctgaactactaattattaatatctgtcttgatggtgcctcaggagaaagcttctcaaagggaatcaatgttcaaattatagtaggtatcttggccatggaagttattgaattttagccaatacttgctactctttcatttatagtgtgagaatgcagtgtaatgaacctgactctcactgtcctgacttgcctttctcatcgcattcacaataagcacgtcaatacgtatacacatttcatatttctaaagtttactttatttccttattgtacatcgctgtgctgctgatggaagagaaaaggaaaaacactattgattgcaaaactgttttatctttggtggcttagattttttttgtatgatatgtaacgtcttgcatacctaaggcaacacgaagctaaatagatttgcatatagcatgtattttttccaattaaatgtttaattttgttcagagtatactggggacattttgaataatggagaaaagtacaaagaaaattcataattctaccacctatcagcacagtgaaattttatgaagaaacataattttcatgtaaatcatagtgaactcacggtaggttttatttaatacagtaattggagagctggtaggaagacaaaactggttcaaaagagaatacaagaaacaaatgcttctataatgagtgaatttttaaaaaagtattctggaataagattagtgaataagatactaaactcgttgataccctacagcctttggggttatatcctctactgggtaaaaagtcatttacatcatatcagttttctaaaatttgcattgaacttcatagcgttgtaacatgtgtgggcccaaattaatagtaaacagtaagagttgctttactctgaaaatattgaagctcttgtgagggtgtgaggagtttgttagaaaacaacgctaccattattttgaaacacacacgatcatcttttgttttacttctaagttttggataatttttcttaaattatcttattatcttatccattttcttaatttccttaaccttttaaatgtttctcctaggcacttttattgatttttggaatatagttgatatgtgctgaatttttatcatccagttttaattctactgaaaaatctaaaagatgttcatcaactactatatttcaaatgcatacatcccctttcatgctaaagaaactgtatgggaaacacagtctgacattttcaggacctggtatcattaaaagtcttgacactgttaaaattaaacaacgccttttttaaaatcaaaggatacaaaagggctgtgttggtcagaggatacaaaatttcagttagataggagacataagttcatgagatcttttgtacgacatagtgactataattaataataatatgttttcgaaaattactaagagagtcgattttaagtgttctcaccgcaaaaaaatagtatgtgaggtaatgcatatgttaattagctcattttagctagtccacatttttcaatacaatgtgttgtataatacgtgatatatacaacttatattttccaattccaataagtaaaaataaatgtaaattatttgaaataaataaaatgtgaagaacatccacttttcatatgaaaccatgagatattttctgttaaaagattaaatgtccaataaatttttgatgttaacagaaacaaaaatgtttaatatttaaatacatatttgcatgctattgaccccctgaagttcactgctgggctaagtgaaccaactatatcttaagtcaaaaatgctgaaattcttccccaaatcccaaagctcatgaaaacataaacagaaaatttccaaataattctacagggaaaataagacacactatttgatctgatcaaacaacgggatgattatggttaataatgagttacttgtacatttaaaaataactaaaggagtgtgattggattgtttgtaacacaaaggagaaatgcttgaagggatggataccccgttctccatgatgtgattattacccattgcctgcctgtgtcaaaacatctcatgtaccctacaaatatatactcctacgatgtacccacaaaaattaaaataaaaaagagagggacccgaagataagctaatatttaagctcatcatacttattaagataagcaatacataccgaaagtaatagcatttaaaaccagatgttgggggagggttctaacttgttcattaaaattcaaagtcacctgtcttgttttttcttttgtttttgtttttttttttttttttttgagatggagtctcgctctgtcaccccaggctggagtacagtggcgcgatcttggctcactgcaagctctgcctcccgggtttacgccattctcctgcctcagcctcccgagtagctggtactacaggcgctggctaccacgccccgctaatttttttgtatttttagtagagacggggtttcaccgtgttagccaggatggtctcgatctcctgacctcgtgatctgcccaccttggcctcccaaagtgctgggattacaggcgtgagccaccgtgccaggccacctgtcttgttttatcatgatcccgagagtatatatgtatgtgtacagctcatctaaaccctttttctttcaacatgatcaatagattgaacattggagatattttataagaaataatgaagacaactcaatcagcacatatatatattaaatgtggaatctataatgattgcgaagcctgaagcaaactaaatattcagtaataggttctttttttccatggtatatccatttgaatatataacataaatgccttacatttgttttaactatttaaggtttatgttgttagtgtgatgaaatggctggcaaaagtcagaaactcaggaaagtttcaggcttatatctggagcctggttttctttcttcaaggtagaacctctgtgaagtgaaaaattttttttatatctggagcaataatgtagaagcttaaatgtattatccaagttgtcataagcctattatttctttacattactgaagtgaaagacagcattaatggctaaatgccatacttggctataatttatattgtttaggactggaaatgagcctgaaatgtacatttttttccaaaatagttcatgtaatatttgaaacctgacaagtaacctgatgatttcatggaataccatcaaatataaatgtgaagttttaaagacacagggaaatactcagaataaaccccctaaccacaggccagcagaagaactagacttgagaaaatgaatgggaagatagatagtaacaaatgacttctttggcagccttatatatgcttagtcttatagactgttttatggatgctctgcactctatttccagcaagtatggcatttggaacaggaccacacgagacaaactatgagttcacatttcccacaactgcacagatagaaagagggaacaacagaatactccctttcttcttgaaacaataacttctgttgaagctcactggcttcttttcagctgtttctgctagctcctcctccgcctcttgacctctaaggcaatgctcttcaaaatttcaagactgctttctaattgaaacaaaacttataagcacatttcttcccacaaaatgtacatttatttgtaaatcatatatgaatatgactaagcatgtaaacgtatgtgaaaatagaaatcaataaatataaatgcaaacacaaatagaagcattcacagttttcttttgtgtcccagtgagttgttccaaattcctcggaggtaggtatgtcacagtttgagactataccttcaatcctagggtttctggtttcgctctcctcctaggtgatagcatccatttctacggacttaactgccatctttagttgaataactcctctatctttccatcccatatttctcttgattccaaacctgcttgttcacctgagcatatgacacaattcattggctgccgcacatgcagctttgacattttatttaaaatctttccccttccccagccctcatctatttcacagtagtatcttcttcttatctacttgattggtaagcagagtccacatgattccatcatttatctcccattttatatctaatctataagcaagtaatgcaatgcaacttctgtctccaaaaatttattttgaatttgccttctcttcctctgcatctcccccatcttaggccaggtcacctctgccctcttgccagattaggtcacattctcttactactgttgttattctcttcctattcaatcctacaccgcagcaaaatggatcttctcaaaatgtcagctagataaaggcatttctgtgcttaaggccctcatggatttatcttattaggatgaacacccaactctttattatggcttagaatacaatgaattacaacacataatgaatatattatatttctatctttaccattttcttcttaagtcaacctttctcaatccatataggataatcatattagtgcttcctcactttctaaaacatctcagggcctttgcacgtgtttctctgttcttagacccagaatgctcttccttttctctttgtgtagctaggtgcttctttccatttacgtatcacatgaaatgcagtcattccctcctccttccctcactacctcacaaaaagttgatgcctctgttaaaccatgaatggaattttactcggcagtgaatagaggaaaaaccaatggtaaaagcaaccatatgaatgaatgaatgtcaaaaatattatgctgagccaaaagtcatagacacaaatatgggtatttacatgaagttaaagcacagcaaaactcaattacggtaatagaattaagaaagtggttacctctgggtgagggttggaattgagtggacagaggcattagtgactttttcggggtaatggaaatgttgtctattttgttcaggtggtgaatacatagatacattcaattgtcaaaacacatccatccaaacacttagacttttgcactttattatatgcaaattatgcctcaactgaaaaaagtttgttttcaaaattatatcaacagttgaaattcttttaaagatttgattcaaatgagattaattctgtatccatcattgatgtatgatagttttgtatgtagttaaggttattggagataattgaaagttatactcacaagaaggctgcataatatgaagtttatctgccttgatctttaatagctttcgcgatttcaacttcttcacagctctgtaagaaggcagtgtggcatgttgaagcaagcatgtgttttagagtaacacagagctggtatacaaccccatgtctaccaattatcaatgatgtgggtatgttgctggatctcaataatcttccactgtgaaatggaatgtaacacctgactcacaacgcaaaggtatttaccttatgtaatataattcctgcgatcctgggacctcccttaatcccatccacagatgccaggttaaagaccccatcacagactagaacaagttgggatgtcaaaatgaataaatattaatcgaagggcctattgtgattgaacaccacgcagtaggcactctctaatacctaccgtctccctcctttttgggggaaacattctaaatgtgcaaaaaataaagggttatttgctttctggcacttgggatcgatttattgaggatatgttagcagaacagcaaaggtgaaacactaaaagcaccatcaatacacaggcagaggtgaagccataaagcctttattttttaaattaatgcacaatatataagaggtatgttagaatgaacgtccaatccctgaaaggatatacgaaagacattcataaaattacatgggcatgttttcttaatgttcaaaatattgttttaattagtgtattatgagtttattcatgtgtctgtgtgttgtgttatattaatcttttcttgcattgctataaagaaatacctgagactgggtaatggatgagaaaagacacttacttggctcacagttctgcaggctgtaccggaagcatagcagcatctccttctgtggaggcttcgggaagcttccagtcgtggcagaaggcagaacgggagcaggcacttcacctggctagagcaggagcaagagagacagaatgaagtaccacacacgtgtaaacagccagatctcagagaactcactcatcatcatgaggatggcaccaagaggatggtgttaaaccattcatgagaaatccacacacatgatccagtcacctcccaccaggccccacctccaacactgggaattacatttcaagatgagatttgggcggggacacatatccaaatgatatccatgtttaatcagaaaaataaaagttaacagtaacagtgattttactttgtagacctttgctaatggctgaaatctagctccattccgagaacagcctgcggtacacattttgaaagatagttgattaatatgaaagaagccttatctgtagtccttaaggccattatggtttacatatatgagtaaatattccaaagtagccatgccagttaacatatatccagagtctaaaggccactgggcgacaaaagtaaaagatacatagcaattgttactttatatcacagtaattcttgtatattttaaatggatatttgcatttgaggatatccacttaagagttaggtacatggctcttacatttaagtaacatttacttaaatttctggctgcagcaattccacataggtagaaatgaagtctgaattgagttgggggtctttgcagtgctctctctgttcattggctattttgacaatgctgagagatgtggttagccattctttttcatttcatattggcaacctagagagcaattaagccttctccccttaactagatgtatgttttactcatttctggatctttatggctgactttgaatcctagcctgtggtagaaagcatggtgtcagaaggaactatgagttaagactatgcatacttggctttgagtcttgggtatcatacctccctcatagagtgaaggaaccagggattcttcttgaggcccagacccggcatccatgttaagaatacctgtgcaattttgcttcctgatatttaaggtgaaaatgcatgtttgggtcattgtgaggattatgtgagatgttacttttaaatataggcccccttattatatgctctcatagtttcaggcaacacttgtcgtatttgtaacctcagttttaactgtaatgtttccatcaatgtccctcttacctggtacaggggctcttcatattcttggattacaaatctgtgaatgcaaccatgcatcaaaaatattcagaaaaacaatgaatgcctacctctgtactgatgatttataggtgtttttcttgtcattattccctaaacagtacaatgtaataagtatttatatagcatttacattgtattaagtattataagtaatctagagatgttttaaagtatataggaggatgtgtgtaggttgtatggaaatagtatgtcattttatatgtcacttgaacatttgtggatttgctatccgtggggatcctggaaccaatcccccatggatactgagggacaattgtattataagcagcaagagggaaaggaatctgtctattttgcccaaaatcgtgttcccgggacctagcatagctcctggcaaagagtatacaacaaatatgcattgaggagagaacagagggaaccattatccccttattctcgctgttccttcatgtaatgaataaacagtcaaatcttacaagagattttaaaccagtcagagaaaagttggaagttagttagttgttcatacattgagaagcctcgacgctgtgtcatctaggtaatgaaagatctagggaagtttagcagggagaagaagagagatgatagttgtcttcaaatgtttgaaggactgttacggacacaaaaatttaaacttgtgctgaataattccaagaggtacacagtctctcgatagaagctaaagtggggggtgacatttgactcaacaaaaagccatctaaatatcagaactttcaaaagcaggaactggtgcctcaattaatagtgtgttttctagcacttatgatacctgatcataggcaagataatgaaaaattgggacctgggagttatacatgggaatttgtttatcagttgggtgattaggagaggtggccttaaagtcctgttgtgttctaagagtctgtgattctgagtcttatttcccaacaagagaggtacagagcagaagatgggattgggagaaataggataaagataccaggaaatcctaaaggtaagaaaaggaaggcagacctgaagctaactctatacttcaggtgcttgcctagagccagccctacctacttagagaatgttgaagagccagttaaaacatctttaacacggatgtaaaacaaaactatcaaaacctgaagatttcgaatgttctaacctactcgtcagttgggcttttttcacaaatacttcagtaaataggcataaatttattttttaatgatagaaaatatctcttaaagaacttataactgtggataaaagcaccaccataaaaatcttgtggtgaaatatatatatatatatatatatatatatatatataaaattttaaatatggttagctagaatatgacgacaatgtttatgaaacacagagactcttgacaagtcccatgtatacactataaaactttaagttatccactattcactcactaagcttatacttaatgagtgtctgctgtgtcacttattgcggaaggcacaggcggtatagcattgcacaaaacatatgtggtctctgatggagtttttcagtctagtggtgaaagcagtgaatgggtgtacagatgttaaataattgtacaattagttgcatgtgtaaacgtcaaagttcagaagatgacaattgatctacggcaatgtttctcaatctctgacgttttgagccaaatacatctttgttgtggtggactgccctgtccactataggatgtttggcatcacaactgacctctgcccattagatgccaatagtactctcttctttaatcacaaatttgtcccagacatttccaaatgtcccttggggagcaaaatcatccctagttgaaaatcactggtctagggggaggtctttatgaggaagtaacatctaagaaagctggtatgtttacatatagctacagtctattacacatgtatacatatgtaacaagcctgcatgttgtgcacatgtaccctagaacttaaagtataataaaaaaaatgtaacaaaacaatacagtatgataagtgctatgggaccaaagatgaaagggttctactgcacagttatgaactcatagttaggcttttggggtcaaaattttgctgaagatatttgccacccacgtgacctttggcaggtgacttagcttattcatgcctcagttttatccaatgtgaaatggggctggaaagtcccatgtacttcctaataactttgcggaaataatatgtggttatataggaaaaaaaaaaaaatcctagaagtatgcctgctgcgtagtaaaaggaaggagaaggataaagagaaatctgcattttttcttctgtaatggggcagatagtaaatattttaagttttgtggcccaaatagtctctgtcacatttacttgattctgcagttgtggcattggaagcagctatggacaatacttaaattagtaggtgtgcctgtgctttcaataaaattttataaatacaaagtttgcaaaacaaagttgttttttttttttttgtagtttgctgacaccctagtaaagaagcaccattgtcaacgttaaaaattatcaaatttttatttttcaaagttttcaaatttgctttgcttggtctagctcatgaaataagtcaaaagtagcaagacctccacctctaaaataataatagtaatgataacctcaaaaggaaagaagaaatatttttaaagaagaaaaattattgttaaataggattattgtgcagagaaaacctaggagactcaattttaaaatctgtgaaataattttaaaaatactttatgaatagatacataatagcttttattcatattaatgactataaatgcaaatggaaatatttcattcacactgatgacaatgtataaattaaggaggaataaaaattgtagaccctataggtgaaaagcataaaaatatacataagaaaaagcaaaaattgactacgtaggattgttttaggatttaagatttattgtcattaaacttgcaataccagccaagttaacatttgaatttaatacagttataatcagaatgcttttgatgtgtttgggggcaatataatttcaaaggaaataggcaatgatgtaatttaaagtttatatagaaggaaattgtgtgcgtgtatgtgtgtgtataaattggaaacaattttattaataagcatattatggcagcaacatacacttccagatttctactatactttgaagtaattgtgatcaaaaccacagtgtgctggcataaggctagagaaatgggttagtggtttacaagtgagagtccaggaaaacatccaaataagattggatattttagttctgtgtggatagcctatttcacttaataaatagtgtctcgtaattgactattcatgtacctataagtttaactatagaccaaaaaaacgccctactagattaaggagctaactagaaatataaattcatataaacaataaaggaaagtgtaggactttataagcttcatgggagacagatttttggtaagtcaggaagcctggaagacttaaaacataaaattggcagactgaattaactgatagtttaaagcttccatagagcaaaataaatcataaaccaagttttaaaatatataatggatttagagaaggtatttacaaaaatatatgactaatggaggttaataataacaatatgtaagaaggatatgaaatggcattttactataaaggtcaaacaaatgacctataagcataataaatcatattaatctccactagtaataactacacacatctacataatatagatgttacgcctgcatttgatttactttatctgtcttttggcagaactatttgtcaccagataaaaaattctatatcattaccagaaaggtatattattataatgtttattatgttgcagttgtaaaagaaataacagcttttcaattgtttacaaatcctatagaacatttactgaaatacatttacattttgtggcaaacttggatttaaataccgtgttcgtgctttgttttatgccgttttcccatcttttctccaggaatttgattgtgcttcattgaaagctaaaaagaaaaaaaaaataattctggttttggtttaaaaaattaggttaggggttaaaaagttgtacgttgtcttctgtaaaaataaaaaacaagttttctttgtttcttggaggctttatattaaatggatttttaattcatagacagcatattgtgatgaaatttccccatgagcttcacattttgtttcaatagcagaaactaacttggttgcagttactgcccttctgagaacagtgttctggaataattttgacatacatatgtatctctttttaaaacatgtgttaatcttttcataaagaaagttttcccagctgtgtcacctgtgactccaactttctggggggacagggatatgagatgttggaagggaatggcttgaagaaataaagtgcaaaagacgtaatgctttcctgtggtagaaatgtattcagtgaccctgaatgaccttcctactcttgtcccttcatttttcccacaagtatggtctgggcaattataaaaattgacatttgcagtgggctcttctgtaaaagatgctcaatcagaaatgatttattttagaaaaagagatgatataaacatatatatcccctgtctcggaagtgtgaaggttgaaaagcaaggagatgatcttcaaagtgtctaaaatattgatttgtaacatcgttttatgaaagtgcttcagattattttttttcttggatggccccttatgctttggtcagttgatgctaaaatctgaacttctttattttaaaaaaaacttttaattttgaaaaaggaagttcacggtgctgtctaattctttttagatagtcattaatgtaaatgtaagagtcattctgagaaccacatctgctgatatgttccgttaaattacaagttctatgtgtatttgctttgctttcatacaatgaatcttctttactctcttccccacctgccagaaattgccccactcaacgttcataaaaggtccattttcaatcgctatatttatttcagaagcagagatatcatatattcaaattttagttactttccaatatcaagctaataactcacacaaataaatcaaactacagcaaaacagcaatctagcattcaacaaaacctccccaatgcacatatttcaagctgtagatatgtatcatccaccatgctgaaataatgtacatgttcaaatcaaatggaaaactagaatcaaaattgttgattacttcttatcagggcattttattatatttaagaaaaatacaaattaaatcattttcaggaagcaatccttctggctaagatttttttagcataatgcttaaagttaattgttgatctttatctataaattcaaaggtggactaaaaatgcagaatcaatcaggtagtccattttgcatcaggtgaaatatataaagcataaaacagcgagttacatttcctaacaaaattgaattacagtgagtaaaagtgacaggacaaatgcattaagaaaagatggactgaaatggatagagtagaatatatgcatctataaaacacagtcatatataatacactcattttttttcttacgagtgtgagattaatggaagaaaacaacaataataacaaaaccagtgtgatgtgtcagatttcaccttttaattaaaaaattattcacttcagaggggaattttctttcttgggttagctcaatcatgtcagatcttgttcatttaaaaggtcagtttacttgccttctgaggtttttgtttgggaaaaagaaaagaaaatagattttcattggtatcctgggtagaattaattgtttatcattcatttttaagatctccgagaggcagaaaaaggggaactgtgcaacccttttgtccttctggatctcaaaatgaagggatacattctgctacatgaaatgtggaattaagaccatgatgcaacatgataaacaacacaaatttgggggtgtctctgtgctatacattattgaatttttccatgctatacactttttggatgtgtctgtgctatttattcagtttttttaaataaaagtttttgtagactaaattgccctctctactttgcatcgtttttgaacaaaggattttcaagactgataagctcaaatgtatcatttattgtattcaagtagcattcaatttttctttagaagtataatttgtagatattttaacacagaaaacttgcaacactgctcatgataggcacttattatatattttttgaaagactatatggataatgattctaactttgacttttcctgttttgccttcactttagaattaagcagagaatcaaatccatattcctgggggcgatgcttggacaacagtatctctttaaagatctttgtgtgagtcgaaggtgcagccagactgggagttattgtgaagaaacagattcaggaaggttgagaaacttgcctaaggctaatcagatagttactggcaatgttgtttctaaatcactgtttggctccctcattcaatgaatctacactatgtgggactgcctcttgctcctgacatcttttgctgctgaaataaatgaactcaaagcctagaaggtagaaaagagggagttcagaattatattcaggcacaaataccaataaggctattgcccccagaactgcaacttctcttggtttaacagataactatttagctgtgaggtacaactgaggaagtggacacacaagttatcaggagattctgatgtgccagtttatatttcttgtcacaggtaatgattcgaaatttcttaaaacagctgtcctcacagtggagtaacctgggagtacatgaaggcattccaaggagtaggcacagatagttttaagggaatttatttctagatcttctactttattttgtactcttcctgaaaactgaattgcctgaaaaaaaaaaaaaaaaaaaaaagacatctgtagtcaagacctcaggctgtttctcctttctaaccacttgccttttctaaccacttctcccaatttaagaaaaaaagccttatatttcatccaactctgatcttactaaggcttcaaacaaaagaagcatgaatgactttcatgacagggcaacatagctttttgcaagaagagtggttgctaactctttgctttcaactgaacccgaagagaagacctgataagttgtcagccgatagatcattaaaaatacgttttggtaagcaatcatcatgtacttttagcatatgccatagcaggagcacaaatgattaagcaatgctactataatacaattccttccgtttctttctactcacctatttgaataagatttttcatcatttacatctatacagacaaaaattagggatagaattgatgctgaagcctttccaattgtagaattaatttatattcttctgaaggtgtataaattgttaaatacccatccatcttattaagagatgtattttcaataaaattttatttttatgtttatcaaattttataatatacatatattgttttggtcaattgcacgttaataattgtaacaatacctcaattgaaaaggtttgttttttacatttaggacttacagtaacagaaaaaaaacactcattgtgtatacatactgtttaagaaaagtatactaggtgatcaataagattttttcaggcataaacatatatcttagttttaagatatcgatatttacaatgtccctcaaattatattattttcagtcatttaagaatgaaaagtacatttcgaatgcggattttaaatctgcaagggttgactcatttttcaagagtctttttaggggatacagaagcaagaatgtttggagttccctgatcagtatctttaagagaaggtatttgttggtagttcctagcaaattccaacagcctgatgctacttaaaagataatagtaattattttaaataatgcttctgataaaaaacattcatgcacactcagtttaaaaagatatttaaacatttgtagttgtagtttgggaactcatgatacaagtacagtctgtaaatgaagctcttagtttgcaaatatcagagataagctattaaaatgcagaaattgaaattgccctgatatatgcataaattagtgtcatctccatcttgtcagttagagtattttttagattctctctatgtatacatacatatatatatatatatatttatatatatatatatatttgtgtagctgtgcatgtgtgtatttggactaatgggtcaaaggacagtactaacccaattcaataattaaagaaaacataattttgagaattagctttatggtaattgtttgacttaaatgagtagatcagagaagaataagggctttcccttatttaaacaagcttcatttttttatccaaacatttacttagctgattaagcttcacttgtttattttcttcaaagcattcattcaggtgggtactgagtaaactgaaatatcacaccagggaacttcaacaccatccaagtcttaaaggcttcacttgttcacagttggcatttagtgaatgtctaggctactgataatattgtgagtaagttggcagggatcataagaaatgataaaatacagttcttgaaaatgttatggtttgaggaaaagatctatgtttggaattagactgacttggattcaaactctggctgtacctttgggacaaggtgttcagaaactctagcctatgttttttttctgcaaaatgatcctcttttccaggattcctgtagagattcaaagatatgtgaatgtttagaaaaagaatagacttttgatcattgttaattcccttactttccccaattagacttgtaagactgggaagaaagctacacaaaagattgaacaaattatagctgacagaccatagcaaaagatacagggcaaaacttaaaggggaaaactacacattaaattattttaaaccattaaatagcactaacttttgtcagatattacaaccaaacaccactcaaattaaagtaaactgaataaaatgcctgtttttttctgtttactgatgttttcatttgcttcattcatttattggaagatataaaatgtgttagacactgttaggtgctgagtgtataaaaaaatcttattaatacaatttaaacacgcacacacatatatatggttataacaattgatgccatgtatgtactgtttatatgcctatacattattccacagacctggggggagggggatgtagagtcttaccagaaccataggaatcttctcacatcaacatttccttttgaagtttgttcatgaggcaccatccagataatactaccatctgcaatgtggcttgagaagatgttagatttttttattacacataataaggctgtaaagtatttctgtatttaggtagaggtatgtaatacaatatgtatataaaattacatatccaataaaatctggtgttaaataaggactagcttctatgataatatagtctaaaggcttttcatttggtgttatagaaattatgtgaaatatgtttcctggagtagaattattcgcatttcagctctctgacagtggaagaaaagctagagggagaggtgaacaagagagggagcataatggacaaagctttgctggaagccaaaccaccacttcatatgtcaaatctgacaggcctcccattttaggtgtgctgtcattgaagctttcagctgcaccttgcctgtggctaggctattttcaaagattaaaatgcgaaactggaaattaaatgcaacttaattcccaatttaaatttccattatttttgaaaagtaaaagattaaaagaaatgtataattgcaattctggtggaagaggtaattataggaaaggtgggatgtatttcaagtgggggatatagcttactgcagcagagaggaatctaagctatcattcttttgaaattggtctggaaatatgttttcacatggaaaatatactatatttttaggaatttccttgtcatattactgtatccttttctgttagaatataaattctgaattccctattccactgtagatctgcctccgattatattagctcttctgaagttatcaaaaaataatgagatatacaatattccatatatgtcaaagcaattatttttaggttaagtaataaaccaatgacctttaacccggtaatattctgggttgttcataaaaaaactatattcaggtaataatgtctttccacttaagcaactgaaaaaatacacaatacttaacatttggttaattaaatacctactccagacaaaaggattttctgttttcaagttatcttagcaagctgagcaggaagcaatgatatatccaatcagaatatccatggaagctctgctacagtttcaaaaagttctcatcaggcagcttttaaaatgcctactctgaaaatggtccaggttaaagaacaacagcttcctcgtcagatagcagtattgcttggccatgtttcttcctagcacaaaaaagtacctgctcttctctgagtacctacattctaaggactatggcttacataaaacagcatgggttggggcaatttccagcacactgctcactctcgaaaacgtatgatgcaggtgagagtaatgtttttgtttgaatctgctttcactcgtggaagatgaaactacttgcaaagatctgtactttagctattatgagtaacaaaagactcctaaaatattgcacacattgtggggatggagaaccatcatcctgggatttgatggatcctatggtttggctttgtgtccccacccaaatctcattttgaattgtaatccccacaatccccacatgtcaagggagagagaccaggtggaggtaactgaatcatgggagcaatttctcccatgctgttctcctgatagtgagtgagttctcacaagatctgattgttttataaggggctcttcctgcttcactgggcacttcttcctgccacctgtgaagaaggtggcttgctccttctcaccttatgccacgatggtaagtttcctgaggcctccccagccatgctgaactgtgtgtcaattaaacctctttcttttataaattacccagtctcaggcagttctttatagcagtatgaaaatggactaatagagacgtgtctctcagaagtcacagtgatgcttgaacggatccagagctccttcttcaggaaggtcccaactcattctgaagggtctctccaagcccacctctctctgtaaatgggaaaggttttactttgagcactaaaacctgccagaattctcaattttcctaacagtgtgttaataaacacctactcatttagtatccaaaccaggtctgtatttctcaattagagctcaccaggctttcatcataaagtagagcttcaaattgtctgcaatcccactcctatcaaaaacctagaaggaggtaatatttcagagtaatactataaccagatgaccacatctaagaaactgctgaccctacgatgtaaccttctgtccatttttccctttggaaagtctaggatcttttcttataccagcaagttacaagcctggactacactaacttgctttccgcagaagaaaacaccatgagttctgttttcatattaagcacttagtctccatcagacatcaatcgagaaaaaatcattaaaaatcacattttatatttgatgtatatttctcaataatcctatgtattagttcattttcctactgctatgaagaaatacccaagactgggtaatttataagtaaaaagaggcttaatggactcacagtctcacatgactagggaggcctcacaatcatggtggaaggtgaaggggtagcaaaggcatggcttacatggtggcaggcaagagcgtgtgcaggaaaattgccctttataaaaccatcagatctcctgagacttattcactgccataaggacagcacaagtatttagctccctcagcacagaaccatccccgtgattcaattacctcccaccaggtcactcccatgacacatggggattatgggagctacaattcaagatgagatttggatggggacacagccaaaccatatcatcctatttggatgatcaatattatcaaggtatgctcccctgagggggcgtcctttttaccatttaactccaggacaaaagtttatttctttgtaaggacagtgtttatttcttatggtcctattttctcctaagatccagacaccaaaatggccatctatcattgacttaactcctgaattttgcttagagtaacagatttagtgaatctaaatattttctggctgtggaatgttaatttatacatgttcaagttacctttgattcatgtgacagtttgtgccaaaacacactcattatcagaactcagatcattatgttggctcttgttttcgttactaaaggaagaaaaacagtttctcaaaaagaaaattctgatacctaggaagaccattatacctcactcttttctttatctcatcaccacatccaatattataaaagaacttacaaagtaaaaagaaaggtgttctgtagatgtagcgcctggcttgtatggtagcttaaatgaacacagctaaaaatattttatggctagtgtccaaaacagtctggcaccagacaaaataagaatatttaaaattatattttagagttactttaagaggaagggagagagagatgtaggcaggaggaggaggagcaggaggagagggagagagagagagagagagagagagagagagagagagagagaatctggggtttctatggaagggctaagaatatgtagaaaacagtttacaaagaaatatggtccaagaatcgtgtgtacacacacacacacacacacacacacacacacaccccctggaatatttttcagccttaaaaagaagaagatctgtcatttgtcccaacatggatggacctggaggaccttatgctaaatgaaataagccagaccaagaaagaaaaatattgtatgatctcacttatatatggaatctttttttaaaaaaggtcaaatatatacagatagtgaattaaacagtggttaccagggtcagggtagttgtgaggaaatggggcaatgtaggtcataggatacaaatgattaaaatatattaatatattaaaagatataatatacatcatgaggactacagttaataatagtgtgtattcaagatttttgataaatgaatagattatagctgttcttgccacagagtgaaaaatgggtaactgtgaaatgatagatatgataatgttctccacaatggtaactattttacactatatatataaatatctatgcatcttacaccattatgtggtatcccttaaatatatacaataaaatttattttacaaacacatattaggaatgcatattctgatttttaacaatagttaacctcattaatatatttcacactatcatttctagtgtacatgaaaagtagtttattgacattagttgtaaaaaaaaaaaaaatggtcttgagacttttgggtcagagaatgttctggccataaggtaggtttctgcttgcctactagatatcttaacttcgatttcctgaacatcccatcacttcagaatctctcaatcctttctaacatccgcaacattgtttttctttctgcatttcttatattgactgatggatttataattcactttctctgaaaaaccctgcagttatcatatatccctatccattctggctctttattgcccaaatctctaccaaaatcctgtcagcacagcctctgaaatatttctcaaagcatttataatctggctctcatcaacattttcaacactctgttttatcattccactattttacatcatttcattttcatttttaccacaatcactcatccaacaaataagtatttagctccctcagtaattagtattattattattaattataactagatgctgagcatacagaagtgaacatgacagacataatcccagcagggatgtcagactttatgcaagtaatcaaccatgatgaatctcatgagattctgagagagagagagagagattgagagagagagagaaaggggaaccactggtgtccgagttagaaatttgaattagtatctgggtcaccaaaagcttctgtgaagaagtgatatagacttggccacacaaaactaccgtgaaggtggtggaaatttttctatgcagagtaccacatttaaagagctaagcctgagagtgtcagagataaaggaacagaaagaatgtgacagcagattatgtttggaagaaagatgttcaagagaccaagctaaagaggagatggggctagaacctggagggtccttcgggtcctgttgggagttttttctctgcccagaagggctttgtcacgtggttgtcaggaaagagtcatgattagagctttgattcagagacttctttcgctgaagtgtggagaatggttcagagagaagcaaatctgaatggacaaaagaggttattattgtaatcttggcaagaagcgatggtggtcttgactaaaatagttctagtgagaatgtgacaacaaacctgagaaaaatacaggagacgtaattgacgggggttagtgttaagttgaacgattgcagagttgaatttgaggaaagtgtcatatatcattcccagtttctgatgtcatacacctctggagataacactgccatttcttttgaaatgggaaaataataagtgatcagtaagtacgtattggataaaataatgaatggttaaatgcataaggggagaggaaaagagttgcagagaaagagagtaaacgtattttggatgtgttaattttgagatacctttgaaaaatccaagtgaggggttgggtagtcagagaaatgaatgtggatgtcaggacgaaaggtgaccgtgatgaactgtatgtcttcctctaagcacgttatacagcttcatgtcacaagtgactcacttcatgtcacaagtgactcacaaggtcacttgtgacaagcatttgcctggtgcttcatccctaacctccctttctatactcagctaaaatgtcacctacaatacttcttccttgactccaccgtccccactttactgatatgaatacattttaataaaatgatataataatgcttagtttgtaaacctaatgttcctcaagtggtataattatctgatttgtatgtgatcatcaacccaaccatattaggagcaccttgaaggtagaagatttaggttcatgcttaacaccacatctggaccactgtggatttaactttctacaatgattgtattcattaatatattgggtgcccactatattccaagtaatatcctgcacactacgtacaaggaagcataggtcccgtgtgctcatgaaactgtaattttagtaagcagggataggatacaaactgagaaaggaaaacaatttagaaagtgggaaatattatgcacagaattaataaaaaagagaaaaatcttgaaaaagtcttcaatacctcacttggaaggtgattttgaagaagaactgatggacaaactagagtcagccatgtaatgatgtaggggcaaagcattccgggcacaagggacagcttatgcaaagaccttaaaaatgaactagctttgtatgttggagaaggataaagagaactaaggtatctataaggtaattaggaagaggatgagttatttagtcccttagtctttgaagcacattatctcatacttcaattgagtttattcttagtgtcattcttctggatgcaatatttgagataaatgtcttaatgaacgttcacctccctccgtagtaatgcctgagtgtcacaaaaactttttttgtttacatacgtagccatctaatggaaacataaaataggaatcaaaagttgagtttcatgtacaaaaggtaaggactgtacatgtggtcataacaacttcaaaagcacctgaaggtaacctttaaggaagatacaaaggctaggaaatatctaggatccatgaagacagacttacttaaggtcatagtgtgtccagagttggttcccgccggtgggttcgtggtctcgctgacttcaagaacgaagccacggacctctgcggtgactgttacagctcttaaaggtggcacgaacccaaacagcgagcagcagcaagatttattgtgaagagcaaaagaacaaagcttccacaacgtggaaggggacccaagcaggttgccgctgctggcttgggtggccagcttttattcccttactgtcccctcccatgttccatttctgtcctatcagagtgcccttttttcaatcctccccacgattggctacttttagaatcctactgattggtgcattttacagagcgctgattggtgcgttttacaatcctcttgtaagacgggaaggttcctgattggtgcgttttacaatcctcttgtaagacagaaaagttccccaagtccccactcgacccagaaagtccagctggcctcacctctcaatagcattaagaatatagtttcacgagcatatatgaatcaaaacttacatttgccaattttatttgcttgtttatgtgtttccaacatgtcttgtcttagggccaaatgtttccctagagaataactattccaactatcttagttgctgtatttttatgcaaccttcaactctccatactaaaatgtctccagaatagaaaataaatcttttcaaagtttcaaaagaggctctctatatattccccttaaaagtaccaggcagacatatttctaggtttctaacattgcgtgttgccaggaagtatatccaaaccatcacaagttattcatgtaaccaagcacacttattggagtgcttctgcttctgttcttgcttgaaattggaagctccttccaggaaaaaaaaaaaatatctatagaaggggaaaaaagtaattttactttgaaaataaaatatacgtgagcaatagttttattctgtttttaatttaccatagcttccaaagacaacattgttttatagtaggggttagcaagtgttttctgtaatgtaaacgtaaagggccagagagtaaatattttaggctttgttttctatactctgttgcaactattcaactctgctgttagaatgttgaagcagtcatagacaatagagaaatgaagatgtgtcattgtgatccaataaaactttatttacaaaaatggcaatgggctagttacggcttgagggctgcagtttgcagactctcacttcagagctaacagttgttgtcaggagtcacttgtttttggaaacctacaatgaggtactataacaccaaaaagagttatcccttcctttttctctctcactttttgaattatgagaagaattagaaatgtagttaatgataatgtccaaccagtgtaattatacttgttagaaacacagctggaagcctgttgtccagtcttatttctcctctgtgatcctcattttcagaggttgaagtcataagtttgccatgtctactttctgacaggggaattataataatgtggagtcaccttttgtttgtgactttgacaatgcttcattgacttactcaccaattttctaatttttatgaagactttttgccgaaatgtagactcagtcttctctcttgtctactctttctataacaattaacaatgaacttatttacctttttaacatctttttaaaaattttctatacaccttgaaaatgtgaatacaaagtaatgctgcatcatgtatattgccttattcacacatagcctcttatggtatatcatataaaaatggaacaatacagcaacaggttgaatgaacagtaatcaggtaacaggaaaatgagatgtctttaatatttcacttaaaaactcaatttcctaaagcatacatataaatatttggaagtatagttagaagaaaaatatctttaaaatattttaattgattagtcttatttataagataatttttaggaggctggttgcggtggctcacacctgtaatcccagcactttgggaggccgaggtgggcagatcatgaggtcaggaaatcgagaccatcctggctaacacggtgaaactccgtctctactaaaaatacaaaaattagccgtgcatggcagcgcatgcctgtaatcccagctactcgggaggctgaggcaggagaatcacttgaacctgggaggcggaggttgcagtgagccgagatcgcgccactgcactccagcctggtgacagagctagactccgtctcaataataatcataatcataataataatttttaggaagcatcagaaatatataagaaaaagattattttcttaattgctttactaaaaacacctctatgatttttcagtaaaacttgattcttatgtcatgtgtgagtgtgatctgcctctcttgggatactactgtactcatgaggagtgatttttttctccaacgacctctttgtcacgtcaacaggtcacaggaatagtgtaccctaaaaagccacctgccacatgctgctgaaaatgtaaaagtacacacatacacacacacacacacacacacacacacacacacacacaccaaaatcaggtatcacaagctgaaaataaaattgagtccaatttttttttaattgagcagttaatgtccttaaaacaaaatcctatactgcaacaaatacttagccagatcattctgatacctccaaactgtggtgtattccaagatacctctatgatctttgatttgatccacagcttttcagttatcatgcaaataccttcaagttttatctcatttctcagtgcaaactcattaaaaattttcagctgaattcaattttataaacatgttgtgaatgtcctctttatataagcaaggttgtaaggaactggccacataaacagaaaattgaataacatatggtttctggccttagtgatctcatgtgtgagttaggcatatgggcaaaatcagaacactatagagtataagtctaaaatggtagtattttataatagaggatgaagagggtgctgtgggatcataggtgacagatataactcccgttgtgggacttgagaaaggcttcacagtctggaaacatttagttgctattgaacacaaaataagactcactgttgagagaagggagagggagggcatttcaatcaaattaagattctgtggcatattcggaaactgatgtttttaaaaagagtaatgtttattacattcctctacataaattatatttctatgtaatatgaatgacaaatatttaacacaaaatgccttataacatttgaatgaaatccatcatatgacctgttatctatttccatttcctttttgctcatatcattatgaacaatgacctgataaattttttataagactttgctgaattagtaaaggattattaagtttagaatgaacaaagctgaccaatcattcaggcaaatttgaccgttttgttgtcgcttttcttatttctgaaaccatacaattccctgaaatgaataagtacatatttgataacttcctaaattaaggctcaaaacactggtaatctactgggctttcatttgttccttctatttgtctaatcctatctatatttctttatatgagctatgaaaatattagatttattaagttgtcctttatcttaatagagaagaatgtttttctatgacattaagaggaatttgatttttttctttaatgatctacttttaattttggtagagtagcattgataagatcaatattacacattgttaagtatgcattacatgttgataagataaatattacacttaaaatatgtttatcaaatgtatgaatgataaaaacgaattctgaaatgtatgggaaagatcttgaataaaggtctatgtacatttcaaggatgtctacatatgcaaattatcataatataataactattgaatatgattatcttcacatactttctttatttttcatctcttagatgaaattgggtattgttttcttatagctggaacaaagcattacagagaattcttagtgtgatttcattgaaactcactgttatatgagttcaacaaagtttaaattagtccatgacttaatcatcctttataaatcctatcactagtattcggtaaggacaaagtcaattaaaaaattagcaacagaagcattaaaagaaggattaataaatacaaaataagggatgtgatatctttacgtattgctgagatgttagtgctaaggaaaaacttccctgttcataatgtgaggtgggaaaaagaagaactattattgtatatttctcctctctaaaactgcctatctgactgtgtttttctgtgtcagccgtattaacagatgtttaattttactcactttagtatataaggcatcataatgtatgaactatttcaaaggccctatgatggctaattaaataaaaatatattaaatattagctggacaaaataaaatatgtattaattttggaaaaagtagatcaaggttttgcagatcttttcatatcaatatattcatttgctgaataagcttttattgtttaccaatattactagttttatagagatgtagatatcaccacagtatgactaattttatagggacacagatagatagatgttattttattccaatcttatttttacatataacaggtataaatatgcgcttgaaaggagtatatcacttaggagtcagtcagaaaagtaaagatcttctagtctaatacagtggttctcagccaggggtgattctgctgcacgctgagggataaattggcaatttctggagacatttttggttgtgacaattgcaggagtgttactggtattcatttggtagagacagagatattggtagacactgtacaggacacaggaaagtctcttacaacaaagaattattctgtccaaaatgtcagttgtggtgaggttgggaaacactggtctggaagaaggaatttactatgaggaactagttacgaaagtatagagacatttaacaagctgaacaaaggatagtgagatggctcagagattagcaactgtggcatgaagccactactacgtttaggtaaaaataagctaccatttattcttatagtaataataataataattattattattattatttgagatggagtttcgctctgttgcccgggttggagtacaatggtacaatctcgactcacttcaacctctgcctcccagattcaagcgattctcctgcctcagcctcctgaatagctgggattacaggtgtgcaccacccctcccagttaattttttgtatttttggtagaaacggggtttcaccatgttggtcaggctggtctcgaactcctgacctcagatgatccatccacctcagcctcccaaagtgctgggattacaggcatgagccaccacacctggcccactctttcttttttaattattgagaaatataaaaatatgtcaaaagtaacaggtgtggtggagttacagcatgcacataatgggatacagcccattatctaatctcagatggaaactagaaaaaaaagagaagatctttgctaaagcacagattatgtggaaaatcatttagaaaaatagcttatcacaacattaaaattaaatcctttagctgatcatttttccttgctattttttcttttaaaattgagaagacagtgagttttttttctttattgtcattatcttgatgtcaaaaaataatatgcacattataagtgggaaaaaagataagtcgaaatgaaatgaaacaatgcgaggaaaaaaatgtcacaacactcttcaattagaaaaaatgacccccatctttcctccaaatagaaatgacgtaactgaagtagtggaactttctcttccatggcaactctagagaaggggtagatggcatgggattgtggacagatggacacagaaagaggcctcatttattgttattgttaaaacttttacttctagtaatagtgacacctccttcagcatttctttatcaattgtcaatattttttggatcaccagcatcaccttctatatgtatgtctagaaacctcctgttatgaatttacacttctcagagtcaagacagaaatgctgtgaattgggcgataaataaaataccccccttttattgccttgctttgtctcttaaagaaagatgcctgttgggggactatgagaatgctttgtgcttctggacctcaagggacaaatctataataaaaattatgcatagtgatgagaaatatatataatgcaagtttgtagagatcagttaacttatcttgtctaggcaattatttctaaacaatgatttcaaatcattaactataatatagcccattcataccctccatttttgtcaaatccctgtcaccttcaaggacttggccatcccataggctgctctgcttttaatagaggaagatgctgtaactcttggtaccattgccagttatgaatttatccattaatgaacattgcatttaaggcataggtttatctccttctccaggtatgaacctgcaggattcctacctgaagcttaagggagaataaatccacctgggacaatcaaggacagatcaaccaatcagctcaaagcaggtgtgaattacacagtttatttgagtgacaaggtagctaaagcagggataataaaagaagggagtgggttgatgtggacagacgaactatggctttaggaaatttggtagggactgaaacatattttgtgtaatttatgtgggtctaatagcttttgaaacttgtttacaagacctgtgtaagtggtactggcatattcatgcatgagaaaacatcaagggaaaacttaatagttcaaggaggtgacaaagaagagaggaaccaattattttcactagccgtcaaaagcaagaaaataatcagcttgagcccttcggggaaaagataggttaaatattaagtaacagtttgttattattccaagtgttttcttaaagttgctcccatactttcctgttttctctgagggaatttagtttttttgttggtttttttttttttttttttataactgtcattggtcagagcttgatttgatgccagtcaaatttttttaaagagattatgaaaactgcttaaactcttccaaagggaagatgggtcattcttaacatgtgtttcaagaggaagagcataagagcattatatggtaaggctgaaagcagatatcagcgtttaggggccatgaagaggtagagctcacattggtaggatcattgactagaattccagagatcaaaattgtatgttagtctagcattggggaggacttgtagctagtatcttcattctagcttgggagcctaggaatcaggttaggcatcttgcacaggaatgggccgatgggctaaaatctccttgagagagatgattaatccaggacaaaccaagcagtcatgccaatgaattactttaacagggtacttcatatcctcatcctttgggcagcacggtcttcagagatggggcaggccccaggctgcagttgagattctataaactaaggtcaaaaagatgcagcagtgaagaagtcatgcttatcttgtataaatcatgttttcttttctttttaatgaaaatgtacatttaacacattttaaaactaaatattgaccctaaaattccaaccaaaaaatgctacataagtggtatttatttttgaatttccctcatgctcctcccactgtggggacaaggagtggtggtggaagagagatcttttagcaaacctgtgagtagagaattagaaggtaatgggaggaaggtaaaaggaaaacatcatagatggataggctcacaaacattaaaggccttcgtgcctgtccttcatgcctattcatccctctccagtatgtgaatcaatgtacttgttaaatattcattcacctcacatatttagcattaaccgtgtatcagggacgttgttagaccgttggtttacgatgatgtgtaaaatatcatttgtaactcagactaactggaagtgctcaatataataagatgtaatgttatggaacactaagtctgtgctgaagacttatctcctttaatcctaaaacaatcctggtgggtagtctcaatgatcatctccaagtcacagttgaggaaattaaggcttcaagaagttaagaaactggaccaacatcacaaaggtagcatcagagtgacagtttgatttcaaagtgtacttgacttcaaggcccacatttccttgcacgtttaatattgcctttctcaggtaaatataccattaaatgtgatacaactctaagcatttgaattacttacaacgtgcagagttaaaaccagcattatttacactatacttcagctcgtttataagtgaactattattttgtggactaacctatgaaatgtaaccacattgaattcctctgttaggtacaggtttggtgattccagggaatagagtatgactgaatgcacaggtaggggtgaagtgaacccggtcagaaaatttagagagcatcgagcagatcattaagcagctgtctttcaaatgtgcagaacacaactcatttgtaatctagggactatctgtattgattcttcccagggaagttacttatttttatacatatgtggtgtgttctgtccataataccattctacatggtaatgctcaactttattatttaaaaaaactgctaataatgaggtttttctttgtatcacagaagcagcaggagcaagttttctttttccttcccagtttttttaagtactgccaaggaatgtgattttgtcagacttgtatttcctattaagccaatctgcatgactgttccttctactagctttacctgttcactcatttattaattcatcaaatatttgtagagtgactattgtgtgccacatactaatataggcacaaggataaccaaaaacagacaaacgctgtcctttcaaggagctcatatagtaatgggaagttaggaaaggagaaaataaatatgtggtatttcaaatggaagtattaaagtgttaagaagaaaagagaaactaacaagatagggaaaaagtgacaggaacatgatgttttattttttatttatatatattttttgagacagggtctcattctgttgcctaagctggtgtgcagtgacgtgatcatggctcactgcagccttgacctccctgggctcagatgatcctcccacatcagcctcccaagtagccaggtctacaggcatgtaccacgatacccagctaacacgttttcttttcttatagagacagagtctcactgtgttgcccaggctgttcttgaactccggggctcaagcagtccacccacatctacctcctaaggtgctggaattacaggcatgaaccaccatgcccagccgaaattgatgttttatatatggcagtctgggcagacctctttgatgtgatatttgaacagaaatctcaagagagggagtgtattagcccgttttcataccgctagaaagaactgcccgagattgggtaatttataaaggaaagaggtttaattgactcacagttcaatatggctggggaggcctcaggaaacttaaaatcatggcagaaaatgaaggggaagcgaggcaccttcttcacaaggtggcaggaaggagaagtactgaggaaagggggaagagacccttataaaaccatcagattttgggagaattcactcactatcatgagaacagcatgggggaagccaaccccatgattcaattacctccacatagcctctcctttgacacctggggattatggggattataaggattacaattcaagatgagatttgggtggggacacaaagcccaaacatatcattttgctcctggcccctcccaaatctcatgtccctttcacatttcaaaaccaatcatgccttgacaacagtactccaaagtattaattcatttcagcattaacccaaaagtccaagtccaaagtctcatctgagacaaggcaagtctgttctgcctgtgagcctgtaaaatcaaaagcaagttagttacttcctagataaaatggaagcacaggcactgggtaaatatacccattacaaatgggagaaattagccaaaatgaaggggctacaggccccaagccagtccaaaatctatcagggcagtcaaatcttacagctctgaagttgtctcctttgactccatttctcacatccaggtaacactgatgcaagaggtgggttcccatggtcttggtaagctccacccctgtgggtttgcagggtagagcccctctcctggctgcttttacaggctggcattgagtgtctgcagcttttccaggcacgtggtgcaagctgttgatcgctctaccattgtggggtctggtggacagtggccctcttctcatagctccgctaggcagtgccccagtggggactctgtgttggggctccaaccccacatttcccttccacactgtcctagccgaggttctccatgaggtcttcattcctgcagcagacttctgcctggacatccaggagtttccatacatcctctgaaatctaggcagaggttcccaaacttcaattcttgaattctgtgtatccacagactcaacaccacgtggcagttgccaaagcttgggacttgctccctctgaagcaatggtccgaactgtaccttggccccttttatccatggctggagtggctgggacacaaggcaccaagtcctgatgccgcacacagtggtggggttgggggggggacctggtccacgaaaccatttttgcctcctagacctctgggtctgtgatgggaggagccgcaatgaaggtctctgacttgccctggagacattttccccattgtcttgcctattaacattgggctccttgttaaatatgcaaatttctacagccagcctctccagaaaatgggtttttcttttctactgcattgtcaggttgcaaatttttcaaacttttatgctctgtgacctcttgaatgctttgctgcttagaaatttcttctgtcagataccttaaatcatctctcaagttcaaagttccacagatctctaggtcagggtcaaaatgatgccagtctctttgttagtcatagcaagaatgacctttactccagttaccaataagttcttcatctccatctgagaccacctctgcctggacttcagtgttcgtatcactatcagcattttggtcaaaaccattcaacaagtctctaggaagttccaaacttttccacattttcctgtcttcttctgagcctcctaactgttccaacccctgcctattacccagttctaaagttgcttccacattttcaagtatctttatagcagtacctcactacctcagtaccactggtcttaactcctgcgctcaagcgatctgcttgcctccacccctaaagtgctgaaattacagacatggtccattgtgccgagccaaaattgatattttatgtatgacactctgggcagacctctatgaggtgacatttgaacagaaatctcaaggaaggggagaaattatccatttacatatttggggaaagagcattccaggtagaagaaacagaaaatccgtagtcttgaggaatgccgtgtatatgcagtatttttcaaacttgttattttgaaatacatatacacttacaggaagttgcaaaagtattaagaaagatcatgagtacccttcactcatcttcagctaatggttacatcttacataattatatgtaatatcaaagccaggaaaccaggaaattgatgttgatacaatctatgctttattcagatctcacatcttacatagctatgcacaatataaaaaccaggaaattgatattaacacaatctatgccttattcagatctcaccagcttttacatgcacttatctgtgtctgtcattctatgcaattttataccatgtttagagtcatataacaactacccctattttgatacatggtactgaatagttccagcgtcacaaaggaactatctcaagccaccctttaattgtcacacccatccaatctcccattctacttcctgaatcactagcaacccctaatctgttctccatctctatgattttgtcttttcaagggagttttctaagtaaactcatttggggaaagaaaggagatgaattgttctagccacggagtggagaacagagagtaagagtacctattgaagcagagggagtcattgcaataattcaaatgagaaataatggtgattctaaaccaggaagctttcagtgaaaacaatgagaggtacatggattctgggtatttttggaaggtagcactaccaggtttgctgatgaatggggtatggggtgggaaagaaagagaagagcccaggatgagtccaaggtggataaggtgaatagaattgagaaaatggtagaaggatcaagttagatggtagaggggtaaaggtggaagcaataattttgttttggaattgttaggtttgaaatcttgttagacatcccagtaaagtcacaaagagtgcagttggatgaaagtatgggattcagggaagaagtatgtgctagagatgcagatttgagagtcatctgtgtggaggtattattcaaattcaagtccccttggaatgaatggctattcaggcagggtcttcataaaaatgcttgttgcatgcctgtaatcccagcactttgggagtctgaggtgggtggaacacttgaggtcaggagtttgagaccagcctgatcaacttggtgaacccccatctctactaaaaatacaaaaaaaaaaaaagttagctgggcgttgtggcacatgcctgtaatcccaggtacttgggaggctgaggcaggagaattgagccaagattgtgccattgcattccagcctgggcaacaagagcaaaactccgcctcaaaaaaaaaaaaaaaaaaaaaaaaaagcttgttgcttcaaattcatgtcagtctgtaaaattatctgggaaggcagtacaaaaactgtcactttgactacgatgtttctggtgacccatcttcattgatcagtatggaaaaggcatgtctctgaaaatctctgagagtctttgatacagcaagaacataaggataaatcattcttctatgttcatggttgtagaggatcttgaatgtttaatggcagaatagccagatcacactctggcacttctgtatgagaggctgagggatgttactgattcaccccgagaaatatttactactaaggggacagaggcaaaggggatacaagacttcaccctgagctgtagcgctccctccttccctatcctgctttcattcttcacattgttttccttctttcttttttattattatactttaagttctgggatacacgtgcagaatgtacaggtttgttacataggtatacatttgccacggtggtttgctgcacccatcaacccgtcatctaggttttaagccccacatgcattaggtatttgtcctaatgctctccctcaccttttccctgtgtccacattgttttctttctttttgaagcctctcattcactaggtttcaatcctgccttgctagtgttctaactctaaggcctaggcaagttatttcaccgaacttagcctcagtgtcctcatctgcaaaatggatagttttatgatatcttcagcccttaaagtcaatggttctgacagctagggtgtactatcttcttggatatcagtcatctcaagcaagccctccttttttggaccttcttttcacacacttcacataccttagagaacataatacacatcctctttactcagggcttattctttataacaggcttcctaattcaattaactcaacttttcaaaaatattagtgactactgtgatgtaaataaatttgcattttataggggtcttagtaacccagaagggagtggggaaaattaatatatattgagagtttattaagtgctaggtactgtaaatattttcttgtatttaatcctccgagtaattctacaacaaagatattatcattgctattatgtaaataaaagaacaaagtagaaagaaacccacggtcttgtataagctcccctagttggtgggtattgaagggagtatttcaatctttggtagcttctgagtttttgttctctcagggaatctgccagatgtccagggcacctgccaaaccctatgaggctataagaaaaccattaagggtcttagattacccagctttttgggagttagaattctgaatgaaatttagtgttcctgcagctacaaaggaattgagttagggaagtgatgactttatctttagctacattggttattttccttataataatcctggcttggtagattagaggcagcccgagtaacccagaatcgctaaaatagaagtgcgagctcattgcccgctgtccttcactatgtttgcatataggaagcaagaataaaacaagcataaaataggctaactagcttgtcagagctcttcacaccaagtctttgtgagttccaataagacactgactattattaaaaagacagagactccacataagtaggaatttattgttttccttttcagtcaccaaaggacaatcctctgcataggttagcaaaaaatggtactgatcctataatctctaatattaaagtttagatttggcaagctgtacatcttatgttgttcattaacaaaaaacaatattgattggtatcttgtactataacttgtactgtgggtcaaattccaatacagcaaataccattgcaataacaattctacaaaactacatcaaaaaaacctttcatgtttgagccaacagcctgatagtgctaaggactttgagtacagtatgctagaagattcttaacagttatttgtcctggacaacaaaggttgactccattaaaaacatagccatcagtgtgggattatttccaaatcaagcttttggaaaagtcaaatgaaagtttgcaagcaggtggggcatggtggttcatgcctgtaatctcagcactttgggatgctgaggcaggcggatcacctgaggtcaggagttcgagaccagcctggccaacgtggtaaaacccccatctctactaaaaatacaaaaattagctggcttttgtggtgcatgcttgtaatcccagctactcaggagcctgaggcacgagaatcacttgaactcgggaggcagaggttgcagtgagccgggatcatgccactgcactccagcccacatgacagagtgagaccctgtcttcaaaaaagcaaaaaacaaacacgcaaacaaaaaaaaaaaaaaccaaagttggaatgcaataaatgttcattgaatgaatactgaatagggagtttcagctaatccactcaaaatagtgctgaatttccagctctaaggtcaatgcttggcatatatatcctgaaggaatgaatggacacagagtaattttttttctaaaatgcaaattcaattatgtcacttcccttcttaaaatccttcagtagcttcccgtagcctccagcatattattttgaatagtgcttctcaaactttgatgtgcatcagaatcacctggggattttcttaattaactgatgctgattcagtaggtctggggtattgtctgagattctgcatttctagcaagtgctcagggttatagcaatgattttggcctgcagaccatactttgggtagcaaagacataagccacttaacttgacataaaagactgtttagacccttagtttctctctcgctctttccccattttgagcttttgctccggttcatgtttttccctgaaaataccgtgatcttacattgtctgtctggatgctgaattttccctaattctgggcctccatgtagttttaggtttgacatcacaaccaccaaaagatttccccttctcccttaatcttggttaatgtcactctcatgtattatactgttaatgaagcattgaggacataaaacttatcaaatattttatcacaatcaatgatggcaccagtgataacatccaaatgcctgggtgagtaaataagaggagaataggggacttgttgttaaactaagtttgcagagaaaaaatgtactgattataattaaattggatgtttatttgttatgacaaaaaaggagctagagtcttttaatccaccccttggcaccactgcttatctccttgtaacatacgtttgattcccatgtctatttcttccatatgggaaatttcagctccctaaacatcaccaatacaacctgttgataagacaaagttaaatttattgcttactatggtaagaaagaccacagcctggacaaagctttggtagtatttcataaggagaaaggtgaggttggatttcattgggagtatgaagcttggtttaagattggtctttcactgtgggggcacaattaggattgggtaaggatcatggtattacaacttagtttggtggaaacagcacagtgaagatttctagccaagaggctcagagactattaaggtgtgaactctattgatgttttttgttgaagagttgatgggagtttggggaagttactttagtgaacagtcaaattatttgcctggccaagagttatctgtaataggaaagttatgctaatgaagacaatggaaaggtaaaccatgttaatgtcgacagccagctatgtgagcataaggggtaggtagctttggtcctccatgtccaaactgtttgtagtggtaagtgatcttcattctcacatagattgaaagcttcctgaggacagggcaatgtctttgtaaactttaaaatatctatgtcctgcacatcacctgccgtagacaagcatctagtaattgacggttgggtagatactgagggaaaacatgcaccaaataaaaatggcaataggacacaaattcactatcatttggaagaataacagtgttttccactgatatttgctacacacagtggggtccacagagcagcagtaccacttgggagcttattggaaatggagactctcaggcaccaccgcaggtccaatgaattaaactctgctttttttaaggtcatttgtattcaattattatttttttcttttttctttactttcgatgcatttttctttatttgtttttgagatggggtcttgctattttgccgagtctggtcacaaactcctgagctcaaatgatcctcccacctcagcctcctaagtagctgggatcacagatgtgagccaccacacctggcttgtatcacattaaattttgaggagcagtgctttaatatctattccattctcatcacttgatgaggtattattaattccacttatggatgtggaagttgaagccagaaagtttaaatgacttgtacaaggtcaaacagcttacaggtagttgagccaagaggctctcaagtcttctgcctccacaaacccctgttcagctgctgccctacaatggaataaaatatactaatcccagagggacaaatatgctaaaaatctcaatattatacactttggaaggtgcaggtgcattatctttcaattctaatttctctttcaagttttctgatgcataaaaatatgaacagcaggtctgagcaatgtttagatgccgtgctttgatccttttgccattcaagatgtttgatttgcattctgccaaggaatgtctggtaacctccatgatgcagaccacaccattagtcaagagagagctgacgtaccttcatctgagagctggctggctgtgagctgctcagagggaaaggatttctatttacaaattgtatcgattatttataaataaaagttccccttgctttcttcagttgtaaaatctgcagttagagagtcgggaagaagatcaaaactgcatacatttgcatctgccaagcctgataactagttccagaattacagaaatggtgctgaaatagcacctcaagtaccaggctctatcaaatttaatctatccataaggcaactgccaattatattttagagaaaaaatgtagactgaaaagatagacaatccaagtagcaactcctgtaaaattatatgcccataggagcaatcttgaagatataaatattggtatgtttctccttcatttatcatttatctgatcatttgacaagtatttattgaatgcctgttaagggtgtagatatatgtggtgaggctgcaggtgtaagtaggtctttctgaggatatgcatgaagttgatgttcataacttggagatgtgtgtatacagactgaggattccttcagtggatattaagaagtggagtaataggcagtaaagaatacactagtcagttgtggtacataaacacgtcagcaccacttaggtattaacttcctgttttgttttgtgtgtgcttaattacgctgtttattaaacaagcacatcataatctgcagatattgtcataaacagcacaataaagcctgccacatcagaatgtcatctatcaaattaggtgtgttcctcagctgtcccgataggcacacacctgtgcctgtaaataggcgcttggcggagattgcttccaggtgtggatctgttgggcgaccttgggatgtagggcactttggaaccttttcctctagcttcaggaattaacctctgggcttggttccatgccagcttgcattttgctttgggacagtaacatgtaaagaatatgcctgtgaatttagggttactgagaagtcctcatagaagaagtaaaatttccttgaggaatgggagtcttttattcaatccaggtttaatgcaaggcttggtgaacagctccagaaggttaataattgcgtgcgtgtgtgtgtgtgtgtgtgtgtgtgtgtgtgtgtgtatccttttgtcattcaaaagtatacgtatacacacacacctgtacagctgatgataaatatacattgtatcaatgagttcaaatgaagtgtgctattcattcactgaggaatgggctattataatgaactattatgatattagaaattgtcagggcaataagcaaataatacatacggttttcaacaaactttctaagtattgttatcagtgggtttgcttaaatctttttttacaaatttatttatttttttgagacgaagtctcgctctgtcgccaggctggagtgcagtggtgcaatctcggctcactgcaaccactgcctcccgggttcaaaagattctcctacctcagcctcccgagtagctgagattacaggtgtgcgtcaccatgcccatctaatttttgtatttttagtagagacgggttttcaccatgttggccaggacagtctcgatctcttgaccttgtgatccatctgcctcagcctcccaaagtgctgggtttacaggcgtgagccaccgtgcccaggcaatagccccattgctcagtgaatgaatagcacactttattttaactcattgatataatgtatatttatcatcagctatacaggtgtgtgtgtgtgtgtgtgtgtgtgtgtgtgtgtgtgtgtgtgttgaatgacaaaaggatacacacacacactcttattaaccctctggagctgttcagcaaaccttgcattttttactttcattacagtgtgtaaataatttagcaaattctaatttgaacctgatatcaattgagcatttaatatttagccaaatatttatcaagtgctgactgtgttctagatgctggggctgcaatttcgaaacagaccattgaggccctcatggagctcacaataaatgatcttccttaaagtatcaggtctctggtttgttaccgtattttttaaattgttaaggaaagaaaaaggccctatctttttgtagacaaacatgccctaagtgcttccagaaataatctccatcaggtaatgcagactgtgtgtggagtgaaattgagtccaatccatgatccagcagagtttcagcccaggatttctttagagcctttgctacacacaaagttggctgatgtgccattcagcatcccagcagctctttctcttcacactagcaatggcaaagctttgtgcggaggcattgctggctgctctgaactaaaagcatccgtggggaccgaaagaggtttttgcacaccttattaaggtaggcaagtgtgtctgagtgtgtgtgtgcctaaaagctggaagacatctgttgagaggaaagtgctcttctgtgggtctggcagcttttctgtaagtcttctattctgatgcaggagcgtgtgagcagtgggtgggaggagatgctttggtacttggaatgctgaggtccggattaagtggtattgtaatagctagttagaggcagaataaaaagctgggaatcaaagcatttaaaaatgcatccttccattatttgctctcaagttaaaccatattcattctaggggaaattaaaaaaaaaaaaaaaacacagcaagggcaagtagcccaaatctgtaaggtctttgagcttctctgttcgtccagcttttgaagtcttcctacagccaatttgtttggctcctctggagggggcaattcatatccacttccctctcctggagcatttctttcttctatactccatcagggaacaatagagtttaacagtaacaggcaattttttttttttttcaaagcttgtgccctcttctgcgtttaaaggtgttttttaagagactcctgctaggggaatcttggcgcctgtgtgttaagacggcaattaacttttagtatcagtgcttacattaaattttctctctttctgctttactaaagcagtcattaaaattcagtgtgagtaccatgaaactttatcataaaaccctgctttgcttagagaaccttgattgttttctgaaagcagccttctcagtttatatatacatagctgccttccttggaatatcaaattgctttgtgtcacattaagaaacactaggttgaacctctatactgtgttttatctgagaaaaatactactgcaaaaagtttgatttgttcaagttttaggatgaaaatttctttgtaacaagttatttgagttgcatactatgtcatcgtatatctctttagttcaagtaattttgcaattaacatacggttatgtaaagaagataatgatttattttttatttatatttttaaaagttattaagtgaggttttcctttcagtaagagtttagaaaaaatagccagaacaagtaactggacttggaagataaagatacctttgcacttctaaattttacctttgtacacttcggttgtgatttaatcattgaaatgcctctgctttgaagtaaatgcatcacttatggtgtatgctgtgttttaataaagggaaaacagttatgggttctctgttgcacatttgaatgttgttattttttgctgtatttaataacctcttttttctcttgtgaggtttactttggaaatgaggcatgttcaaaaataggctgacattcagcttctatgttttaaatttaaatgctgtctgtgttttatcacatctggaatgtgtggggagaaaagataccaagttttattatttagatttaattgtagaattgcagattgatatttttcaatgcattttcattatagtttctgccatggaggcagcgtgagggctttcaggaagatggagtggtgtaattaccaggtgcgcacgttcattaatccttcctggctagagaaagcttcaagttcttctccagtggcccattcgtaaagctataaatatctaaattgtgtcagccaagaagtcacacagaatggtggctctttttgagttcaatttcatgcactgttgctttggtcttgtgaggaaagctctgaattccttaggatagtcttggttgtgaagttccaaaaacaaaatatcaaatcattaaggatttaatttaaaatacatactcttctttcacaaactagatgattgcagtaatgtggattataaatttttttttttgctttatttctttagagctcctctttttattttgtatgatcaagattatagctgagattttggtgatttttttaaaaagatttatggcttatggtccatcagtctctccactacttcaaacctgtgtacccctgtatattatctgcagtactggaatgtttgcattgtatgtggaagctatatacgatttggtaaaaaataacacttaaaggtcttcgctaagagtgcttatttaatcattaaatatcccttaataaaaataattccagagatattgtctgtgtacaaacttaaaaaaagagaaatataaaatactgtgatgtgaataaaatgtatagcaatacactccaataataccattcttatgttttcccttgttctcaactgaaataactaagctaatagagacgtcagtaaggaatgtgttgtttcttcataatacaactacaaactcatctgataagaacaacctgagagtgaacgttaactttcctcattagaaagattcaatttaacacatatatacaaatacatttttaagataatgatatttgcagagtttttgtattctatggagtaaaggagaattatcacatattcaaagtaaaggtataaaatacatcttaatgttttacttaaattttaaagggtccaaaatatactaaaattgtttttctaattctttcctatgtttaaacgtgccagagtcattggaaataggacattctttttcttaagaagattttgcccaaaatatttaaaactattttcttttcccttgattttacaatttcaatattcatggatttttctactttaaaaataacagtagtttttatgatcttaaaacaaatgtttaagggcactttcgctctctggagactataccatccacatatttattatcagcaaaagaaagggcagggcatacttttatttgaagttgagtataaaaatgtgtctgtgtgtgagtgttattaaaaagataagtgaagagacaaatatagaatccaggaacattttcagcctggcttttactctctctaaaaatctaatgaaacccttgagcatctcttatctcaaggtacattaggaactgtccaacactatgatccgatgggagatcagtatattcatataaagaagaaaatttgttgttagtgaaagtcaagtcttttaaaaaaataatagttacagcatttgcaatatacaagcataatagatttactcaacgcccaccccccatctttaaaaaatcaatttccgacagttgtctactttaaaattgaacatatttgctacctggagggaacattgtaatgtagcccatatgtggtatgcatcctgaagaaaacctgaaattatagaggaagttatcctgccttctttcttctgttgaatgagttaaaatatattaacaatttgcctttcactttgtatttatcattttgtatctttgcatatttacatatacattcatgtgtacaagggcatatatactcacaggtcagggctatttaaacagctatttatttgaatatgccagggaaaatctccaagatataaagaagcagttattagatactatgtcagtatagaattaacagccatcttttttaagatggaagagaaaattaattaattacatacaatttctaacctcaagacattttctttctggagacaaggaatactgaggtgctcacgatagtgaagactcaacaagaccctaataaaatagatgaggataagtaaaactacaatagccaataaaaaacaaaaaacaataaaccatgtttcgctggcatgttggtgagtatctctgtaatatctgtcaataagggtctctgtagatttggagtaatgttcaggaactacctgtactagagaagacagtggagaggactccagtggctaaattctgctgcctttgcttccagaaatgtaaataataaggaggtattgtggcatttcctggaagcagtagtcttgtttcatggtctgactgtataagaatgcctagagaaacataacctcagctgactaaactcccttgatgattgtcactttgtcactgaactctgaccataccttttgcctccagaggcaaaagacgggtgaggaagtgatctcctcatctggtttttaaacaagtatataactagagaactggattatctcctaaacccactcttgtccctggaaaaaggggagtcatcctatccgtttcttagccaatttatgtatactcttagtttgagagcatgagaaggaaaactattttcttttcttaccttggctgggtttttaagaatttatttttagtttaatcaaaataatattttaaaaggtagtaagcctctcataagcagtttgatctgttctaaaataacttcaatttttctttttttaaactttcttttatcttacacacaaagtataatagtaatatgtactcactagaacaaatgaaacaggatggagtcacatagagaaatatatcatattctccctatcccctcccttaatattaacatttaggtgtcatgtgcttctccattaattttcattgcaaaggcctaaattttcttccaagagtgaggagtagcagcacggtagtttggacctgatatagctctctttccctagccttttgcttaagtgctttcctaggggctgactttacttacctaaagatgtttcaagcaagggctcacatttttggtagcagaagacacttactgattgctctcactaataattttgaaaggaatgtcaaaatctgggaggatcatgaaagaaatatcagaaatttcctttcagctgccattctccttaatactgttatcaataaattcagcatctcatatgtgatagcaaaaaaggtgctgccttttgttcttgcatcctgaggttcttacctaataccatggtagcaataaagatggtgagaaaattgcttcttctatggtgttcaggtcctgaacgagcaccctcacctccacagacggtggcaggtattcaagcattttacagactttggagttaaatatagcagtgttattctaatttaggtatgccaccaccagcggcaccggcaactgcaataggaaaaatgattggcaatgccagctatctgatgttttcatgtgccaggtgctgtcagttcttcacagtattacattccatcctcacaacaagagagtgccagtgagtgttgctgtgtgccagtgcccaggctaagggctttgaacacattaccctgttttatcctcataactttccacgttatttttattcctgaatgaagaaacaagttctctgtagagatgctgtcattgatccactcatatcctttcacatccgtttaacattttccctgctgtgcttttactcccaacaactagctccctaatcgctctgttggagggtggccttgaggctgccagagcctatttggtctgtgtaaagagagagatggatctatcctggaatttatgtccctgtgtgtgggaagcccttaatcaatgactgctggttgcagacacataaatacgtgagctttcttgttcccaactgagaaattcagaagtgtgaatggcactgccaccctgggcttttatgccatatatgtgtttggtctgtttcccttcccaatctcacttcattttcccttaccagtgtttcttgaaaacacatcccattagatcatttttgcatgaagcttcatctcagaacctccatttagggaacccaaactaagatattctctaaaatagaaactttattgataaagtttccaaactgtcttagtagatggccaatataagaccaagccaaatctttctgggtccaaattccctgtctttaattaatagactccattacaacacattcttcaatctttagtcagcaaacacttaccacgtgcctattttatggcatattatatttataccatagttaggatattatggttcatgaatattttatatctgtacacctgaaattctattgacctctctgggccacagttttgcatctgtaaaatcagcacaataatgctacttatctcatagagtagacttaaaaacgaatgaaatgatatatgccaagtgttgagaatcacaattggcaattactcatgctcattaaatattagctgtttttatgagtattgtttcattttcggtgcataatatcctatgcaaagaacaaaaggtattggtataggcattgaaacttgaagcatagaagaaaaagttaattaaccggtgccccactagatgcctctaactgctggctccgtgtatccctttagccttggctcgtcacgagaaaaccttggagacatttctgctggactcagcagatcaatttaagaaagatgaatgacatttttcttgaaatgtattcagtcatagctgcctttttctactttcatattttggagttcttagaaaaaattaaggactcctttttttaaagaaaatggtataaaagaaaatgcatatcactttgtcactttattattgtaacctcatcaaagtattcagtgtaaagacagtagccaagtgaactcttcttgtaatgctcggaaaccattttagcaatggtaaaattgctgcaatttatattcgtcaaattgcatgatttgacttattttagaaaagttattaacttctgaagagaatgcttcagaagcatttaaatgagtacaagttatcaccagtgatatacataaatttcatttcaaaatatacttctagaaactgtacttagttagctatagtatttgtacaaggattaattcctatttcattttgtaggaatttatttatgaatgtctatggcctgccagtgtaaagcagacttagagcatcatcttttacaataatctttttttttttaatcaaaggggagatattctggtaaaacaaaacaaaacaaaaacaatagtttattctgcatttttattaagtccctctgtaagtcatccctgaaatgggatatgtagagtcttatatttatttatttctcagaagcttattggaggtgatatgaaggattttaagaccctactaactaacaaaacaacaatttaaaattaattttcaaaataccttaacaaatcttattctccttattttcaaattctttaacaatgtttttcttattactaacataatatcttctgatgtagtcataataatatctaaaatgacaggtctaagtaacttacatggattaattgagtcttctaaatagtaaggtagatggcactattacttctatatgagaaatgaggaagtagaggtataaataagaaattttttggccgggtgcggtggctcacgcctgtaatcccagcactttgggaggccgaggcgggctgatcacgaggtcaggagatcgagaccatcctggcgaacacggtgaaaccccgtctctactaaaaatataaaaaattagcctggcgtggtagtgggtgcctgtagtcccagctactcgggaggctgaggcaggagaatggcgtgaacccgggaggtggaggttgcagtgagccgagatcgcgccactgcactccagcctgggtgacagagcgagactccatctcaaaaaaaaaaaaaaaaaagaagaaatttttttgagtgtatacagttagaaaatggcaaaatgggaattcagacccaaacagtaagactcaaggatacctttcttatcagtatgctaatatgaaaacctaagcatactagaaaatctaagtgccagttggaaaccagaattaacattttggtgtgtaactttctggctgctttttctatgctaacaaacatatatgacatacaaaaatacacacatacacaaattcctgttcactacttcttttatgttaacatcacaatgtaccgtacacagctgtattattttatatttgatttcatattttttctaaagtcagtgtatttgtcaaatatcaacttatctatttaataggaatatgggatgatctttgcttatacatacatacatatgtatataaaaacaaaatcaagtattttaagcgttcaccagaagtcatatgtcaatcagtaaagtatataattttttgctgccaatgacatatatcataaaaacgctacctatcatagaatgaaaatgaaacacagcaatattgggacacctattctcaagcaacagctttgtgatttattagctatctcacatgaaataactcattaacttggtattccaagcagcaaaagaaggatcacttaggtcacttgcaaaataatacaaagctaggtttaggggtgggttgcgcttggtgggatgtagatgaaaccatatgggcccttgagtttataattgctgggatctgcatggtgggtatatggatgtttattacagtatgctagtgagttaagaaagaagaggaattattattgacttacatcatagagtttatgcaaaaattaaacgataatttatttttaaactctagaggtataggtaccatcatgaagggacccacagaactgatgtagccagtaattattggagctggaacagatactctgctgtcagttgttctggttttgtggtcattgttcttgcctttgcaagttaccaactctaagaccttgggcaatactttaagtcttggttgtctcatctgtaaaatggggagagcagtaagtgtcttaaaggtttattctcatgttatatgacttacggtatgtaaaacatctgcgtttagacacatagagggtgcttaatggatgattgctctcattattaggctacatctaatctatgaatttaaaaactgtatagaaatatgtgacagattctttaagagccaaataccaactacagtgaaaaatacttaacacttgctgagctcttagtatgtgtcaggcttaactaccttaatgctcatagcaatcctataagataggtactcttgttatcctattttatatcttctaaaattgaagcaagggaagttaaataataggacaaagatcatacgctatctatccatatatacccatctggctgtctacctgtctccttccatccatccatccacttattcatctacccatccatccactcagttacttctctctctcccaccatccctttccctttccctctccctctccctgtctctgtcactctcctttacttatctatctatcgatggatcggtttatctatcatctatctatctctatcatctatgtatagttgttaataacactaacattttataaattacaagactgaaaaatgttttcattaacttatggtaacaaaagaccacattgtgaataaaaaaagcagtaaacacaggtctctgcacatatgaaagagatgtcctaaacaggaagagatgtcctaaacagtagggatacatagtatcatacaatcaaaacatggcagccctataaaacttacaaagcaatttcatgtaagttatttcatttgactcttaccacaatctatgaggttactatttttatttttctcattttacaggttaaatttaatatggcttccaataaaaaattagtatggttaataaatatcttgacgtcttgctcctataatcctaccgatagtttacagtaattagtaaaataaaataataggaaaaatacctttgatactagtattaaattataatcatatcattaggtaatttcaatttgtgattttcaagaatctgtaatatggtagcttcttcctactgacatgtttgaattcattttaaggcttataattcacaagtaatctatatattatctaaaatgtaaatgcacattcacatggagataataaattagcgtgaaatggctgtattttgctctctataatttttaacatacaggaaatcactgttgtctcaaaaatcaaggaaatatagtatttgaggtgaacttattctttctactattaacacattttaatatagttctctcacagtgcaacagagcaagaagctttcagacacatttgctgctgcaaggagcatgctgtgctgaacttaaaacaccttccctttcaaactccttgggactgtttttttccaagagacttcaaatgcactaaatttagcatccgttggaggcacacccaggcatattatagtgaaagccccaataactgaatgtgttaccactattcacaatgtttatgtgtgtatatgccttatctatgatgtattgcaaattacaaaaattgtgttattattcacagtaacaaaaacacttccagcaaatttctaacagtgatctcttttgaaataacttacatacatgtgtcatgggtcttaaactttgtcacttttatgtttccatcatgttgttttagccagtgagggttttgtttggttttcatttatgattatatactttcaaaaaatagatttcaaagtgtgaatttgattgattgattgactgattcattgagacggtgtttcactcttgttgcccaggctggggtgcaatggtgcgatctcggctcaccacaacctctaccacccaggttcaagcgattctcctgcctcagcctccctagtagctgggattacagatgtgcaccaccacgcctggctaattttttgtatttttagtagagacaggggttcaccatgttggccaggctggtctcgaactcctgacctcaggtgatccaccctcctcagcttcccaaagcactggaattccagacgtgagccaccgcgcccagcccgtgaattttatttttgaaagacaagaatgtccttgcctaattgcataatagtttaacatcatgaagactaaatatgctttttagccatgacaattttatttattattgttttcatttttaattttctcaaagatcctcatcagtgtactctttttggtcttccttataagcgtattttaacaggacataataataagataaatcccaactttttaaagttgtatccgtatgtattactttaaagtgctattaatataaacgaattagaggcaacttttattcaatcagattttaagtaattttaccaaaaatatggccttgataatgtctctgtaacaggttctctgtaatatacatgctgaggattggtttgtctttgcttttgatactattttaattagaaaagtaatggggaatccagacccttctcatttaataatccagagaaaaatcagtccatgttctaatagtttaaatttttctactaaaacccatgtgagaatccatatgagtggaatggagaggagttcagcttcaaagttggcagatttgagatgattctatggcaacagaaatgtgcttgagggaaatcagttgcggcatcttctataattgtgtcacctagattttgccttaggaatttctagatttccatagaacattgtgacctcaaatgctttatcttaataaagaaataaaagcagattagaagaattatttgcctacagtttgtgggagatgggcaagtcttaagagtttattaggtacccagaacgaaacatattttcttgggcctcataatcacattgaaatacaaggatttagttatacacagtgaccagttagtgaatgacagtcttcagtatctagtagacagtaaacatataaagatgtatttgtggccgggcacggtggctcacgcctgtaatcccagcactttgggaggccgaggcgggcggatcacgaggtcaggagaccgagaccatcctggctaacacggtgaaacctcgtctctactaaaaaatacaaaaaaaaaaaaattagccatgcgtggtggcgggcgcctgtggtcccagctactcgggaggttaaggcaggagaatggcgtgaacccgggaggcggagcttgcagtgagcagaggtcaggccactgcactccagcctgggcgacagagggagactccatctcaaaaagaaaaaaaaaaaaaatgtatttttacttttaactacagcgagagaccctggcagcctacagcatacaattagtgttcattatttagattgcatggatttaatgtgaggggtcaattacttgtctaaccagtgagcctagcctcttgctcaatactgcctgcttcatgagggtgaactgtgctggagaaatatattacaggattatctgcagattttttttaaatgagtggttaagtcaaaagttcttgtgaaaattcagagtaataaattattatgaagttgtgtaactaggtaaaggatagtttcttttacacgggtaaagattaacatgaggaggaaaactttagcaatggcatttaattccattcaatatatttatattgagctcctttaaaaatacagggccttgtggtgggtgctgaggacagaacaaaaaccaagtaatacatgaacataacccttgatttcatgatctagtagacctataaaagttgtcgatatctgatgaaaagaaaatggtaaagatattccaaacagtgtatgcaaatccagagataggatggaggggctctacctgaaggatgatgataagaaaaccgtgttgagtgaagggtgatttgtggaattcagataaaatatcagtcttgaatgctgagtgaatactcaatgattgactagatcccatggacagtaatttcttcaattatgacgatgctagtgtttatgactataactatcattctccatgccaggcactttgccatttggtaaatgtatagtgtgctattctaacaagcatgcacagagcttttactttaatgtatccatgagtttattggggttcagaatttaggtaagctttgcaaggtcgtagcatggagtaaaatatctgaaattcagacccatatctaactaagttcaaagactgtacagatatttctcctcctttgtgcagagaaggataggaatggttccatattatcatggacttagtcagatgttttaaaattataatgtcctgtgttaatgaagaagggatgatattcagtgcatattcttaaccgttactttgcttaatgctctcgacttttctgtgagatggatagtgtagataaaatccccaaggggactcagcaagtgcaagtaaaacaatgaaactttaaagccctttgtcaaaacctctctttttctcagaggatggaagggccgtaaaggttggtgaggaaggatggaccatttcctatgtagtcttctgacaatattcaaacaaaaggagagtcagcaaatcccccttgatgtgggaagttttaatacaatttgcagagtgtctctctggagtagacatcctcctctgcaatcgtgtcttctatatagcctcagggctttgggtaggtaatcctctccaaggagagtcctggagagggctgtctaccccccttgcaccatcctctaacattattctatagctcagctccttgtttctgtttcctgccttgtttttgtctgagtctgcaattatgatgtaagcaccatgaaggaaggtatgttgccagtgtttgcatcagcatatcccccgtgtgtagcagcgcaagggatatagtgagccctcaatgtctatttgtagaaaaaagaatgaacgtatcaacgaaatctgatacatattcattgtgtctgttatctccatctctcttgtcctgccttgttatcttgccattttcacaaaaggccccaaggcccatcatttcttgtgtaacttccagagtgttaatttttaaattaaaattaaggctttctacatgagtgtctattatttgagaaaccatgcaagatcgtgtgtgtgtgtgtgtgtgtgtgtgtgtgtgtgtgtgtgtgtgtgttgcactctatattatattgaattctggattttttcttataaataaaattttaaaaatagttctttaaaaataggaataagatgttttaggaggcacagagagcaaaggagaataaaaattgcaggtttggggttgtgcatactaattgccattgagtaaagagagcacactgaggccatttagaagagaattaacgtgttttgtttttgtttttgtttttgtttttgtttttgtttttgttttgagacggagtctcgctctgtcacccaggctgaagtgcagtggtatgatctcggctcactgcaacctccacctcccgggttcaagtgattcttgtgcctcggcctcccaagcagctgggattagaggcgcccacaaccacgccaggctatttgttttttttttttgtatttttagtagagacggggtttcaccatgttggccaggctggtctcgaactcctagcctcaagtcatccacccgactcagcctcccaaagtgttgggattataggtgtgatccactgcacctgaccttatttttattcatttaaaaatattaaatgttactgcatagggagtaatgggcttaacaatgaggtgaccaaaactcctatgtaccatgcagagcaatgtatcaaatgtttttaactataaacttctcaaaaacataaacctaattgttctgcagctgcaggttatatctgccttgtttgagcaaaatttggtggtgaaaatgccttgcttccatttttccttcaataactgatatggtttggctgtgtccccacccaaatctcatcttgaattctactcccataattcctacttgttgtgggagggatccagtgggaggtcatttgaatcatgggggcggtttcccccatactgttctcatggtactgaataagtctcacgagatctgttggttttatcaggggtttctgctcttgcgtctccacattttctcttctgcttccatgtaagaagtgcctttcacctcccaccatgattctgaggcctccccagtcatgtggaactataagttcaattaaactactttttcttcccagtctcaagtatgtctttatcacagcatgaaaacggactaatacaataacctatataattttgaaaagtacttgtctaatagactttcacaatagaaactatatccttatcaactttgaaaagtcattgcttaatgcctttggataactgaattttctaagattattttaattttgaaagttaaattttatcccagtgttgacgatttttgtatgctacttttaaaatattttgtcagtgatttatatctatggtgcaatcttgtaaaaaattaacaatgcaaatgtggctagaccatttaaaaatcaatatgttataattcagcccatttaatcactttagttaaacatcttaggaacaactcagttccatttgagagaagacacagttttctagatgtgtgttgtggcatcatattgctttacaatatcttacataaggtgaattcaaatcatatcattgaatctgttttaaattctgtcatagcttaagattagtgactaaatattggcaggtttatggaagtaggatgtaaacaagacaaaaacaagggtggaacaagtaattttagtatattattcacttgcacagagaaaagtcattcacaccttcttcagctttgtgaagaaaatagactaaaatcctgttgatatagcaactatgttttccgtttcttgtataaaaataaagaaaacttcctattaggaattagccagacattttaattttctctcttctttctctattttcccttacagtctctttgaaggcaggcaaaatttctataaagttttaagaatgttttaagatttttttattgtgaaatattcatagactcacaaggagttgcaaaaacagtacagagatttcctgtgtatacataacccaactttccccagttacatattaaccaaatacagtatattaccaaacccaataaactgacattggcacagtgcaatcaactagactgtagaccttacttggatttcacctgtttttgcacatgctcttttactgtgagtcattatctgttattctatgacattaaccatgtctatagatttatatagttactaccactatcaagataaagaagtgtttcatcaccacaaagtaacttaaaggattatttttataaagtaatgacaaatgtgtcaaaagccattcctgtgttatatagcaagtatgttttgagttattaaaactcactgatcatgtctttcagtgtcataactttgggtttccctccctaactataataatcctgatgaattacagttgatgaatatgagaatatccaactcttcctgactctataaatatattgactgagattgtaatatttatggtgtcttaaggggcgcttgttttattatgatgatgtgaacatgttgagaatagtaagaacagcccagtttagcaaacaggatatgagtcttctatatccagctcaatcgttgccccaacaggggacatctgcctttgctacttaattttccattctggaaaatgtgaagtgtatgagaatgaataatcgtctccgattttccagcacataataatctgaggagagcaggtacagcaatttaggagctgttttcttttggtttccaaaaaaagttccgtccagtggtctaagttagtcgtttactaagtgatagagcaattggctatgctttttgaacggactgataattatgtggatgcagcaaataggatatagacaatgcatctactccattacagtaaaaaagactctgatagcagttaatccacataccaggcacttagcttaggcacagttggaggaaatggaatggtaatagactgtagtatggcatgacaggagctgtagcttgagattcagaattccaactctgcctctcaatatttgagtcctcatggccaagatatgtaaagtgctctgtgcaggtcttggcaaccatccaccacacacttagtatgcaatatctatctttattagtcaaggatctggaaagctagttgatgagacaaatgatagaaacaagagttcattagatgaaataaagtaataaatgatgcaagaatttaaaaaagatttagagaaggaaagggaacagaactcacatgcaagtagagcaactgtgtatcagataatgtgctagctgagttagaaaccatgtctcatattaccctgaaaataattctgcaaagctgtaggtgttatttttttcatttgacaggtgaattcatgaaggcttgaatatagggttaagtgagttgtttcaatgtagttattgattcaaatcaagatctgaatgactctaaatatggtgctatagagatttgaagtaggataaataggatttgaaaaaaagaaaaaatatatagggaaaggaattggtacactgtagcagtgtcataaatgaagcttcagttgtgtgattccagatgatgtatgtgaggcctaatcaaacagctttgtggaatcaaaatttctgctcttgtctccaactggggacgagttggctcgggattaaggtgggcgaccttgggaagactagagtctaagcaggactttagtccctcataagaattatatgaggatgtatatttgcatacaaattcctgggcccaccgagatctgccaaattggaatgtgtggtgatatcacccagggaaacatagagagctgttataattagtcatgaaatatttagtactgaaattatagattatgttaaataatcacttataggggacatagcagggttggcaggttaaccatacagcaaacagggttgtaagtcagggcctagagaattttcaagaggcaggaattctgcagaatgaaggcctggtctcatgcagcaccatggacagctccgaggcactcttgtttctccaaaaacctgaaatcaaaaactttgcttttcatcatgcaacatacccatgtaacaatcctgcataggtactccctagtccaaaattaaagttgaaaaaaaaaactatactttcatttgaatacagttctcttcggctttaccagctctactctggaaggaatatcttttactcaatgaaaggccatcccctgttaatgcctggccaggttctccttatcagtcattcactatctttgtgtgtgagtgactaaacatataatgctatgtttagtggatggagtaagattacctttgcagaggttgtactggcttacccctttggttcttgtagttttcttctattagagttttttccatccctaggtttctatactgttcaaatgggtttaagattcttgaaggtattcctctgaccttgtaatttatgcttgtctcctagcacaacttttttttgtaaaggaggcaccaactatgtggtttgctggcgatggcatacacaaatcaggtgggaggaattaatgagagcagcaattccaatatctggttcttcaagattaacttgtatagtttaattcagcattctaaataagcctcatagatttaaaaatctagaataaacccacatttttaaaaaaagttttatgttatctgtgctgataatgcacgctgtacataataaaatattattttcttttttttaaatttattattatactttaagttttagggcacatgtgcacaatgtgcaggttagttacatatgtatacatgtgccatgctggtgcgctgcacccactaactcgtcatctagcttaaggtaaatctcccaatgctatccctcccccttccccccaccccacagcagtccccagagtgtgatattccccttcctgtgtccatgtgttctcattgttcaattcccaatattattttctaagtggcagtggaagaaacatggaaagttctacttcatccatcggtggattagaatttgtataccatgagatgattaattttcaaaaccagtttgaatctcacaaaataatgaccctgttttttgaaggacaaggcagaacaaggaactaggctgtgccacgttcaagtcacaatctctaacatttgttttgttttgttttgttttgttttgttttgttttgttttgtttaatctctgttgcttgttcactttctcttgtaatctgcattgatttgctacctggctatttgtagattgacttcggctgccaggaatggaatgtttttcataaaggaacatatgccttaatgaaagtaccataagaagggagtagagtgtgaccaattgcctaggtaataagtagtgacaacaatgatattattctagtataaatggaatcagtttttctttgcccagggggcatgataaagaaggcctggctggtatatactaggtgggacacaccaacagtgcctagaatgtcaatggatcaaacctgagggaaccagaagttgaaaagacatatcccaaaagaaagcatttgatgtttaagggttggcttacttagaacacaatgaaaaatattactaaaattaaaactatgattttagctatttttaaatatgacaaattaaatagcagaacattttaataaaacattacttaaggtccacaattttctgtaagtctaatacatgggtcattaaaataaaaaattccccatgatttatggaatcagatttttttaatacaacgaattctaaatggttttataatgccaattccaattaatatcctaattataacatgtcatccagaagggttaatgactaaattttattaatatttgttttctatttattttgatttgtgcagtttatgtgtatagtaacgatagctgcaaattagataccattagcattaaataaggtatatattttaatagaaaattaaagttaagtatttgagctagcctaaaatattcaacaacttaaatttgttttttgtggatcacatttttttgagacaaagtcttgctctgctgcccaggcttgagtgcagtggtgcattcatggctcactgcctcaaccatccaggctcaggtgatcctcccacctcagcctcccgggtagctgaggctactggcgcacgccaccatgcccagctaattttttgtatttttttttagagatggtgtttcaccatctggtctcaaactcctgagctcaagcaatctgcccaccttggcctcccaaaatgccgagattacaggcgtgatccagtgcactcacccctgtgaaccaccattaaatagctaataaaagatgcatgtcaataaaaataaacaacttactagaatgattatgtgaaaatcatttattcttccaaagcatgaattttcaaacacaccttttgttactgttttaagaagggaatcatttccatatatttgcatgtaaatcacttttagtctcagagaactttccataaaagtttttttattactgctgtaaccgatagagctagtggactattaatttaaaaagctgtacataaaaacacatctatagctcaaataatctaggataccttttagtttggggaaatgtagatgaaaatgaagtaattacagaatccttgttaattttcagatttagacagtctaggcaatatctttcaggaatgaagagatatgtgttttttggcatcttggtagagtatattcccattgtaattcttttgtgaagtctagaccagatgtggccataaaaatagacccctactacaataatatatttcatagataatccaataaagtcaaatcttattgcagtaggcttagaactctgtttgcacccatggaatttatatcagtttttggcaaatcctttcatctctgaggatactttttcatctcacatataccctattttctgaacattttgccttcaaagtatacctcatttatcaagaatttctctttattcatctgacttatacaagtggcaataacaacgtctggttcccatgaagtaaccagtgaccctttgaaataatatagcgctggaagaaagaaaaggaaagggagactgatcattcagcaactctttaaaaccatgtcaccgttaaacacatagtttattttatcttttttttagaattgtgaaaacctatattagcatcttcacggatgtctcctttgtttacatccccgcttctgtgccttgcctgcagtagaaaaaaaaaggacatgtgtatccctattccccattgtcttctcattctacatgagaatgagaattcttttaatttcttctctatctacatgaacccacttccattatctgtttgttcagttctttaaatgccctgaagctagctctgtgactgggcagttgaaagttctggacttagcatcaggttaatttgaaaaatacttattgagccaccaccatatgtcagccactactgtagatgttttgaatgtgtcagtgaacaaagcagaaaagatgtatgccctctggattcttgggggtctcaaatagtgaaagacagatacgataagtatattgtatagtatgttcaaaagtgataagtgctgtgaaaaaaaagaagaagggtaaaataagagatggctcatgctggagtacattccaattttaaatagggtatcatggtattcttcattgagaaggtgacatttgagcaaagatctcaaagaatgaggcatggggttgaatcatgtagatatcagcagtaaactcattttgggttcagtaaacagtcaatgcagaattcctaagccatcggtttatctgctgtttggggctggttatctgcagtgtggctagagtgaagtaagtgagagaggtttaggagagaatgttagtgaggtgagggtggacctttgaagccattgtaaggacgtttttctctttctaagtgtgagaagatgatgctgactgagaccagggtgataagaaatagtcatattctgaacgtgtttggaagtggggccaacaaggatttctggatgaattggataaggggcatgggagaaaaatggagtcatgaatggctccaacgtttttgctctgattaactggaagggataaagttgccctaaactgaaataataaagactatagatagaatggggcgattagggaggcattaaatttggatatctgttagacatatcaccagatatattgaataggcaattgaataaatacctttagagttcagcaaaaaaggtccaggttggacgtttaaatttcggaggtgtttgtataagataacatttaaagctgtgatatcagattgtatcactaaggaagaatatagatagaaatgacaacgtgactaaggactctaacattaagaggtggattgacaaaggagaaaacagcacaggataatgaaaaggaatgatcagccaggcatggtggctcacacctgtaatcctagtactttgggaggccgaggcgggcagatcacgaggtcaggagttggagaccagcctggccaacatggtgaaaccccatctctactaaaaatacaaaattagctgggtgtggtggcacacacctgtagtcccagctgctctggaggctgaggcagaagaattgcttgtacctaggagacagaggttgcagtgagccaaaagattgtgccactgcgctccaacctgggcgatggagcgagacttcatctaaaaaaaaaaaaaaaaaaaaaaaaaaaaaaaagaaaagaaaaggagtgatcaatgagatgggaagaaaaacaaaagtgtgtggtgtcctcaaaaactgacgttctattttcaaaacctacattttgggtctccttttactatatcctgactttctagctatataaccaaaaggagaaagcagtaatttttttagatataacatgttaataactctaagggtattcaatgaatctgaataattcagtggtataatgtgaaaaaatatagtattcataggaaaaggaacagaagttagctcaggaaatgacttgaatgaacaccgaagccaaatctccagcgcaggtccacgtattatttgtctcagtggttgaattagcagcaagattccttagtaggatgaaaaaagatgttgtgagcatctgtatctacatgactgaattaaattcctccaacaatgaaatgtagttaacgtagtatctcgaaaagaaccctaagtggaattcagggaacctaaattccaaccatggttttgctgctgactgattgcattcacttcaaatctatcattaacctccttgtgcctcattatcctcatttcaccaaataagaaaaatgaaatattcctccttccctacctcactaggatgttgtggatttaaatgtgtgagaagtgcttgagatgcataaaatttgatggagtgttttattcatgaattcaaggcatctgaagtaatttgaccatgatggacagttgcttccttgcacattttttagagtgacatttccgttactgacccacccatttatgcaacatgttgcctaatctaaatttaggtcaaaacaaattgaccttataggtaagcattatatctattaatattgtatttttgtattattttataatattcatcattcacctattttctcatgcaatatatgttactgaacacatatagattaaaaagccttcatccctaaataacaatgatgggaccttccatttttatatccctctggcatttaaaatgtgcttttatagccatcatctccattgatctctcagtcccttgaggttgatatgacagatatgctttttccattttaaaattacggaactgacagtctcagatgactttaccctccaactactgtgtgaagaagcagggtctggcactgaggtcttctgacatccagtgtagagcactatacttcacaatatggccattggcttactttattacaagcactaaatattttccactgaatacgtaatacctagaggagaatgtcgtgtaaaacagcagcagtagaacagaggattaaatgacccattttcttgaagttatcttagttttaaagggttttttcttcatcactaatgaccatccctgactaagaaattattctcataatacatgataatatctgcgttttccaatgcgacaagaatgttaggatgtctatacatgatcttgacaatccctagctccatcacaatgtgtccaaattcattttatttggctagacaggcatgtagtcttactttcaatggttggctctgctggatgctatgtgatctagaacctgtcacttaccccttctaaacttcaggaattttttatccttaagataacaagaaaactcgtacctgtttcaaagagctgtttgttcaatcacctatccattgattatcttctatatgccaaatgtttttctaggtgctgaattacaggaatgaatcagaagcaaaaagttcttactctcaaggatcttatatgctaatgaaatagatgttaaaaaataacaatttttgtttcattttattttattttattttgttgagacagagtctcactctgtcacccaggctggagtgcagtggcacagtctctgctcactgcaacctctgcctcccgggttcaaatgattctcctgcctcagcctaccgagtagctgggattacaggcatgcgccaccatgcctggctaatttttgtatttttagtagagatggggtttcaccatattggccaggctgttctcgagctcctgacctcaggtgatctgccctccacggcctcccaaagtgctgggattacgggcatgagccagcgcacctggcattaaaaagtaataacaatttttaaatatcaatatgtcttatacagaaaagtgagcagtgtggtagagtgtaactggaatgtgagttgagacataacaccagacagagaagccagagaaggacttttgtttgaggaaatgacatttgaaaaggaacctgaatagtgacagaggcagatacctaaagaatatgttccagacaaaggaaacaaaaagcgtgcaattgcatagtcaacttagcctacttgaggaaaagtgtgagtggattttggtgatggagaggtaagtgccaggagatgaagggagagatctggcatgcatcagatgatgtgcagtcttccgggacgttgtaaagagttgggctttttttgtttataaattaaatgttaagccattggggtttttaaccagaggagttatgtgatatgatctatagttaaattatgtttgttcttggatggagtgtgcattatgggaatttatacagaaacaagatttcacatatatatatatataaaactcagtgtcaatagaaaataataaaaacaaattttatccattgataattctggcattgatagtagtgggtatggtggtaataattgtgtgtaacactcaaactttctgaaaacctacacttgatctgtaaatccaaaagtatatgtagcaaaagccataatctgctcttatttctgcaccacttgcaccagtgtggagtgataaggcaaattattcaggcacctgtgtaagccttcagtgtcctcacccccttgttataactctccactaatattacattggtaaagacgtccctgacctatatgtcactgagacctcaaagaaaagagcaaagctaaagcgtaagggggaaaaaagccagcttaaaaagacttaaaggtttctgggaccaaaaaaaaaaaaaaaaagtctttgaaaaatgagaaaggaaggatagaagaaaagattctcctttggtcaatctggccaacctttggaaataaaaagtattgtgttgcagctaataactatttgtcactgcaggcacttgctgatgtctgccctttaaaatgacccaaactcgttggcctcgaaatcagaagccaaggaaaaaatcttggacataatgttttctgtagaattaccaattttctctctctctctctctctctctctctccctccctctctctctctctctccatatctatatatatatagatgtatatatattttttctgtaggaactaccaattcctatctatagggactgattgagaagtcccttatagcagtttttctttggcttttaggatgcaatgattattggtgagaataactctttcatttcacatttgtcattggcttatttgaatgtaatcctgattcaatcgttatgatctcctttaagtaggaagagaagctggtattacattgtaggattttaattttgtactcatgaaacttttgaaaaacattactcatactcttctgactgtcaaattggcctctaagaggtccacatctcaagaggtatcaagcattggtaactattttttggtgttgttttctcatcataaaatgtacttttattaggtgactttggaaattttattgaatcaatgcatgacactgcctcattctagtaatctgatgaagcaaagctgaaaaacaaaatttgaggattgtcagtatatatacttttatttgcagtcaagagttatgctgcaaaaatggtttattgaagtaacaaaattttagctgatatattaatctgaaagatacagtatacatttttagtatggaaaagatgaggaaaaggaggttctctttcctctaggtatctagagcaaactgtaactgtccttggtatttaatttttggctaaggtactgagattagaggtggggccttagatatgattaattgtcagactgataagctagatatttcattgagtttctgttgtgctctttctttcagatcctctgttcgatgctttgttataaagatttgggcatttcaaaatcttctccatatctggtgtctttccaaacagcaggtcatagactttacacaaagaggaacgacacaggttataagtagaagtgttttaaaccctgagttcctatttcagttttgctttcttaaacatattttccttatgtgataaatgcgagtgttgaatggtgataaataccacccataggctttaaagcctaaatgttgaatttgacactgagagtttaaaggcatcatgaaaatttctccagaactaatgttcaagcaatttaggttttacaggcaactcaatagttttgaatgatgtagttattttgaaaaagtcaccataaaacgctatgtttagggaattggtactttgcatttatcagaagattgtaaatgtcaatcgattggcttgctatttggaatataattttttaaattatagttcaaatcattaggatttaattcatgattttgtactacaaactaaatctatgaaaaatatcagatatttattttaaattagaggcatgtaaaggaaaatataaattttgaaatgccattttactggatttttctcttcagcccaccctaggcatttgttacataaaatatttctgaggaagtcttccactgattttgtaaacaaacatgttttattgaacagttctttgttgactagattaacattgaccattgtatgcaatgcattctcaaaatcttagaagctggttttctttttaatcatataattttacttgttttacagtgaaattaatgcatgtaaaaagtatacctatatagaaagttaaaagaatattgctaactagttactatacttccaaattgcctattttctgtgtcttgcattggacagtagtgattacctctaaaagaaaatggatggtctttgtttcattgaagggatggataatggacataactggcattcttgagcaatgcaattgcaaatacatgtctttgcatttatggtccaatcatcttcttactatgatagcatataattgaaggttcaaataaatgcctcgtcccttcctgtggcatattaaagagaaagaaaaattagaaatactttcaaagctacctcacatactaatggtagagttgtttgagtatttaggtgatttaacaaagctgatgtattttattatgcttgatcattgaggaaaatttatttatcggaatgcttttgagagcatatatattgtcagagataaacacagctggatattaaagaggtaaaaacagattttattcaatacctcgtgaaattaggggagagctgagatccattctaatttgtgcagaggcgacttggttgttttaaggcaagaaggagggagaaggagtgggggttcattcgagttagagaagtaaaaaagtacaaagggctggacagtgtaaatgtgattaggccagctgtgttagctggaagttattgaagttaggattctatcttcccacagagaacaggagacagaggacttatccttcttgatgatgtcatttgaaaagaatggctttcaggtccttgagtgagagacacttctgatttccaagagctacatgttcacaattgtaagcccttttgagtaaatgttctaagaaacggaggtaagagtcctatcaacagatgtgtgttggctagaacaaacattaaattttcctggcagcactgagctttctcaagcaggcacttaagggaaggctagggtcatcctagggacatggccttctggggctagaaaccatactagagtttagtcaagtcttagtgcaagggtttggacagagttgttaagtgctgagagttctgtatttctcactgtcacaaaggaagatcagaagctcctgatacttttttcatcagtacaattgaatatataaatcctatacacaaaaataaactaagcttatacaagcatattggtcaaggaatgttgctggccttattaattagatagcccagttaaaagaagaattttttaatataattaatgttaaagtaggatgatagtatataaaacgtgtctactgtcctgaatacaaactaaactgtttggtttagcatttacctcaagatctcttaatatcccccaaagggtccctaaaaccacaacttatctttgtgctcatgaagtagagaagagacagttaatagacatttctagctgatagactgttgtagagcagagaacgctctgtgtttttgaaaattaaacatatgaatttgcccctcttcccctattaaggaagaagagtttcttaattgtgcgaacacatcaagtgaactattcaattagatttttgtgacccagggtataaacatctggttaaggttacatatttcaaaggaacaaaacactagaaactcttggttttaaatctcatggctggaggataatttgcagcagagatttatctggcaagcatacagaattgctgagactgttctaaagatgtaagtgtgggtgtttgtgtcgtgaaaatagctgtttacatctattaagtggataccgatggttgaaagtgccgtctatgtcaagtttttaccaaatcaacttttgcctcactgtgtcagaccattttacctaatcaacttggactgctaatgtcctttcccctggcaccactatctgtctcttttgcaaagcacagaaacggcatgcatgattgtagtttataaaacacatgtaccaatgtggtctacagcttctgttgagttcgagagggtcagtttctgtaatctcttctggcacagagtcaagaacagcttcactttcctcctgctacctctctacccgtaagtgtgaacccatcactttgctaacactcaggaaggggattacacaaaatagagcaggagccctctgacctgaatatgcatctgagccctagccatagagcttctgattcagtagatctgggatggggcctaaatatttgcatttttaagtgtataagtgatgctgatgctgctggttccaggaccacattttaagaaatatcgataaaggtggagaattaaactgcagctcagaagacctgagttcttgccccagcttgacttttacaatctagcaaatggataaaactcgcaggacttcagttctcttcatctacacagtgagtggttagattggctttgtaatttaaaattaaacagggtttgattctgattcactacacaaggttccaaagaaggaatgatatctcctttcatttcttcactttgtcttctgtccctaggtaatcttatctatgttcctgatttaacctaactaatgtttctgcaaagcttctaatatttacatctccagccctgaaactctcatttgaatgctagtcttatatacatacccccctgcctaattgacatctccacttaaatgtatcagaggcaactcagactcaacaaggaccaaactgaatgttcgaccttgtccttcaaacccgatacacatccaggttcctccatcccagtgaatgacactatccagttaagcaagccaaaagtctggattttttttcctcactcttcctcactgtccgtcaactaccattattaaatctgtcacctggtcctactgatttaaccttctcaatatctctacagtttttctttatgcccattagtatcctagtgcaagctaccatcgtctctcattggaattaacacagtaacccccctacccaccagactgttctgcctacagatagtgtgatatttaataaatataaatctagccttggctagatttctccttcaaaaggttcacattaattttagccttaaaatggtgtgcaaagctttgcatagtctgtcctttgctatgttggcagtattttttactatccctctcatctgctcattctctgtactccaactacactaactttgtttttttttttttttagatttctctaactacagtgctgtaatctctttttcctttgcacgtactattccgtttgtcagggaatctgctcactgtctccacccactccacacactcacgttttcctgcccgtcttaccggtcttgatcggttgtcacttgctcaggaaggtttccctggtcaccccctccacaaattgaattaagtcctcttgctgcatgctgtcctagtgctctttattttcctctcctcatccttaattcagtttgtaattacatgttatttgtgtgaggatttgattattatctgtgtcacccactagatattgggcattctttacttactcaccactgaattcatagaaccacagtaattgtacacaacaaatattcaagagaaatttattgaattgatgaatgaaaagttgtaccttaacatgttcctgacatgtatccaaaaaagagctcccctttggggtctattaggactttggacctaggtaaacgtaaccctagtttcgctcaggtttaaacagtagaaagtaattgggtctcttttgcatgtggctttcctaagggctaaccctgtcttcggaatgagtcaatacagcagagctgttgaaagcagactctagcttcggacaacgttggtccgaatcatggttccgtcatttcttagctgtgtgatttagaataaattaatgttttaaagctttgatttcctcttccttaatctggagatgctaataaagccaacttcgtagaggtattgcgatgagtaaataagcataatttgctgtaaacaccttgcagattgcctgttgtatgctaactaatcaataaattgaagctcttaacatcattatattagatatttccagcattgagtatactatcaggcatgtggtagaagctcaatataaagttttgttaaattgaatagattccatatatggtatttctacagcattatgctccttatttaagtgtctctaagtattttttaagtatcacctcacaaaagacagatgtttaattcattacacatgtgaattgttttagatagaaaataaaataaaaaattcaaacattgaaatcaatagtgtaccttaccttaggattacaccataaaatttctaccaatcgagaataaagtgtacagtctatttcctttctaatacttttaacgcaacaaatgtttattgaacacttactacttctaatctatgacagacataaagatgaataaagcatgccacaatgtttaaaggagctcactatatcataagaaagcggattcacacagacaactctataagataaagtggtaaatttaggctggcctgtgaaacaaaggattataggtatagttaagaggtggaatttattttacttcgaggatttcagttacctttatattctttgtctaacctttcatgtttctctttcttcagaaacagagcacctttttcctgacacattcatttccccctatggagtagagcagttgttttcaaagtgtgggtcccagatcagcatcacggggatggttagaaatgcccattcttgagcctcacaacagacctactgaaacagaaattcttggagagtggagcccgcagatctgtgatcaagccctgtaggcaattctaacgcacactcaagttaaagaaccacgggaagaaaggtccatcctgtaacaagacagatttttttcattagcatcaattttgatcatttatatatatatatatatatatatatatatatatatatatatgcatgctcacaaaaccattcaccttactaggttttagtattccccttcctgtattcatgtggtatgtatgtatacaagatgaacacacatttacctgagacaaggtaagactacacatgtctcatttggggaccagaggctgtaatcttactcaaggtcaaagcgtcttcactgctttctttcactgcttttcaaaagtaaaatttccatgtaggtgtcatttgttttctttttgtgttttagaaaaccgattaaggggtgaagtctggctaaacttagtgtcaggacatttacttagataaaattattttaatttatcttgtaatgttcaatgtgagaagaaaagtccttatgagtagtgtattccttaaataacaacaatttaaaaactaccactgaagtctgtcagagtagttttgcctcatttgtctagataagagaaaaaaggttcacattagggattgcaatttgtctgccaaagtgcagtttatttattcagaaacatttagagaggaatgtgtcagttctgttgcaggcactgtgctgtgacggggagctcaagatgatctcaaaaaatttcacagatggggtgggcagggggcacagagagatgtatttagtggttcagatactatttagactgtggccagcatttctctaaatgcaatccagataacaccttacagaatcatctgggcagcttgataaaagctgtagactcctacccttcatcccaaacctattgaatcagtgtctgtgtgtgaagacctagattgtgactggtaattataccaaagtcttagaagcaactctaggccagtaatactcacatcagaatcagctggagggtttgctataccacagattgctaggttagccttcagagttgctggtccagtaactttggtgcaggtccagattttgcatttccagcaagttaccaggtgatactgatgctgctggccttgatcgtgctttgaaaaccactgctttagctacgctataggaaaaaccatataaggcttttatactggccaatgacttcacaggcctgaattttagaaagcccccttctgcagcttggcctatagattcgaaggaaacagaactaacacaagaaagctagttaggagctagttaaaaatcatcctgacttgccaaggaaaggtgctgaagacctgggtcacagagcaaatgcaaaacactaggactttgtccctagttcaccattaaatcaacttattttctcttaccccctcatattcacgtttactccttactttgtagtggttggacaaaaatcaaataaatctgagaattctaaaatgcacacccttgtttattttctaactcaaatatgccactgttgtctgtgctctgtcaagatttcaacacatctttttctcctgtttgcttttccttttggcatatagtgagtgtgtgtatacacacacacacacacacattttttttgactccttccaatgcccttctgctctccgcagatacacttctgcattctgaataaaaccgaatacatatatatatatatatatatatatatatatatatatatatatatgcacacatattttgaaaaccttatttgaaaagaaagctttcggaggaaacgttatttagccacttaatcgagtcttttactgagggactttttgtcgtcccctaacttcctgtcagcagtccacaggcagcaggaataatgtgggagaagatcaacaggcttatttcaggaggtcaggggccagtgccaccacctgcaggtggagacatcagaagcaggaagcagcccaccagctgcagggagaactccccacagagcctaaccaagatgaagggacttgtaaatttcaaccctcccttttggcttttgtgctaaaaatgtgaatattgaggtctgccctgattaagaactagatacattcctctttgtgactgccacacttccttagcgtattcattttttgtctttcgatctcaagttattattttcaaatgcattgcacgtatctaccatggataccattgcaattggaaggagcaaacgttttgtatgtttacttgacaaagagaagtgactgcccaagccacacagagttctgcacaaatcagtaacttctaacgaacgtttgcacttccgggcttgttctctacctatttcagtcgatgcatttgtattatttacttcaaactccaatactaataatgcctcaatcaggttgcaattgggatttgagcagccagaatttcagaaatttggtttggtccatatctgtgacaggtcagtaaatcagagaagcaagggtttggttgctattataatacattgcttacctatcaatttagttatcagccaaggtggttgttatcatccaaagtggctcattaaccaccttggagactcagtatacaattgcaagtaaccctggaagttgtaaataatcccaactgaatttgtatgagtttggtaaggttaagtggaaaccagctgcttagggccttgattataaatgaagttaggagtggaagaagtaacaaaaccccaggcaaattcattaaacattttttcccttcaactttatgctcacgaatgtgttgagactcttctgaatccataaaacacctttcagcatcatctgggcagcttgataaaggctgtagactgcctgcccttcatcccaaacctactgaatcagtgtctgtgtgtgaagacctagattctgactggtagttataccaaagtcttagaagcaactctaggccagtagtactcacgtcagaatcagctggagggtttgctataccacagattgctaggctagccttcaaagttgctggtccagtaactttggtgcaggtccagaatttgcatttctagcaagttaccaggtgatgctgatgctgctggccttgatcatgctgtgaaaaccactgctttagctaggctataagaaaccatataacatggacaaggcaaatgaaaaggttggaattcttctgaatcccaacacatttgtgagcataaagtcgaagggaaaatgattcttctgaatccagacacatttgtttaaggataaactgttttttccttctgaaaatttaatgtctgattctcgttcattcattcatcaaaagttatcaactatcaactataggtaggaactgtgcaatatgctggtgataaagagatgaaagacacagcccctcccttcaaccagctcctagttgaggtggcaagtcagctgtataatcaagtaattgcaagactgtgcactgaaaagggtgaccacagggtgtgatggccacccagggctgtggaatcagtcccaaaatgaagaatgaaagcagggaagggtaattcagaaagaagaaacagttcgcataaagacccatagataaacatcaatcagatgtggttaagacaaaagtaagtttctggaggctgaggaccttctcagctatatgtttgcagtgcttggtatagggctttatgcatctacatggaagacagaaagggccacatcacagtggacaaggcaaatgagaaggaggcagtatcagaagatgagggtacaccggagatcctagttatatatgggcattgtgttcatctcaggagttactgagtaatgggaccttgactcaaatgaatctcaagtctgtttttgcctaatcttggttttaggactaggattagcatacaaccgcactaggagcctagttatacgaaaggctgcattgcggacctgatacagttcaatatacatactgtcaccttgcaaatagggttacgttagttctcaagactgccaatcctctgtgctctaatccttttggcttttttttttttttttttaactgtctcactctgtcatccaggtgaagtgccctgggatgatctaagctcactgaaacctccgcgtcccaggttcaggtgattctcatgccacagcctcccaagtagctgggattacaggtgctctggcgccaccaggccctgctaagttttgcatttttagtagagacagggtttcaccatgttgcccagactgatctcaaacgcctgacctcaagtgatctgcccgctttcctttggcttttaacactatagagcaagggtccccagccctggggccacagaccagtacaggtcagtgacctgttaggaaccggggccccacatcaggaggtgagctgcagggccgccagcattaccacttgagctccaccttctatcagctcagcagcggtattagattctcataggatcacgaaccctattgtgaactgtccacacgagggatctaggttgtgtgctccttatgagaatctaatgcctgaagatctgaggtgcaacagttttatccccaaaccatcgcctcccacgcacctctccccacaaccccacccgcccctgatccatggaaaaattgtcttcctctaaaccagtctctggtgccgaaaaggttggggattgctgctatagggcgatggttttcacatttgatcctgcatcaaaatttccaggtgactcattaaaatactgattgctgtgccccactcgtaggagttctgataaggtagctgtggggtgagacctgagaatttacttttctaataagttcccaggtcatgctgatattgctttgataaccaaagcaatatcagctttggttatcaatatataaccaaagccacatagagggggagaagttccttgggtttagcccagtgtttactgcgaccaccaaaattgctggagcttaaccatggctcagagagttatgttctgttcactctgtaggctgctattccctgtcaccttttgaactatgatggaggggaagagctgccagctcaggagatttcacttttttctctgcataattgaaaatccagaaacacagggttttgggaaagctatagaacagatcatcagtgatcagtgtttaataaagtaaagcaataaactttactgtgtaaaataggatactttattatataaattttgtccccttcccccacctcacaggccaataaaataatatacttcttgtccctgggtgtaatgttattggaaacctttgaatgtaggagaggcatgggcttgtaagttgcagaaaactgctagcctaggattgagaatttcatggataatccaaaaatagatgattttacagttataagccttacgtgaacttgaggtaagaaaacacaatgcctttatagtcttctcagttgctccacatgccctctgagattctgttctgcccagcctctctggttgtcacatctctgggcattaacagaaagttcacatactctttgtctctgatgataatccttctaggtccatatagaagatccctatccaaaccatcccccaaacaaacctattggttaaatattttctccaccgaaggcactttcttagattctaagtgccctgtaggcaggcttcctctctgatttgggagagtacaaattgcgacaaggttaaatcatagcctgggaatttgacctaaaattcactcttctcccatatgcattcatgaaccttctgctggtttttaaaagaagctacttaatgtcagctcgaagaggttggaaggggttaaaaacatgagcatggcagtaagaagatttatgaaggatctgagaagattatgacttgatcagatggtattttgtcagctagccacatttgtgaagacttgaaaactagggaggcttgtccttctaagagggggcactgctgggacctggattctgtggaaccgtattagtagaataaacaataacctttgcttgtatcaaatgaacttctattctcatgtgtcttttgacatatttttattaatcatatcactgggacctccttgctgaaagatatctccgttccccattctgatgactcccaactaggagtgagatcaaatgaagatggcatggaccatttctccatgtgacagctctctgtggttgccttttaacacttctaatgccctttctcttaagaattcccatttgtcgtctggcactggtgctgtgatcaataaaaatgtaatggagtgaggcttagaaacatgaggaaatttactcaagctatccatttattgatgtgtccatttgtgttgtcagggaagaaaaactttttcactcccctcttaggttcattacttggggggctgcaaattaaactgacgacagatagattggcaatagaaaagacaaagtttattcagagaagtatgtgggagctcacagaaaacatagctcaatgaagttagaatttggggcttatgtactattttaacaagggttttgaaaagaagagtgttagaatttcaagccacaaagttggtgggaaatatgaaagaaactaatgaaaggtaatgtttgttttagtaaagtctgtttatgtaattttcttttcccagcgacaacttctcatctctggtgacaggagtcactctttacccctggtgcaagaaactttccttaaaggaggatttaaaacagttgaattatttcagaaatctttgcttttaggcagatagggggagtacagaaaaagccccttcccgtatctgttgatcctcaaatggctttagctcaaaacaatttttacatcacgatggcataatgtagatctcttcaatgtgttcatttattccacagatatttgtgaagtacatgatatatgccaggtacttgggatacaagaatacataagtatgtccctagtctcgtagaacttacactctagtagtgagctagagaataaatgatattatttattatatgcatacacatatgatttcagatagtgatccatattggaaataaagctggttaagggaatagaaaatgatattgaaggtggacttgtttagattgggtggattggcatggcttctctagggggcagtatttgagcagatatgagagcagatattctccaatttgggcaaaaacattccaggcagaggaaacaagggcaagggcactgagttcaaaagagacttgacctagccaacaaatagcaaggattccagtgtaagagaaggtggggaaggaaggaggtgcaagtataggcaagggcaagatcacacgggatcttgcaggccgtgataaaagaatttaactctttcataattttgacaggacatcattgaagaatttagaaaaatagagtggagatacctgatctgctttcttcaaagagttcattcatcattgctgagtagaggttagactgaaatggaagcaatagtgaatacagggagatagcacaggaagccacgttactagtccacatcagaggtggttcagactagggtggagtggtggggtcagttagagagctggtatttaggatacattttaaagacaaagctgacaggatttgctgtgatgaattagatgtaaagtatgagaataattgagaattatttctaagttctttgctggggaaaagtggaggaggaaaaagttagggtacaaggtgtgatgaaatcaagagtctctcttattatcagagtctcattagatatccaagtggaaatgctggaaagaaagttgggtagatcagtctgaagctgaagacagatactgtgactggaataataacgtaagagttggccggacacagtggctcactcctataatcccagcactttgggaggccaggataggagaattacttgagcccaggagtccaagaccagcctgggtaacacagcgagacctcgcctctacacacacacacgcgcgcaaaaattaatcgggtgtggtggcacatgcctgtagtcccagatactcaggaggccgaggctgaaggatcacttgagcctgggaagtcaaggctgcagtgagccgtgatcacaccgctgcactccagcctgggcaacagagtgagaccctgtctcaaaataaataaataaataatgtggcagtcataggcccttagatggtttttaaagacatgggactggatgaagtcttctaggaggagagtttgggaaaagagcccgagaattgactgcacctttcaaaacaggaggaagaaaaaaaatactcaaaggagacaaaagcaacttctgtgatttatagagaaaaccaggcaagtgggatgaagaaagtccttcatgatagaatcaaaaacagtgtcaaatgttgaaaatacaattagacaaacacaaaagaatagaccattgggttttgcaatatggagctcatacttgaccttgataaaagacattttcactggaagcatgcatcaaaaaactatttgtggtaggttaaaatgtagtaggaggtgaggatatacagacagtggctttcactgtgcagatactgctgctcatgcactaattaaaagacatttgttgagtatctactatgttgtatccattgctaaatagtaacagctgggtttagtcaggtagaacagcatcaaaatcattatagtatcccaagataggtacagtaaaatctgtgaaggaatcagagtagtctcttctccaacagagcgtaagacccagcttcacggagaaggtggtagattagctcatctgggaggctgagtagaagcttgtcattatagagggagaacatcagaagtgtggacaacagcttgaataaccttgaaaggacaaaagaggacggtctgccctggaaatattaagaagtctcacatgattagacacaagatattaggggaaaggcataaggtgaattgagtcaatgaggtcaaagagaagctagctggaggaacaggcgatcataaaatgagtaaaagtatatattcaaagattctttttagaagggctacacaggatggataaggggagagagagagttgaggcacagagacaaattggaaaggtgcaatcataaccagagacatgaaaaacccatagaaatctgatgtagattatgtggtccccaaggttgaacaattaagtacgctttcagttgttatgcccatgatattaacatattttataactgcaataagtgctgaagctaaagataaatacaaacaatgtaattcttattctgtgagaaaatgttgtagctggaagttaaacatgtttcttagctaaagaaaaatattgtgtgatctggattacttaatgttataatttagcaacaaaatgttgacattgagccttgcataatcaaaaaagtagtctattcaataaccacattctcagaaaaaaaacaagaaaatattagaaacaatgataaattatcgtagtaatttaattcagtattctattgttttatttggatttaggaaaggcagaaatgttgaaatattaatatatatccctgtaataatataatttgtgtctgagaggtaggaatgagggcatgaggtcaaagtttgataatgaacttcaaagctataactatgatcaggaaattaaaattggacaataaattcctagaatcgtcaggagttgcttgtgaaatcgagaaaggaaaggatatacacaaaaataaagaacagccaatgctctcaaaggagtctaacttttataatagtcttctgtgttagagctgaactcttctggtttagaaggacactctgttgcctggaaatagggcatggaaaaagtcatcagagtcatgtcatctttcattcttcccatgaacgaaatcgaggccctgaaaagtcacctgtgtttgctgtattttattgcaactaagatgtgcatttttaaattgatacataataattgtacatatttgtgggatacatgtgatattttgatgcatgcataccatgtgtaattatcaaataaggatatttctgtatccgtcacctcaaacatttaccattgctttgtgttgggaacatttcacgtattttattatagctattttgaaatacaaaatagattgtcattaactatagtcaccctactggatgcaccttgtttttaatatttctgaaaacagatacgtctcataggtgatggtgtcacagctgtgcattagttattattgcctgtgcaggtgcaaacgtaactattcatattgttgtcaattaattaaatagttacatttatttatatgcgtttattatactaataaacacaatattgagatagttgagctctagttttgactctgctgttaactagctgcgttactttaatttacttaactaatttggctttcaaattcctgataagtaaaattacaacatgagtttctcctgctataatagcctgagaaatcggtgaaacacatgaattcagatgttgatgctatttaatagcgggattccagatatctacttgccattatgggagggagagaggaggtggactggaggctgtgatttccctaggaggttgttaaaattggccaggtgaggaaagctgagacagaccataaatatgaagcatgatacctagccctcagtgttgaaagaaaatcaaatctcatctttgtggtctaaatatcagtatgatacaatcctctgtgtagacatatcctctgccctattgttttctttctaaaagctaaagcccaggtgtgatcacatccctccgttatttacaaatttctgatgatgatgattcttctaatatctacattccttaccattaccatgatgtccaaaacctattataatctattcgtctccaagtgccatgttgtggtcaccctatgcaccctctaaacccaccatatgaccttcccgctgctacttgaatacagttggccctctacctcgttgtgtctttgcattgcctatttaattgcctttccattctctaaatcactctttcgctggaccagcaacatcagcaccatctgggaattcattagaaatatagatcctcaggcctcatctcagacctgcttgatcagaaacattggagagtggagatgagcagcctgtatttttatcagccctctaggtaatttgatgcacactaaagtttgagaaccactggtctagagcattcttctttaactctcttctaaaaattattagaatgaattcgagggacgggatctccttgaaagccaagaacatttctttgtcatctttctgacttcagggcgtagtacactttttggcccataattaaagctcgataaatgcattctatgccaataaatcagctaatcaaatatattattcatgcccttgaggtatctgaaatttgtttgcagaatgtaatatataactatagagtaacaagagaataatttattgccatagataataaaacaatatcctctgtataataaatcctagcctctgctcaatgggcaaaaacgggactggggtttcagattttaaaaagattattggtaattaaatcacctggagaagcacttgctgcagagatgggacttgaagcatcataataaactgttgtttattatgattcggtcagagctgatggaatcacagggattgtgtgaggtatggaaagtggttgacattgaattccaggctgcacagttgggacttgatatgataaccaaaaagaaagaatgtctggggtggtagcaagctctaaatttagacaatctaggcttatcctaaggagaatatagatacagataactgaagtttgattaaagggaacctggtgtatcacaaatagtaaaaagctgtagttagtctatgcagctatcagctagccacataatacttttgggcaaatacattataaaccaaaagaatgacatggcttatctctgtaacaaagtggctcattgttctttattctactgttatccttaagaaaaaaattttagtaaatttgttatgctatactcaacttcaagaagggatagcgcttataaaaaaattgtttaaagaaacaggcctatttctctttgggagaagccacggagaaacgaaaagaatggaacgtgtgtttctgcccagatggcaataaaatgtagggtaaatttctgtcttttaaaactgtattttttccatccctctgtatatacacatatcctaggactgttataaaatgctgcatgcgtatgtgaaaatggaaccttattgggctgtttgatggacctttaaaatatatttgttggtttggggtacatactagctatgcaatataatccgcattatttcttatgtaaacaatggataaactgtttcacagtccagacatttatttggtcactgtttgtagaatgtctattttatttacttctgaatttgtattccagagatctgccttcaatgttggatacttccactgtaatattctaggagatgctcactttctttttcagcatctgacacagtaccatctgcctcctcttttcttgccacaagtaataacaattttataaaggaggatcacattacagaattataggtggtaaactttctaccaccagatttacccaagaacctgaaacacattttttcaaaaggaaatagaatgtccttcttgtgactacatcggaattttgcttgcagcattatgctttttttttccccctagtgtagctagccatgtggaactgaagccattagccagctcctcatcctataaatgctattacctgggaaaagaggcagaaaatatactctcttctccagttagagtctaaaggaagagaacaatatgggtagttgtgtttaccacaaattgatagaactcctttattttaaatgctaaaaccaaataacttgtttatatgacttcaacattgactatcacacactgttgcatgataacagagtgaaaactacctctattggatttaagtggggaatctatgtctcattctcattctttttttactgtggaaactagttgattccaggatcagccttagctccaacttgccacactttgagttttggtttttcacttgcattgtcacaggaaacttctataggataaatcgaggaagattttactctgcaacgtgttgcagaattaaacatttaaagtggcaaaaccttcgtgtgtaggttgtctccccagagaatgtaaaaatgaattgaaggcagcacctaataggtaaacgacagccaatcaaacaagaacaaatgaaatttgactggcaaaatcaaattgaaaatgtataacgctgaatctcagaatataggaggatgcatagaaactaagctgtactattataaaagtcatagccattgaaaaataatgactggttaatttggttttctttacctcatggatgtgaatggttagattttgatgttggtgttatttgacgtgtgtttgtcaagaagttgccttagtcggctcgcatttaggataaaaaaaatattttaagaaatgtttaagagattatgttggagacattagaaacaaaataattatgcagagggcaggactatcaaaatataatagaaaaattacaccgctcttttatgatttcctcctttttggcatttaacacaaaactttatgattacacacaccacgcactccagaaatgcttaaaggaagatgagaggaaaattcaatagaagtagcaggcatttctgtgaggacagcagaatgatcacttcatctctgtattttttttttttcaaatttctgtatctgtacaatgtcttttccagctctaatattctgtgatttggtaatttccgcactcagattttctttaatgaattttgtatgatattacctatttttataccagatattacctggctctaatttctttttcaccctaggaaataaaagtatcgggtgaatttcccattttcttatgttattgatacaggtctctgttggatatccccacgattaactttcctgcagcatgttcgatggtggcttaaagaagaaaccatgtatcagagccccttgtctatatagacttttagataaagagaaatacatatcacagaattattctgggcgcatagagtctctaaatgcaaaaaaaaaattgtattgtagctgttgattcttctcagatagattgagtgtagagagagagcattccaaaaactgagcagaagaaacacagtctgaatcaaataacatgaaattttagctaacaagtaaataacacttttttcagaatatgcaaataatattggtttattatgaaaaatgtataggctgatagatgagcatagagaaaaaattataaatatcttctttaatatcactttccccagcaaaccacttttaacattttgatacattttcatgttcaaacatttcctaatagtcttttttcctgttatataaatatgaattttaaacattcgtatgtttatgaaaaggcaataagatactgctcttttataacaggctttctgaacttcacaacatgcagtgtattctaacatgctccttgtgttcttaactaataaaaaacctcacgttatttaaaaaaccatcttaaacataattatccattaagagaagaggttggggtagagagtttcagactatcaatatcaaagttatattttctgtaagtattttaatttttaagtgtagctataggtatatgattataaaaccaatagcagagaaaagataccacctttgaatatagttttccttggttccatgaaaatggcctcctttctttttgccagtccctcagtatcattaactcatttttctgtaaatgccatcattgtatcacatgtcctcaggaaaaggcacttttctcttttaagctagtgtttgttcttgttctaattttatggcaatttaacgagtaacaatcctgtttctataaatactgtttcctaattaatctattgcattctatccatgagaatttagatgactttctttgtaagagaaatctctgtagcatgagattcttctttgctcttaaatttcattctttcacatttttaaatgacctgatagtattttgttgtatttgtgctgattttttttaaccaatcttaccttgttgaacatgtaagttgtttctaatatttgcaatgatcaaaatgtggatccaacttcactaaagcgttaagaatctaaaacaaaacaaagaacaaaaagttggctgtcatcttgcttggaccaccccgtgagttactattttcttgtttccggtcacagttcatcctaaatcatttcagtacacaaaatgttttttaaagtttgggacagggggtagagaatgtcaattattcctccaaggcagtcatatgagcattgagtatcatgtggaatagttgttacttgtaaagttatggggcatcaaacccagtcaatatgtttctggaattgaaaaagtccctggacattctaatgatactgttgttcactttgcacctactgttaccactactttgatctgtcaacactgcccgtaatggttaattttgtgcatcaacttgactgggctacaaggtgcccagatatttggtcaaacattattctgggtgattctgtgcaagtgttatcagatgagattaacatttaaattggtagactgagtaaagtagattgcccttcctaatgtgagcagacttcatgtaattaattaaaggcctgaatagaagaaaaacactgaccctcccctgagcaaaagggaatcgttctgcccgactgccttcaaactgggacatgggctttttcctgccttcagactttaaccacaatattagctgttcttgtatctcaagtctgctctacttcgattggaactacactatcagctctctcgggtctccagcttgcttgttcaccctgtataccttgggagttgtcagtctccatagttgcctccataattgcatgagccaatttcttaccacatacaaacacacacagagacacacacacacacacacacacacacacacacacatataattatatatgtgtgtgtatacatattctcttattccttttgtttctctaaggaaccctaatatactccttattactctttctactgccttagagatcttcaaggccaagagcgtaatcctccatcctggctctttttcctaatcattaatgatcaactcatagccatttagctcaactaaaaataatttgttcatgaagctttacactcccacatactgaggaacgtggtacctaagatcaaacagtcactgcctcatcaaatgcattcctcttcaaccccatacaaatgtccccagatggaactcacaccataaaaatattagatcccattgacttttctgctttctcaaggatcattgcagagcttgaaaaagatggctcctccctttgcctaagcaggttaacttggtgtaaaagtacatgtaagatttggcacaaaggaaaataaatcagttttgcctgggtcctaagaaacatttccctctgcctcatggtaattgtacctgccagttgattgcattactcaagtggagaccatgaagtgaagtggtagaacaagaagaaatccctataattttattaagtatggtgaaaaatacagatatgtagagaaatgactgggattagatggagcaaaacataattcgagatcctgatacaaattgtacttcctggctcaagggagggagcagaacattccctgctacatgggaataataataaatgcctgataaaaatgcagatatatcatagactacagaagctgaagtggattcttatggtcccctactcagacagcctctccttcagatgaagaaactgaagcacagaaagctcatcctagtgtttcatattgaaaaacccattcaagtctattttaataacctgttaccaaaaatgagggaaataatttaactttaatgtttcactttgcattacccttttcctgactagacttctatccttttcttgagttgagctcattaactactatgaaattatggttatgggtagaggttaattttatacctgtccatcttctggcatcttatttacactaaaaatcatttttaaatggcttcattttaaaaaatattatttcagttgacattttaaaagacacatcatttatgtactacagaatatgcattttatactctcctttattaattttattattttccaggtagaccaatcaaatgaatcagaaattcttggttagatctattagacagcataagtatgtttttcatcattaaattaagatgaaaacacaattttactttaaagtgtttgacgtttccagcctttataaagtcaacacttaatcacatctgaaatttgcaggaaaaaattttgaaagccttcaattattaacattatttcgggagaaaaagccactttgccgcagaactttcacttttctctcgtgaattaagtctgatacaaattattcattatggtgaagtttaaacataatagagtctagctacttccacaaaaatactattcaatgagtttctacattgacatctaactgaccttgtaattaatgttgtacacgatccttttattatatgctggattatcaaatatgacttattagcagtataaagacacaaagttctgaaatgtaatttatagccatgaaaaggaactgagctttgtgtgacagttaaatttgaagagatcaggtgattattatgaagcatgaataataatgcatattaaactcacgtttttgtttaaatcattaatatgattgttttagaagaaagtctacctctatcatatgggcaataaaatgtgtataagagcaaacatttgtgtatgtgaaataactcaaattaaaaccagttttccacattaattcttacagtttttaaaatttaaatcatttaatgtatcacacatagctttattcattttaagctataaatgttacaatttctgtttaagctgttaatataagctttgtaagagcaattctgtataaatatagaattgtcattattcactaatagctaccatttatttagtgcttgttgagtgcaaaagtactgcactgagatctttgcatatgttctcttaatgttacaattcttacctgaggcatttctgtttctgctggaatatggtctctctgaattgaacaagggaggcatttttggttgttatgatgaaaggtggacactgctggcactaacgtgtgttggtaagcgactagactcttcatgatgcgtaaacagtgtttcctcatacccctgcacattcaaatagaggaaaaccttgtttatagttaatttcccctagaatgtaaatccatttaacatataaacacaaagcgtgttttgtgtggatgttttttactggagcagggagacaggagaggaaatgcagttttgatagttgctgaatttttcaagaatgcagcaattatagaacaatttctagaagtttcctaggagctcttttccatagcagaaaactaggacttaatagccttgcgactcatggtacttgagtgttccatacaactcacctatattcaggggacatttgaaaaattctacattaaaggggattcttaacataggcgcaagtgtctggcatcttcaataggtcttctggtgtggccatgaaaacattcacacgtttcaaagtattttaaaataaaataaaacatatattgttgtgttatgaattattttctttcttttttatatgatggttagatcactgtgcagacaagtttatgagatctattcatttcatttcagggtggtaaatgagggtgttactaaatgttggttctaaaaagggagacattgggtattacagaattcagaacagctctaagccctgtgcacatttagcattagaggacacaggcaaatctggcctccagtcctggcagcttcttcactatgtatatgatgttgggtgggttgctttacctctctagtttttacttttatttctaagctagggctattcatagttctttatcatgtggttactgtgaagtagcaaagcacctgacataattagagcagataaaatgctcaacaaatattgcttatcagaaggattatgtattacctcccgaaatacatcaaaaatatattttccaattcaaagaatatgtagtacaaaaatcatgcctaaattaacagagttgcagtagcccaaggagagaagataatcattattgatttcttcttcctttttgctaagcagttctctgtctctgcctcctcagttgttgtccatcccactcccccactcccaagccctgaactctgaggggtttgctgccgtggccggttctgtagtcattgctgtccaatgatgaaaacacaaaatactgcaacagaacactatgcctgtcagcttagctcccttctttctgctaaatgacactcaatcctattcttttgttctaaaggatatcctaaatgaatagccactggggggaaaaaaggttatataagattgtgcactgtgtgaaactgatgcaaccagatcaatgatgtgaatttctcttaactatttactgggatctagaaacaggtctctcaacttagcagtgtttacgaatataataggccttccttatacatacatctgaagccaatctgagtcaggaagagtcgtggtctgataaatattttgaaaacttgcatttgttctattaaagcaaactgtttattaatagtgtgccttattttttaaagcaaaacatttataaacagtagtcattacaggcacttcagtgtacggagtgatcaattgttagacctttaggaatcgattgtttcgtggagcttcggcttataattgaaatgtcatcagaaggagtgtaagacatagcttcaggagaggccatttatgcgcttttgttttcagctaagttatagagtcatcatgtgaagaaagattcttctcttagtaaaaatcctttaatggttggaataacacttgatatttaatatttctttctactttatatccacatttattcaagtgctaacgcgtgtggggcagcaatgaagcactttattccaacattatagttctcatatctgcgtatgattatttttcatttatcgttagcatatatataatgatgacttttaaagtacactgtattatattcactggaataatgattagctattaataatttgaacactatccaggaaattactgaacatgtcctacaagataaacctcgtatgatattgtctccaaataacagtgctaaccaagaagagtgctaccaagttcaaaagtaatcacagggagtaacctaaatgcagctccgttgggttaaaaatagtttctctaaattatatgttccctaagtttgagatcgatttctacaaggggataaaatgtttttataaattctcagtgataagtcatgtgattaagaacccccaactttttttccaaagacatttgcatctctgatcaaaataacaagatccagtcttagttataaattggggaattttcatcaaaataaggagctactcgttgcataagaagactagtacaacttaaagccaatttaatttcaatgaatgcatgatcagctccattgccaattgagtgtttttcttattcatcagaagatgggttcatcatcgtgtttcatatcaactgttctcaaaccatattgcccatttaaataaatatagatttgtctcgaaattctaaattcatgtcatatttcataaatagcctatggtcctatttattactttaaaatattatagatataatatttttattctaaagtaactgtgttatacaaccaaattattcatttaaatatgtgactttttaaataagtaaatgacttatttaagtaaagtcattaaaattttccagtctgtccttcatccacctgatctttgaatgagttaggaacaatacaggaaactaatacaaacttaattttgattacaaaagatgaaatcattctgttatttattcaacacactatgtgtcaataaaatcttatactgtgaaagaattcgtctaagtccatttgctgttgcttgtaacagaatacctgaaaatgggtaatttacaaagaaaaggagtttacttcttacagttacggaggctgagaagtccaaggttgaggggccacatctggtcagagccttctcccatccaagtactaaccaggtcgaacctcacttagcttccaagatcagataagagtgggcgcgtttaggctggtgtggctgtagacttgttagagcctttttgctcatggggacacagcagagccctgaggcagtgcaggacattacatggcaagaaggctgagtattctaatgtgttcatgtctctcttcctgttcttataaaatcatgaatcctactcccatgataacccattaacctattaatttatgaatggatgaatccattcataagggcagagccctcatgatgcaatcacctcttaaaggcacaatctcccggtgctgccacgttggggattaagtttccaacacatgaaatttgggggacacatttaaactatagcaaaattgtaataaaatgttatatagaagcaatgttcttactgattataattgttatattggtaaagtgttaagtcctctaaccaagggatatatttcagcttattataatagttttaaatttacaattcaatatgaataacatctggtaaaagttcttttcaagaaatgggaaaattagaaatgtttagaagaaaataattcaataaatattaagttcaaactggattcatagtttatgtgaaattctgggaaccaattgcaaggggagaaaatagttacaatagcaatggtgaggatgagaataagagcaggtatcaacgttaattgagggtgtgttatagttctaatcgtgctatgcccactacatgacttttccctgtgtgaggtttccgagcttcttcgtagtaatcctaaattgagctggagagaggctagggtaacttactcacgctcatagagccatagagtagtaaaacctgtatttgaactctggcctgtctgacatcattctgtggtcttttaaaccaccactgcttctccatattaaaactccaaatctaggtgaaaagaagaaaactcagaacatgttctgcaacaaaatataacaaaatataatgtatataaacacttatacataatatcactaatatctttactatgaaaagactctgatacgaacattttacataattcatgcagaagtgttaatcacattgtctgtgatgagctgtgtatgtatctgataaaattctggcaaccagacatcaactcgtaggcatagatctgtaacactaaatatttgcctcgagaaacttaaagaaataaagacaaatgaatgaataggaacatggaactgagtacaagataaaatcctcctaaagcaatcgatgtacttgctgctgcgttattgttctaagcaaaagaagcatggcgaagggagatgtgaagctaaaaacagaatgcttagaaggagatgatagcaggagggaagcaaagatgggaccaagctcccaaaaggcgggctttgaacaaacaaaacagaaagctaagcctttgacggatgcacgggatgcaagaaactttagtcaggaaagaggaggcgaagaaaaaccctccaaagaaaaggtgaacaatattttaataggcaaattgacagatagcaagagatatataccatgctatgttttctcattgcagctgaagacaaactggggttatttatgctttgaaaaagcgtaaatctaaaaaacaattgtggaggaagaagcgatgaaaacacgtgttaatacagaaaacatggctccaaggctttaaacttccttgtgagataaatgcatttacattttccgtagtagctaatatatatatatatacatatatatatatatatctgggaaaataatacacagtgattttctttctttttttcatctacttatgtgagaaaaaagtaggctatctgaaagcttttcagttaaatgaggaagaaagttaggtgatcttgtaaataatatatatgttcaagataatgtaaggcccttgtgtagttttcaaaacttatctttaatagcagtttcttctggggatggggtagttcaaagttgaaatgttagaaagatgttaactttttttcctttttacttctccctttcaggatggaattaacaaatttgattacaaatagatctcagagagaggcaaatgcattgaatccagaagtaacataaaattagatcatgtttagttatgcccgaggtcacatggtgataaaaatgaggataaactgaaattgtctgtgagccagattagtttattttatgccagtcctaggaaaaagacacatcatggtaggatacatcctttttttttttaattatactttaagttttagggtacatgtgcacagtgtgcaagttagttacatatgtatacctgtgccatgttggagtgctgcacccattaactcttcatttaacattaggtatatctcctaatgctgtccctcccccctccccccaccccacaacagttcccagggtgtgatgttccccttcctgtgtccatgtgttctcattgttccattcccacctaagagtgagaacatgcgctgtttggttttttgtccttgcgatagtttactgagaatgatgtattccagtttcatccatgtccctacaaaggacatgaactcatcattttttctggctgcatagtattccatggtgtatatgtgccacattttcttaatccagtctatcattgttggacatttgggttggttccaagtctttgctattgtgaatagagccgcaataaacatatgtgtgcacgtgtctttatagcagcatgatttatagtcctttgggtatatacccagtaatgggatggctgggtcaaatggtatttctagttctaggcccctgaggaatcgccacactgccttccacaatgaacagacacttctcaaaagaagacatttatgcagccaaaaaacacatgaaaaaatgctcaccatcactggccatcagagacatgcaaatcaaaaccacaatgagataccatctcacaccagttagaatggcaatcattaaaaagtcaggaaacaacaggtgctggagaggatggggagaaataggaacacttttacactgttggtgggattgtaaactagtacattcttaacatcaatttattcctaaaagcaatgttcatagggcacactgtaggccatagatttgcctcacaaatttaaaggcctaagccctcaacatgcacagcagtatactcagagactatttgtaaagatgacgattctggaactttttaatgaccccaatcattagcaatgattaaaattaatattcaacattctatatttaccaaggcaataaagtagactaatctattttaaaagggttttaaaatgaagagatgaaacaaaccaaatgattttgatttaaacttcatgaaaacataagttgcattaatcaggtgattttgttttatgagcattctgattgaagtgatcatatttagccccgggagaataagagaaggtaaagtatgggtatggcactgaatttactgagatgattatattgtttgagttaaagaacttgtattaagaaacaagtatgtgccaaacattgtgctaggagcaagcaatgctaaaattacatgggtagaaagagagaatgaaatatctagaatgagttagaaacatcagtgttttccaatgtggagccctgacttcacatgaaaattctcattttcaaacaaggtagtttatgaaaactggactattagcaagacagggtgggcatgccatcagtatagtacctggtgtaaaactagaaattttaatcatttgtgctttcattttataatcagtaaaatccaaggtaggacaaacttttactttttctgtataatggactgatatttgaattatacccaactttaattttttgccagaaattatgctttattgtttctctaaaatggtactatagatctttatttatttctatatatttatatgatttttacatatatgtgcatttacatgtatatacatccataaactatatacatatatacacataaattacaaatatgtgtacctacgtacatatatatgcatatatcacgcaaatacaggcacattttcaatacccctttttgatttttttccttgaagagcatagcatctgaatttattatggatttatttttaatttatggtcatgttctttgagtgcttttggtgtttatctggttgccccaaactcgctagcattgtaaagaagatgtgcaaagcctgaatctagactgactttcatattgactttattagtcaaaaaaagtagatgaaaatgtaacagtccgtgttaaaaatgggaataagacagatgttcaagccctagcttcagcagtttttagctgagatttactggaagaaaacattttctgaactgtaaaacatgcaaaatgcctacgtgacagacttcattaacattattaaatgctatgatatagtaaaagaatttgtaaactgtcaagtgctttgtcaacattaggaatttagttattataggtatttccatatacatgttgtatttagaattccctttaattttatacttagggttgatttgtattttaactaagtcactttatatatctggtcccattatacaagtatacttttccttaggataagaaagtgatctttatatatgtttatcaacccaaatgcccatcagtgatggactggataaagaaaaggtggcacatacacaccatggaatactatgaatccataaaaaagaacgagttcatgtcctttgaagggacatggataaagctggaagccatcatcctcagcaaactaacacaggaatggaaaaacagacaccgcattttctcactcataattgggagttgagcaatgagaacacatggacaccgggaggggaacatcacacaccgaggcctgtcgcgaggtggggggcaaggggagggagagcattaggacaaatacctaatgcatgcggggcttaaaacctaaatgacgggttcataggtgcagcaaaccactatggcacatgtgtacctatgtaacaaatctgcacgttctgcacatgtttcccagaacttaaaatttaaaaaactttaaaaaaagaactgtagatactgatccaaaaaaaatgttcattaatgggggttaaatgattatttctaagtagactactcttgaacccttgaatctttaagaattttctttgctattgaagccattcaaactctattttattaaagctgtcgttattctagtagattttaaacagtaatacctgaatacattagaaatatgcaaatctgcattacatatggcatctgcagagcagaggagtttggtcatctggactcatgctaaagtctccgaaaaatccgcttgtcttaatgatggttgactcgctaatgctatgcgtatatagtcttattttaagtgattgaatgatgtggctaataacccctctgttagatgcactcagaacctcacctacctgggtcctcagctctccagtgaaatctctactttaagtttattttctaacatggtaagagccttcagtttatgttatgctcaggcccgtcactgtgaataaaatattagaaatggactttttttttttgtatttttttaatggatcccttggaactttaaaaaaattatttatttgagctttctactgttatcacagtgtctcctaagcatggcctcccgttttttgttggtaatataattcttacgttattcaaattagtaaccattatttttctcatggctagaattctggaaactattaggaaatcactgagcataattgaatggctgtttatttgaagagctatgtcaaggcagcatagagttgtattttcttgcaggggctctggagtcaaagagcctgggttcaaaccttggctccaccactttctatctgtggggcattgggcgtgttacatttgtgaaacttttgtttctccatttgtaaagtgaggtttgggggatgattaaaccagataactcatgtgaaatatttaatggaaatgtatttggtaggggatttattatttttaaatttggattgcacatgacacatgtcagggatcatgctatgcattttggatagaaagatggctaagatatcatgcctgactcttaaaaacttacctaatggtaaatgacgagttaatgggtgcagcacaccaacatggcacatgtatacgtgtgtaactaacctgcatgttgtgcacatgaaccctaaaacttaaagtataataaaaaaaaaaacttataatcaactgtagtagaaagagatctgaatggcttgccatttagctaggcacatggtatatgtgcttaattcatactagcagccactacagttgtcatgattaataatgagcttccaactgcacagaatgcttttaatccatagaaaatcaaatcagaaacaagtttttgtaaaattaatgtgaaaggagcaacaattaaaatgcaagattgacatttattttctaaattggttctattttctttcacatttacaaaatttataagaaaattctttatttctatgtgatataaagaactagaatgtactttgatgtgaattattgttgccagtgctgttcaacttttatccataatttactaagcacctacatttagacaaaggcattatccatccctttggggaggatttcagatgattcatacacagacctggtctcgaggaatttaagattttctttggggagggaaataaggactttaaccaactcaagagtacttagagaattttctgaaaataattttatcaatgaaaacttgttatattaaaagaaactgtcattctgacttccacaaatctaggcttgaaactatggataacgagatattttctattactctcactcacgtcattttcacaaagtgaaaaggtacattttaactagtgaaagaatagaggaaatggaagtagctcgaggcagtggacgatgattcaaaaagacagggccctattatttgatcaagttatgcaacgactctgggcctgtttcttcacctctggaaggaggaataatctccaagccctttcagactcttttggtaattcacctccagcacatcttctaaatgccagcattaactgtcctctgatttgtctcatgtttttctagccccatgctctcctgttcgccatttaccctcatgcaaggtacaaattacacccatcatcacaagacacttgctcaagtcccattgcccccttgaagacctgccacacctactctctcaaaaaccatcatttcctgaaagtcctatacagctcatttggtatttacagtgtactgccacaagccactaagcatcgttttgtgaatacatgacttacagacttagcttgagtaaagatacttgaaaatgaacaccatttcttggctatcttcctattttgatgtacccttcaggcctatgaattttagtataatagataaccaataattatttcttggttctttcctgcacatctgaataaccctatgcaaagtgatagaatgtttttctataaggaggtcctacactggagattgtgtatttcttaatgctgttgaaggaagagatgtgtatctaaaataaatagactctaacaaacattaatttatatttctattatctgttttgtgtattgagatatctcacaaaaataactaaacattttggcattattgatattacatatttgccatgaatatttgtaaatgaagaaaaatatatatacatcagtaattatcttggcaaactcttcaattatgcaatattgttacatagattacatatctaagtgaacactggagttttaacaatattgtgtgttcataaatgttttatttattattgccactaattcttattgccatttcaagaactatgtataagttgttctaaaaactattaaagtataggtgaccatggtcactactgcctactttggtaaaggccaaatatgtgaagactttttaatgtgttaacaaacgttgaaggttttttaacctgttaacaatcagtaggactcttgaaattatttcctaagagagtaaattttacaacttgcaaagcatgattaacctcttgtaattataaaccatctcttgtagttatgtagcattttgttaatgagcaaagaaccattgtggttcctttttacatttcttaaaataattctccgtaacctcattgatatctccagtaaatttagataagcttttttttttaaaggagggttaaaatgacattttaaactaatttttcttgttagttatacagagttgaactatctgagggttttattgacagtcataaaaaatttgttattttctgtgaaatatagagaatttaattcattatcatattattaattctgtgggccattgtcttaattctagaggcacaagctgttttcatcccactgaaatagaggaatcaaagtatgttccttgctcaaagcacaaaagtgacatactacatagtatgcttcttgagtagtcgtaaatctcatgtgttaaattacatcccaaagatttcagtatgttttatgactttaataatttatggtaatttctaatctggcctttgttgacctgtcttgctttttaaatttttagtttttcgacaaaataattaacatattttaataatcttccaaaggtgtttaaaatggcattgtatagagatagctgaaggcttttgagcttctgtgttgtaaacactttcttaataaaacatgaattgctaccagatgatccagcaatcccactactgggcatttatccaaagaaaaggaaatcagtatctttgaagagatagctttgttcccatgtttactgcagcacttttcatactagccatgatatggaatcaacctaaacgtccatcagtggatgaattgaaaagaaaatgtggtatgaaacagaaattgctgctttaatttatattaaacacactcatattcttctcagctgttaagtattgagttatagatttaaagaattctattgtgaagactaaagtgactattaaagtaagaaattattttttccattatatttaacttatttcatactttaatgttagcgccaatgagcaagactattgaatacaaaaactaattaagtagtggtgatagtacagtatataagggagaacattcttttagaaaggaacaataacagggagcaatagaaacaatgaatgagtgtaaggtcacttagtgttaaaacagctaaaatatagtacaaataagttgcgttttaatagtgattttatataattacaccttgatgttttatttgttacaagaattgtccaggaagatttctctaaagaccaaaggcactcttcccctaaataactccaaagccagtcctgtgtttctataaaaaaaaaaaaaaaaaaaaaaaaaaaaaaaaagtgaaaataacgtgatgaacatttttgaggaagtataaaaccaaaatactccactgcatagctgtttctgcaggtattgtattgatatattacattattcagctttggagtctccacatccaatgttacatcatcactctaaattaaacatgtatagataaatgaaataaatgagatagcatatgaaaatctcatagcccagcccctgcactatttaaaatagaaataccaaagaattgtattcctcatctgaaagctatttagtggtggtgtttcaaataaaaattccatctactgctgttgcttccattgtatctttttctctgcggtactgaaagagaaagagacccagaaggggccttgtctgaagtgtccctcttttaagctgttgctgctttaagcacagggtggacaaatgtaataggagtttcataaaggtggaataaaccagcggattacggtgtgggtgaatactttcagatgttaaccaggagctctgcttgcatgctgggagttgcccatgcctcttctagattgaggcacattatcatgcacaacctaactccaagaaatcttttaaaccactggaaattgaacccagaacatgtctctaagccagccttttcatcctgacaccgaatcatagcatgagccagtctgtcagggatgctgctgctctctaggcaaattttaaatgttgaaataatgaatcatgttttcttgaaaaccatgtacaccaaagaaaagttagtcattttatagatgatgaatattaacattttcttagacaatctgataaattatcagatctcacttttggctctttttaagacagttatgcctcagaaatattaataaacccccaagcccttatactgatcagtatgttcactactagctatgagaaattcttgaagttcttgtaattattgtattatttccttactttcattttattagtatgtgaataatatttttaaaaattctagtgtatgtcttgtatatattttaacaacatgacttttaattaatgtcttgataacatttcttctagtgtatgttttcagtaacatgattattaactgtaactttaaaaacctgtggattagatgggaccattttaaaatgttttaaacctggaaaatctgatggctttaggtttagttcaagctatagatcacctgtggagaatggaactgccaaaaaaaaaaatagctgtagcagccctttgagtattctaaaatagggatgttatccagagcattggtttctaaagcttccattatttattgatgttgagctttcaggatttagctacaatatttactcaacatctaagccatgcttttttatcagtcatgttttatatcttttataatcaaactgcttatcactgaaaaaaatatataagtttctatgtatctggaagaattctctggtgtttcttagatatggattttgatgtgtggaataagaattcaattcaaggataacagagatgttgtcctgaaaaaaatcgaagaaaatcagcttttctttaacattctgtcaaagctcctgactattagtttatcagcactgttttgccaaaggtgtcttctcttctcttctttgaaaaaaatcatctgctgctgctacgccgcaagtgtgttcccgctgtgcctgagaagatgtgtggcataaaaaaatgggcatggcctgagttaaaagtgctacatttaagccagagctggcttatttattagttgtctaatcataggaaaatgacagagcatgcttttctcttgcaatatccgttgctgaaaattaaacacatgagcagagctttcagagaggttgactggcctctcagacagcacctcataggatggcctgtgttgaagcatctcctttaaccagggtctgtccctcagcattgggttggctcacctagattggattgtcccagcagaaaaaaaaaacccaaaattcagaatcatatccaaaccggaatactctttcattcacattacttgtactaccttttcagaaactggatacctgagtgtgtgagggtaacttagaaacttatctcatggttagaagttttagaattagagagcgatgatcatgaaacggacttcatgatcagaagcaatggagcaaggaatgagatgtctttgaggagtatttccctgaggctgtggataacgctgacgaataatccccaccttaaaagtgggttgaccactctagtagctgtaaggtgggagggttctttcttcagagataaatctgtgctcttcacttgcccatttcccaggttttcatgtaggtagaagaaacacctgtaatctgaagacactcttccttcagctttgttagtgacagggatttaaatatgtctttcacacattttccttagatagttaaatttcacttttcctgtttgtttttctctgaaggtattctaactcccctcctaatggacttctagagctttctaattctatgcaatttctgttgatttgttctggtaaactttgaaggtaatctctgattcaacttcttggagattctatcatgtcatctctgtttattaactttatgttactcatggtttcttgatgaggactcattaaacataatgtaagtagaaaattattaactacataatatttactacgggttgttatttctgatagtagctagctgtaagattccaattgttcttcaaatctttgtctcagtgatctctgtgtagttcttgactacttcaaataacttcctagaaggatagggatttaataatctcttaataggaacacttaacacactgctggtgggaacgtaaattagttcggtcgttgaaagcagtgtggtgatttctcaaataacttacaaaagaattaccatttgacccagcaatcccattattgggcatatacccagaggaatagaaatcattctaccataaagacatatgcacgttgtgtatgttcattgcaacactactcacaatagcaaagacatggattcaacttaaatgcctatcaatgaacagactgaataaagaaaatgtggtacatatacaccatggaatactatgtggccatgaaaaagaatgagatcatgtcctttgcagcgacatggatggagccagtggccattatccttagcaaacttatatggaaacagaaaaccaaatactgcgtgttctcacttataaatggaagctaaatgatgagaacatatggacacaaagaggggaataacacacactggggcctactggagggtggaacacaagtggagggagaagatcaggaaaaataattattgggtactatgtttagtacctgcgtgagaaaataatctttacaccaaacccccgcaaaatgcagttcacctgtatagcaaacctgcacgtgtacccctgaacctaatttaaaagttataaaataaacgtatcttattttcagtacaatacaccacagagtagaagggttaaaagagattgcttctgaggaggtgagatgggggtaaggacagcacaagagcattttggggggtgatgaagctgttctgtgtcttgcctgcgatgatggctacacgactaagcccttgtcagaactcacagaactttacttcaaaaggagcggattttactacacatcaattccaataacaaatactttgtctttaagcaaagggatacctaaatatagcgtattgaatggatctccagaaaaacacatttttcagttcatgtttcagcctaggcctcatctcatccaggaaaccttgtcttgcttgcctttacatacatgtggcaatcagtagtttcttttagggctcggactgaacactcaatgaacttcaatcttagcgcttgtcgtagcagattgacatggtttatttatatgtgtcattctctgtagtaaaaggaaaggatcaaggccattcacttttgtagtgattgtgcatggcagtatttggcacatagtagattattaattatggaacttctgttttcacacacacacacacacacacacacacacacacttcagagctattttcatttaaatatttgctttagtctccaaagcccctctgcctcaacaccaacccttctatctcattattcatcagcttttctcctattacgaaactacttaggaaagcccacttatttagcttatgatggcaaaaataaatatttgtacttttttttttttttttagtcatcgcttcatagaacagcctctgtcctctgcttatgccatgtctgaatatatgctggaggtaaaaagagttcctggttgagagcttcaatttgagaaactatctgagattactttccaggttccaccgtggaacctgtctgaccttgaacaaatgacctcgaacaagtggctgaaatctcttctatttcgtcaactgtaaaatgggggaaaaccatgtctatctcatggggttcatgtgaaggttaagaaattgcttattcagtgtttagcacagtgcctgatatgcataaagctcctaggaatattagctgttattgtatttccttaaagaagcccatagctctatatgccctttcattatatgttttagtagcccaatttaacatatggataaaatatttttaagttaaatgatttgctaatggattgttgaacgagtggcagacacccatattatagacgaaggtcaagtccataacatacagtacatttccccactttcatttcccattaccaaaattcattattctcctgagaaactcattatagaattcatgtcagattcatctgtgtgttcccagcagtgccttatatccagaaataacactgagtcattgtctagatgtagcagaggtggaatcctccaaagagaagcctcagagtggccaggtttgccaagtatagggatgccttgattactggccttactctttatgctcgtgaattcctaagttttattcctcctgtagtcatagattggcttttaagctacaagctgaagagagagaaaacctcttccacctcgttggaatatgtctcttcaatccatttgagccaatttaggacatgagactgctcttagtctagaaccagtcatcaggagaattccaggtctgattgactcggactagcgggtcaatatcagggcaaaaattccaacgcacaacacgatgtatcagtaaggagaacctcaaaattatttcttaacgtccagatcatgttcctatttttatatatctattttctcacataagtcattaaaatgatgtacctgtgcgggtcctttaatgatactcaaagatcttgaattataggctaataactaacttaataagctgcagaaattaacatttctgctacgtttatgtagcattttcccacatgtacttcagaggcttgagaaaagaccctgaaataatgactgaataacagctttactcacttaatttcaaatttgttaattcttctgggaaataccgtcaacatccattttattatttttctcaattacatgtacgtttctacatcagtggataagttaaggagaagaattccctcatgataattttttcatgctcgaaaattttgaatcaattttttattttacattatactctttcctagtcattagaaagggagtggtggttaagataggcaagaatgctttataaggatactactctcgtttcaattcttaacatcaaaaaccttaacagtgtgtagactataaaataaaatatctagggatcagagcattgtgctgaactttgcaggttttttagtcaataatatatatgacgtgttcacagaattctttgtcaacaaagtacttttggagctccaggccatttaagttggtttttgtactttttctttttcttcggaagactttttttgttctatttacctggaagtgtttcttttttggtactgtgaattaaaatgagaccaatctactaggcaggaaaaaaccttaattagattgttgacacagacaaataagaatgtcaattagcatctactgtcacatgcctctccagactgcttctaggatgagtggcctcaagcagctacatcatctttatactcctaaagcatcaaggaaacttggagtgacaattcatatcatgaacacatccacagtgatgatgattgtgcttcttcccccccacccaacaacaaaggatgaatgccaattaatgtattcagttttttgcgtcaaaggctggatcacttgtgcaatgagggtaatcatcctgaccagacaggccatacaatccatattgtgtgaattaaagataatatgcgtgaaacaccttactctggatgtggttcatagcagtagcaaaaagatgaaaactatggtatgctaacattttagagatctgtactctattttaaataattttataaaagtgcatatacaataaaaagtgcacgtatcacaagtatatgcctcaaaatctaaagccagtcatgtaatcagcatccacttcaagaaagaaaacaaaacagtacccctggttcctctttgcaatcattagtctcccaagagtaatcaccgatctgatctgtgacagcatagattggttttgccctactatatttttgctgaattatacaatatatgctctttaatgtctggcttcttagtgcattgtatttgtgtatcagctattctcttgtgtgtagttattaaacaatcattttatgggctgcataatattccatagggtaaatataacagttttattgataacttagctattacaaatagtgctgttgcagacatatattctattacatgtcttttggtataagaatttacacatttcacatgggtgtatacccagaactgagattgctaaatattggggcacattgtatacattttgatttagtagataagatattgccagatatcgtaaatgcacagtttgataaatatagagatttatactttttctagagaaaagccatcaatatcagtgtatgtgtatatatatacgcgtgtgtatatatacgtatatatatacgcgtgtgtatatatacgtatatatacacacatatatatacgtatatatgtgtatatatatacgtatatatatacacatatatacatatatgtgtgtgtgtatatatatatatgaaacaactcagaagcagaaagataccccatgttctcacttataagtgaaagacaaataatgtataaacatgtacacatggacatagagtgtgtagtgataagcattggagactgaagtgtgggggtgtgcaagggaatcagtgataaattaatggctacaatgtacataatttgggtgatggatacactaaaaatccaaagttcaccactatccaacatactcacataataaaattgcacttgtaccccttacattcatacaaataaaaaattatttaaataaaaataaatatgtgtatatgtatgcatacatacatatgcatatacatatgtgtttgtgtgtgtgtatataacttacacttaaaataagcatggatgctgcaatgaatgctcaatttacaagggttgtccatccaaacttgtggcaagtatctcacctctcaagttgttttcttttttcttcatatatttcttgcttttgtctaggaaggaataatttggcttgcctttcaagagtgtacagtcagcatgataacccaaacacttaagacacgtgctaacccatgtggatcccttgagagaaggaaaacagtggtccttttactgggcagatagagcccggggccaggtttcgtggcttgaagatttcagcttctctgcgcctctcagctcagtgcctctggaagcaatttacaacttgtgaggccatactcaaaggccctgttattaattccccgccttccgagaccccatttcagaggatctcaattgctctcagagtgaatttactgtttcctgaattccgtaatcccaatagcaggtctgttgtcctcattagatagcttaagttagagtcggcagtgtaattggcaactgagctactaagtatccaatgcttatgtggaaaatatgttccctattgcaaacaactgatattcatattcaatttggcaccatcatctatctataaagcagatactacttgtgtttattaagttttatcccaaataattattttagtaataatgcttgaaaataggccttggtcatttgcatgtctgtatatggcatatcctgagtctttgtatgtattagaaagatcactcgttttgacttgatggtttaataaaagatgtccctcactttgggcagagacatttgaaaaaggcactccaaccagggacctaagaggtgaatgagatgcagctctgaatcaggtcacacggcctcaggaaggaaacatcttggttttcacatccctcacttctcgatgtcatgtgcaatacacaaatgacccctcaacacacacacaggcacatacacaaacacacactcactcactcactgtattgtctctttccttgactaagtccttcttactaactcaagctctaaagcttttttacttacctaaggtgagtgtgtgaggatttgaggtttcaatattaaaattcagaaacatttaaagttcattttaaatattagtaaaaaaaaatcttgacaaaatacaattatagacaaaaagaaaattcagaatatttggaatttaaggttgaggttacagccctatttatgaaatattagaagaaaaatgctggagagaataaagcaggtttatgagtctgatagaaagcataaccagatgattatgcatatatttgcatatgcaaagctttctaggcaatctgaacatttaaacctacaaatgtggctgcgatgaacagccacagaagagcaggctagaacagaagaggaggctagaacagaagagcaggcagaagttgtaaatgaaatgttaattttcaatggttgatctcccaagtactggaacagatttgtgctgttttcaaggttttggttcaaagaatccagtagtgtattgaattgttttgtggcacttccctgttattttgctttgtaagctacctcaatccatgaagtggctatgagccccttatacaacactgttgatttttttttccttatctacgcaaaagatttttgattcagggccaggcatggtggctcacgcctgtaatcccagcactttgggaggccgaggcaggcggatcatgaggtcaggagatagagaccatcctggctaacacggtgaaaacccacctctactacaaatacaaaaaatcagccgggcgtagtggcatgtgccggtagtcccagctactcgggaggctgaggcaggagaatcacttgaacccggtagccgagatcctgccactccactccagcctgggcgacagagccagactccatctcaaaaaaagaaaaaaaaaaaagattttttattcaggtggctatcagactcattaaatagaagccttaggttaagttcacgggttgctagttggaagcctccatggactatgttcataaaataatagaaaggagttatgcaggacttcttgaaatgttatttaaaaagtcagaataggctttctattacttgtctgaggtcaaatacatgtagtgctttctgaccatttcatccagggtgttagctaggacaataagaggtgcttaaaaattattagattgagtaaatgagaaagcccttagaaacataggaacagaatgacccttgctttggatctaatattgactcccacgcctaaatccctttggagaactcctttattttctcttccatcaagagcaggtataaattaaaaacaccattaaaggggccatctagctcagctgaagctttcatcacacatgtaggggaggtatggttgggagggatctttttatcctttaggtcttcaatttacataggacttttgaataatcaaatagccccaaagagctgatcttaggactagttgtaattgagactatttctccatggggtagaaaaatctagttgtaggaaaactgagaagtagatgtatgttaacctcaaaggctgttttttacaaaggatgttaaagcatcatctttgctcagaaagggagcaataaaacaaatgagtggaaataacaaaaggaaataatggccaggtgcagtgcctcacactagtaatcccaacactggggggctgtggtgtaaggatcgcttgaggctagcagttcaagaccagcctgagtaaaataggcctcatctctacaaaatagatagatagatagatagatagatagatagatagatagatagatagccgggcgaggtagtgtgcccctgtagccccagctactcaggaggctgagatgggagaatcgtttgagcccatgaggtcaagtctatggtgagctgtgctccctcctgccactgcactccagcctgggtgacagagtgagatcctgtctcgaaaacaaaaggcatactttttagatgtaatggaatagagtacttccaaacctggctgcctgctggagttgtattggaagaggttgcacgacttcagtggagatggcctagatgcctgctcagcagtcatctagttaaagcaactaagaacatgtaatatgaaactgcaaaaagagatcgtgtacgtaaaatcactctgggctcctcagatagagtaataaacacaactcctgacagccaaataaaaagagaaataatacagcccttgacttccttggttgctttgacatactaagtaggtgttacaggttgggttctctgggaaacagactctaaaacatttttatttttactttatttgttgttattattattattattattattttagacagaattttgctctcgttgtccatgttggagtgtaatggcacaatctcgtctcactgtaatttccgccttatgggttcaagtgattcttctgcctcaaactcccaagtatctgggattacaggcaagtactaccacgcctggctaattttgtatttttagtagagacggggtttcatcatgttggtcaggctggtctcaaacacccgacctcaggtgatccacccacttctgcctcccaaagtgctgggattacaggcgtgagccactacgcccggccagactctaaaataaagtttaatatgcagaatacttatcagggaatgcccactggaccaatacatattcaagagagggcttagaagcaggattggacagaaagagaagttgagctgtaatgcaggcccaataacagccttagtgttaagcaggctgagagattcagcagttaatgagacagtcaacccaaacagttttataggcatcaaaagtatgatcagcatggtgtcagtttcctgtgtcacttgtcccacagtatgataccaaaattaaagagaccagatgacatgcaacacaagcagtgtgcactctgttgttgagaagccaatttcgtcatgcaattaagcagttttatactctgcagctgtactttaaggggagctgagatggaacatcatatgtctcaccataaccagaaaggcagatgagaaatgttctatcgccacctcccacaaggtaagggacttccctaaagatacagaggtgggtggaatattgccttggtagacttcctctcaagactgcctatcttcccatgttggaaggatcacagagcatttgtcaagacgtgggtcaatctgcagttgaactttgtgtatgtggcctatgtggatacttataatatcattgggcacctccatagagctgtttcccaattgaccaaacatatgggaagcttcagagcttcgaatgacccttcagagtagtcctgagaacagtgagccttactactcctgcattaatcagtcattggatgatagccttctcagaaataagtcatgaccttgtgcaagggggctcttcatggctgggaccacccctaaaactgagagctgaaggctgtctgccaccagcccttccacctgctgggacaagttctttattgaagggaaatctgagtagttcatcagcgtccatcacagtagtcaagccgttcattcttccttcttatgacaacattgtgcttattgttatgtaatccctttccagaacattttaggttaagttttaaaaataatgcatataaatagacaattcaaatactggggaaaaaaagcttgcacttatattgttatagaaatgtgcacacttaaagagctgatttcttctgggtatttacataactttatttaaaaatccatccatttttaattagctgtttttaatatgcagttagctaagatattataagccatatattaggctaatggacatttaacagcttagttaagttcttttaatggaaatgctgacaaacctttgtctgtaattatagcaacactgtgattacagaaggaggtgcctctccttgttgtttgcagccctaaaattccatgtggctataagtaacaaagtccattattagataaacacaagtcatacttggcattacttgcattactcgtctccttgctttatttgaatcattttttaaagttgtaaaatgtttttcaaaactcagaatagtggccagttaataatatgattcctcttatattatgagattttaaaaaatagttcaccagtttctggtggcctctatacccattggcaagtcctagccattgtgaattaagtaaacaattctttatggaaattttttaatccttaaaccctataagtttttattcatcatgtcaggtcacttgtcaaagggtttaacattcagaattcaacaaaagtttatcaaacacctattacaggacgtgcaattttgggcgcactgggatttcagcaattaacaatcaagatatgatttgtatcgacatggatattacattctctcacaggagacagaaaacaaaataactagaaaatatacataaagagactttaaaatggggtaaaattacagattgtgacaggatgaccactttggttcagaatatctaggacatttttttctttttttttcccctccctccctctttcttttttttctttttctttttctttcttttctttctttttctttctgcctttcggagtcttgctctgttgcccaggctggagcgcagtggtgcaatctcagctcactgcaacctctgcctcccatgttcaagcttttcgtgtgcctccgcctcccaaataactgggactagaggcatgcaccaccaggcccagctgatttttgtatttttagtagagatggggtttgaccatgttgcccaggctggtctcaaacttctgacctcaagcgatccacccgcctcagcctcccaaagtgctgggatttacaggcgtgacccaccaggcccaagcaaggacatttttttctgagccatgttatttaaacagagatctgaatgacaagaaggggccagctctgtgatgtaggggaagaaaaatatgttccttctacccttctaggctgcccagctggagtcctacaaagttagagtgacaaaagacagattaacaagaggaaaagcctagaagtttattaaaatattcagtgcacatacacctggtagaaactcagtgatgagtaactcaaaggggtggttagaatgttgggtttatatagcatctgaacaaagaacagtaaacttgtagagaaatgacaaaacaaagaaaaaaggggtttaggtatttagggttgccaaactgtaggaaggtaaatatatgggagaaacatggagtatagtttgtttatgccaagtctatcttgagatcaacttttcgtattcttcatggccataacaatttcccaggagagagggcttatagcagttatcatttctcagaagtttctgcttttatttagacaagggaagcactgggaaggcttctttttgcttatattgattcttacttgcctctaactaaaagtaatctttatgtcaaagtgccatattttggagtggtatatattgatctcctataataacaatcaaaaggaacagtattctaggcaggagtaccactaatgcatagtgtttggtgtaaagacaagttaacatattcatggggcaacaacaacaataagccaatatggctaagacattgaggatgagtgagttggagaagtaggcaatggccagctcatataaagacttgttcgtttttataaattgtttagattttattgtaattatggtggcaagtgattggagagtattagcttcactttgactggcttatcgaaaacggaatgtagggggtgaaagtggaataaaaagaccagtcattaattgagtagtccgtgtgagagatgatagtggcttggacaaggacgattgtactggagagattgaagcgactgatttcagatttgtagtcaacaaggcttaattggtaggagaaaaaaataaatcagtgttaactctttaatgtttaacttgaataattatgatgagggtattaccatttattgagatgtagaatattataaagtaagagcagatttgttcaaaaagtatcaagaatctttatttggacatgctagtttggggatgcttattagagaccctaggaaactgaatataaatgtggattttagagaagagcttagggctggcagatgcacattaaggatctgtctagagccatggcgctagagacctccaggagaacataaatagtctcaagatcaagccctgagacactcagatgtttagaagtggaacagaagagggacatccaatatagaataccaagaattaggaggggaatcaagagagtgtggcaatatgaaagatacaaaaagagtgttgaagggagggagtaattaataaccagcatgttatgaggggctcagtataatgaaaagataagtgactattggatttggcaacatataattttttggtgatctggacaagagcaatttgaacagaatgatggatatggaaggtccagaggagtaggctgagtaaataatataaggtgggaaaatagatacaaagattatagacaactttttcaagaagttttactgtgaaggggcacagcaagctgagacagtgaggataaataatagactcaaggatggtaactttagaataagaaatttcaatctgatgggatttaagtgttagcaaggaagctttaagaagttattttccccattagaatgatctgaaaaatgttttagaacattcctcttatattctattttatcacatttatataactttcagagaattgaaagaggtattaagttattatgaaattttctgagattaataagataacaattataggatgttttcttttagttgaaatacacctactcagcctaatttttataacttcttactgaagtataatatacttcagtagaaaagcatgcctaatataaaggtgcagctagatgaatttgcacaaactgaacacatccctttaaccagcacttagattaaaaacagaaccttgatgatacctcagaggcccccttctgccccttttcagtctctccgtgctacccccatggataagcattatcgtgatttctaataccatagattaattttgccagtttttgaattttatgcaaatggatctatttcacctaattgtaaatatataacattgtcatagcaaggcactcattgccttacactgaaaattacattgactctttgccacaagcttagacttgctttctcattttattatcatcaagcctatagctttcacactataccttgttcctgctcttccctactctatttcttggtagatattctatatcagtcttagagtgcagtttgcagaacccctccatcagaatctcctagggagcttgttaataatgcagattcctaggcccctcccatggtttatgaatctgagagtgaggcagacaagactataccctctcatgcctctataatgtaataatgtcttcctagaatgttctttgctgcatctcttattaaagaaatcttatgggccgggcagggtggctcacgcctgtaatcccagcactttgggagcctgaggcgggcggatcacatggtcaagagatcgagaccatcctggctaacacggtgaaaccccatctctactaaaaatataaaaaattagccgggcgtgctggcaggcgcctgtagtcccagctactcgggaggctgaggcaggaaaatggtgtgaacccgggaggtggagcttgcagtgagctgagatcacgacactccactccagcctgggtgacagagcgagactctgtctcaaaaaaaaaaaaaagaaagaaagaaaaaaagaagtcttatgtttcctttatggccagagcacaacattgtcatgaagtcatctaaaatttcccactagaggtaacatctccttcccctgtctagctcttttaaagcattacctccatttgccttgtatcatagctgcttgtacacctgtctgtctttccgctgaggttataatcctctggagggtcatgactttgcattcctttgtgtctcccattagcagccagcacagtgccttgcatactgttagttctaaataacttctctctctctctctctctctttttttttttttttttttttttttttttttttttgagacagagtctcgttctgtcacccaggctggagtgcagtgcaatggcatggtcacagctcactgcaacctccccatcgtgggctcaaatgattctcctgcctctgtcttccagtagctgggattataagtgtctgccaccacgcctggctaatttttgtatctttagtggagacggggtttcaccatgttgcccaggctggtctcgaactcctggtctcaagcagtctgccctactcggcctcccaaagtgctgagattacaggcgtcagctgctgcgcgcatccctaaataaacttttttttttttggcatgaaatctgtaacactggaaagatgttattgccttagaataattaagagattaaatgtagaatctcaaaaacattcatttttttccatgaaaactttaccaggcctcaagggataggaaaattatgggtacagaattgagaatctgtaggaacttgcaagataaacaacggtttcacaagaaagaccttgttggagagttaaattttcagacagttgtaataacttcacattaaagttttgtcaaaaaataagtatctgcatgttttgtttgccttccaatgccctcattttatttgattttttcccataagtaactatagtgaaagcacgaaaatgtgtttctgtgtttgtgtgcctgtatgttaattgtgactgtttctattgcattgttattgcagaacctaggcacgcactctgtaggcttgggtgctttctccaactgaaaaaaatcctacatatggataaattatttttacagccagtgtttaattttacaagtggtccccctccttctgtttttaggatggcagagagaatacatatttacttaccattatcacttactcatgctttgagcttgaaggaaatgagacagaaaaatgaagtaacattaacttctctctggaactatgtttctcatattagagctttatctgaggagttcacttcctctctcttcaatgctttgttcctctccagtcgattcaaatgtcctcttaaagcagaagttccgaacctctttctgtgacttcaggagagcatgagaatgtaaatataagttttaggactaaattttcaaagactttttccactcagctctcttttcctcttcggtttgttgttgtcgttgttgttgttgtcgttgttgttgttgctgctgctgctgctgtttttccccttccacttccgtaactgagctcttagggtccatctggaatctgattgcaattaaaaaaaaaaaagtttatttttacctccttgtacgtgctttctcctaaagcaggagtcagaagccttttttctttgaagggctagttagtaaatattttaggcttgtcgtctttgtcgcaattactcaactacgctgttgtagtatgaaagcagacaatacatacctgaatgagcatggttttgttcctagcaaactttacgcacagagaaatttggatatcgtataatttttatgtgttgcaaagttgtattattcttttgatttctccccaaccatttaatatgtaaatcccattcttagcttgtgtgccatacgcacacaggcagcaaatgcgagttgtcacacaggctatagtttctgactttatgtcttaaagtaaacagtaataatcattctctttttccaaacagtccactaatctccctttgtattcagcccttgcatagtaaacgccgtttcttcatcatcctgatttttattctgagaaaatactgtatattgttcccatgcactagggttcggggaaatttaaaaggatgtaggatctccttttcattggtcctaaaattgcactggggaggcaggtcatgtttatgaacagataaatagtatcataatataatcatgcatttctatggctagcatttagaactatagcttttgatgtcatgtggtttttatatggttgattatttttttcttatttataaaatgaaaaagtttgagaatttttcatctccttaatgtattcccttatttgagggaaaagtatttacctactacataggaatttatcttaaaattttctttgtctatctatttttatggaatataatcgagcaactattttactaattaatactttaatatcattatgaaaatgttctcatatttttaaccttataagatcagataattgctatgccaatctatggttgaaatgggttcttatacttaacgctatgctctttcttctgagatgtaaaaatatgtttaaatcagaatttatataggtgtcaattcaaaatgacagtagttcattattttgattagtataaatgttcacaactaattctattctcttatctattaagtcaccaaataaagtatatttgttttaaatatttaacagtttaaattattctttgaaaacttatgagtctaaagtaagaacaattaacccattcattttgcaagtgggatagttgaattttacttgcaatccagggatttttgacagtttgaaatatacatacataccatgtatgtttaggaaaacatttaaaaagagggggttgtaaaataataatagttcttccatgattttttagccataatgtttataatataaaatatgtatactcttgttattgaatgtagtatgtttctaatttaccagaaggcaagagaataatcctggagaatttctcaaggcatcttcgaactctttgatttattgctcacatatagtaatttgccaaatgacgccctagtgaactgaaagaattaatgccccgtcctaagtcactttcaccgagggactgaaaacctgcagcattttgccaattagaggaggaaacaatctaccttgcagagtcaggagtactggataaaggagctaagagtgttgctttttttccccttcttactttaaaaatcccaattcatcccatgtctttcttaaaggctaagtgaagtagtaagtacgtttttgcaacatacgaatttagcagactggccttgtgtttatttttggccggaaccattacacttatttccaaccctctcctttatttgttggttgataatgggctaattttgaatctttactgtcaaaagaacattaagagaagcagccctgcctgcatcgcaggctatgtctgtcctttgccgagtattaaacactaaaaaaaaattaagaaaatactaacaaaatgacaaagcattaagaaaataaaactagatgttaaaggaaatgagaaaataggaaaggatgctgtacctggagtgattttttttccccaggctacctaagatgatcaaaaaagagctaatttctcttaggtttctattaaggaattactagaatatcgggcacaccaggaaactttatcagtggacctgtcctgaaccaaattttcttaatgtatatatgataatttgttaccacatcccagattattttacaggaattaaaatatatttgaaacactgacagggaaaattgggtaagacattgatagatactacaatctgtacttgaaactgcactcaaggaattcgttagtcaagaaagaacacaatgactgtgggcccctctgggttttggaacctcttttgtaaagcatttttttttttcccaaatagaagatattatttttgaaaaggttaaataaaaaatctttgttcactatatagtttcctcctaaggagtaaattaatttatataaaatattgcaatataaataacaattttaaaatctcaaaagagcagtgttttaaaaataatgtagaaacattaagaaatgacttcaaatgataagaatgtcattggagagcaaagggtttttaatattacatatcgtggcacgtatatcagcacccaaccgctcaagatacagagttctttacaaaaatcaaacagaaggaaatgtgccaccttgttcataaactatatttaataataagccaggcagataaagtcactttcacaaataatgagcaagcccatggtaatataattcatttacaataagatttatctcatggaattcttagactgtgctttgaaatttaaataattctgataaatgccaacagaatagagaaatcaattccagagcaattactaacacgttgcattacctttctaacattaatatttctcttcatacatatcattgaagagaaaatgaggatggaaaataaaaagatcaggtaatatatttgctttctcatctagggttgttatgatcttcaagatgaagttttattttttactcctagcaaatgatattcttttttattttagtttttattattttatttttctgtaaattattggggtacaggtggtatttggttacatgagtaagttcttttttttgatatttctgagattttttttttattctactttaagttttagggtacatgtgcacaacgtgcaggtttgttacgtatgtatacatgtgccatgttggtgtgctgcacccattaactcgtcatttagcattaggtatatctcctaatgctatccctcccccctccccccaccccacaacaggccccggtgtgtgatgttccccttcctgtgtccatgtgttctcattgttcaattcccacctatgagcgagaacatgcggtgtttggttttttgtccttgcgatagtttgctgagaaaaccacgaggtaccatctcacgccagttagaatggcgatcattaaaaatcaggaaacaacaggtgctggtgaggatgtggagaaacaggaacacttttacactgttggtgggactgtaaactagttcaaccattgtggaagtcagtgtggcgattcctcaggcatctagaactagaattaccatttgacccagccatcccattactgggtatatacccaaaggattataaatcatgctgctgtaaagacacatgcacatgtatgtttattgcggcactattcacaatagcaaagacttggaaccaacccaaatgtccgacaatgatagactggattaagaaaatgtggcacatatacaccatggaatactgtgcagccataaaaaaggatgagttcacgtcctttgtagggacatggatgaagctggaaaccatcattctcagcaaactattgcaatgagtaagttctttagtggtaatttgtgagatcctggtgcacccatcacacgagtagtatacactgcaccatatatgttatcttttgtccctcggcaccccttttctaccccccaagtctccaaagcccattgtatcattcttatgcctttgcatcctcatagcttagctcccacgtatcagtgagaacatatgctgtttggttttccattcctgagttacttcacttacaatgatagtctccaatcgcatccaggtcattgcaaatgctgttaattcattcctttttatggctgagtagtattcatatatatatatatagacacacgtacatacatatgtatatataccgcagtttctttatctacttgtcgattgatgggcatttgggttgatacttgcacacacatgtttatagcagcataattcacaattgcaagtgatattctcaggaagcatgatgtaagtgacagagacttactttgtagactgcactcattcacttgttctctgaatgtgctctaggcagcctgagtttctactatgtcagtgttacatagatgagaaaccccatgggtggtttccacagaggctgcaatactatttttgataccaaaaatctgtttggttttgtgagccccagatgcccatatggaaaactgaagtgttgatacctctttgtagccctctgatgaactgcatggttcaccttcctcagcagtttgagcggggtggggagagcgcctgcttcctagccatccgattggcctgaatcatcaaaaatgctatcatgaaacaggttctgtttatctgctccagattacacccatcatgttctagagtgctggtttcatgcttgaatctagatcaagcctgctttcctcccctgcctgtactccctgtggctacctacagtcctgctgctgacagataatctaaaccaatagcacctaattagcctatttgctcatgtgttttttccatcgtggtataatgtcctccttgtcaatttagggtgaaaatgtagcaacacgttgctgatggtttaatttctggaatgcaggtaatgaatgtgtttttgcttatccaagtcttcccatcagatgtcaaatatagaagaacagtgttcagaggtcctaaatttaaattggagtgagaaattcacagcgcccctgaactcaggcaaaatgcactctgacaagtcaaccagatattcacagatggtctggaggatttgaagcctaatttggtgaaataaaattaaatgagtgaaattgtatgcagtcattaatctatcaccatacttaaaatgcttcattgaaatttcttttactgcttcaaatgaaaaaagatcaaactatgttatagaaaagcattcaaaacccttacataacatagataaaacttggttggagacttacagaactttctctgctgcttcgagaaagttacagtgcccacaaatctattgctattagaatattttattgtattcaacactcaattctaccataattatgtatatgagaaaaatatttttacctataaaataattattattaccttttaaaaatctgacattcttccttttttctaaagaaacatatttagatttagcttttattttatttttgtgttgatacatagagattgtacatatttctaagattctagtgatattttgatacaagcgtataatgtgtaatgatcaaatcagggtaattgggatatccaccatctgaaacacttatcatttcttcttttcaatgccatcataccaaaaggaagtaaatagaatttcaaatataaggacagccatgattttacatacatgcctacgattccaccacaaaccataattacgtcccccaaacttttaacatttcagatactttgtcccaggtatttcatgataaggattgggctatgactctgttacagaagggccaaatgactaaaatgtctctgaacaatattgattgcaaatattctacccagttgtcaggtcaatatgttccaattcggaatttataacattgtatctctactcccaaaccatccaatctcacctacctcacttccatattatggtgggtgatctcagattatatttaagctcatggttacttgtcaagtagatatggagtttagcctaacttttgaaatttatgctgagattacccttctcattatagaattaagtaggcagtttccaagtttagatttagcaggcagtttttttcaaatcacttaaaagttatatttttttagggcattgaacaggtttgaaatcctaccaagatgtcatgtacacatagaccaatagaacagaatagagaacacataaataaaactgcacagctacagccaactgttcgtcgacaaagtcaacaaaaaaataagcattgggaaatggattaaagatttaaatgtaagacttcaagctataagaatcctagaataaaatctgggaaataccattctggacattggcttgggaaagaatttttgactaagtccttaaaagcaattgcaaaaaaaaaaaaaaaaaaaaaatgacaagcaaggacttactaaaataaagagcttctgcatggcaaaataaatgatcaacagagtaaacagacaaacaccaaatgggagaaaacttttgcaagttatgcatctgacggtggtgtaatatccagaatctatgaggaacctaaacaattgaacaaacaaaaatcataaaacatcatttaaaaaatgggcaaaagacatgaacagacatttctcaaaagaagatatacacgcagccaataaacatgaaaaatgcgtcacatcactcatcatcagagaaatgcaaatcaaaaccgcaaggagataccatctcacacccgtcagactggctttgttaaaaagtcaaaagacacccaatgctggcaaggccgcagagacaaggggatgcttatacactgttgttgggaatgttaattagttcagccactgtagaaagcagtttggacatttctcaaagaacttaaaatagaactatcatttgacccatcaatcccattactgagtagatatccaaaagaaaacaaatggttctaccaaaaagacacatgcactcacatgtttgtcacagcactatgcacaatagcaaagtaatgggatcaacataggtgtccgtcaacgttggattggataaagtaaatgttgtacacatacaccataaaatactatacagccacgaaaagaagaaaatcatatcctttgcagcaacatagatgcagctagaggccattatcctaagcaaattaacataagaacagaaaaccaaatactatatgtactcagttatgagttggagctaaatgttaggtacttatagaattgaagatggcaacagtagaaactagggactaatagaaggggaaaggaaagggggagacaagggttgaaaagctgcctattgtgtactatgcttactacctggttaatgggatcatttgtatcccaaacctcagcatcacgccatatatccaggtaacaaacctgaacatgtaccctctggatcttaaaagttgaaaaaaaaagatgtcatataaatattcgtggtcactaaaagtatctaatgtattatacataaaaataaaaattgggtgaattggaagtgtattctttgtatcaagtcatgtcggagatcctattctgctttgatcacagtgtgaattcttttgcatttttgttaccagtcacttctttatttattgaactaataattacatattctgataatctgtcagaaagataaaaacattctttgtccatgtgtctgaaaatttttaacctatttttctaatgttttaagtgagaagagcatgttaatactgaaattgtaagcagtagactgaaaaatcatcccaatccatgggttatatattgaattgcttttaactgtattactaaatattaagcttaatttattttatttctacatatccccatttccactataggtgatttgtatgaatttaggaacttccttctctcatccatttttatattaaaactcagactttctaaaacaatatttctatccatccatcgttggtaactatgtactgacatgttttgtgcatccgaaaaatgttagcattagtttgtgcgcacagaagtaattccagtcaccatatgatgagctgatttatttatttcgtaagtgtgttcattattattatctcttcagcacccaaatatataggggacttaatgatacctacaagtaaaaacggaagacaaaaacgccctgctctctacagaggttaaaatgtttttgcaacagggctctagatctcagctgtgaaagtagggacgagatgaggctaggcatgcagtgtcagtataatacaatataatcaacatgtcagcatctaatgcaggtgttgcaaaacaaaatgtacacatgggtagtcaggtaacagaaaagcatgaagtagtaagggctatctatgcaagaggttccaagctgactatatactgaaatatttaaacactatgtggggcaaataaaatggacattagaacagttcgatggtcagttggggacttctgctctttcttccagtctctgaacatatcttaaagccacaatcatctatttttatttattgttatacatttatttataagccagcacccctgtgatttaagttctgttgaaatgctgagttggaaaagatcgatggatgggggaaatttagtgcagaggttttgccccaggttcaaaatcctttataaaatattaatacatggaacaaatattgaacaattaaaccactgataagttaatcaatctgattcaaagtacacctgtgaagagggacatggcaagaaaaatattacagtaagaactagaaacattccttcatggctgcttgatatggatatgtcatgtttaagaaaattcttctttagactgttgagattttttttcctgacaaagaagattcactgtcgaggaaagaaagaggtactgtgaaatttgttattgaaaacatgcacatacttttgtcagaatgagttaaagagtgaacaaaatgtgcctattacttacgtgttgtgctgttttaattcaagattaaaatatttaacgtccacagacaagaccacttttatatgaatattatttttctgctttattgctcaattttattaccatttcaaaacacccgtgttgctttctatggccaaagatgtttagcacttttcatggttatacttctgtacagtccaaaatacaacacttactttacacatacacaaacatccaatgtattttgttttctgtcaagtaaagacaatgtctgtgttattaagttaaatgtcactttcaaatacaggatatgttgatattagaatgttcaactttatttcctcatttaagcaaattacagtgtgaagaatgtaactgcagcaatttataaaaatcatatcacattcaattatgagagcaaacttgttttgtagacttgaactagtttcaattaatcttggagttatcatttcaaaaattctaaacagagagaaatacggagtgtaataatggtaggtctttgggtaagctgcttccaggaaaagaaagcaattatatatgttcacatagcactgacaaggagaaacaaaactttggacggcaaagaacttgcattagtctttttgacatgttcctgtggtgtgatttattacgtagacaatcagctcaacttctcaagtttgatatccttggaatcatttgaaatttaaattttaatgaaaattcattaattccaaggccaaaagaagtgattctaattgcttttgagaatcagactatgaaagaattctttggcaaacttgcactgtcttttctcttttatcattggttgcttcgtaggtacttaattgaaggtcctctgattatcagcacgggctgacatcagttcactccatgcattttaaacagtaggccagatgtttaaaggatcagctgaagcatcgatagcatgctagggtgaataataaaattttcattatctacaagaagcaaataaaaagcataagcattttcccccattatcctgaaggagaagatgaatgcctaagcaacattttaagaatgggttgagtgtggcctgtgggaaaatttgggtagaaaacttgtagttagctaatgtatatactgtttgcctctttagctcaccatatacccacacacatgggcatgcatgcatacagacagacacatacaatacacacaacaaacaggaaattcagatatactgaagaaatgtatttaagggattactaagtttttgtaaataaaatcctttaagatgctgagaaacaatggaagagaagtaggacatgatggctcatactttcgtaatttacttgtttaacgtttgccaaggtttaaattaatgtagatgtttttgtggctaggattaatgatctaacagtttggaataattaggcacttttatcacctagaaagcccagaaacccagcatgcaaaaattctggtatgtctgcattttacacttagatataacagagaaatgacaagtagtcaagtggatagagaaacgaatgattcttcacacatgcacacacacatagaaattgtctttttaatagtattttaatgtaacacatttatgcataatttctccatagtgtttatcttatagtgaatatgtgatgaatagtctctaacattagtggttttatagattaaacataattaaggctttatatattaaagagtcaattggtgacattctaatataaacatgtttatctcatatacattgaaatattagataattcattcgttgagaataaatcgaatgagtcaaaacttttaacctccactttgagctttgtaatagtatccactgaaaatattcatgaaaatttttaagtcatttctatttatatattcagtccaaacatctcacaagtttaaaatgtaaactcaagaatataatttctgtattctacaattggaagcatccatcatatcagatgaacttatatagtttgtgaaattttgcaaactttctgtttagtaaatcttaatgtcaaacattttaacttccaggttgtctttcttttcagttttaatatccgcgatctttgtatactcgttgaatggattctcaataagtaacccacaaatatatatacatactatgtacctacaaaaaataataaaaagtaaagaaatcgacacttatccatacctgtcccatagtaataaactattcataagtatatttgaaagatatgagaatcataaaagttcgtgtttgcacccttttgtgcgtggaatcctaggtttgcattttgtggatctagactttttggagtgtggaaataaatgaaacaaataatcgagacccagtcttatattcaggttatcattttactacataaagcataaataacatttgcagtttgtttctatggctagctctaaagtcttagcaacgagaacattatagaaagacttcaactgtagcttccagcagaacttctgaggttccgtttatggactaagcagcagttgagggggacaaaactcataggcaattgatcactccaaaggatagattgtcttttctaacctaatcaaaagatttatagtgaaggcatattcagattttgttgaaggatatggatatataatcatgtgtgtgtgtgtgtgtgtgtgtgtgttagacatacttaaaacattatttgagtagaaaattctgcacaaatggaaaagtataacatgtgttatatccacacatgttgagcatttacctggctgaaacatcaaaagctgaattgacttaattgaatgttgaatacttaatagttactttgtagtgactcactattaaaacattatctcaagctttgtcagaattaatttttttaaaaaactcagattagtgtcaggtttactgaaacagcagatctgaaattactgtgtttttttttcctttcaataatcagtttctaatccaaaattgaatatcagttccaactctacattcagtttctgttttacttgtttggactggcttttggttctgttttccacatagatcctctctgtgtaagacaaagccatttgtgcagattaaattttactgagcgtgttaacctatttaaaacattcatccaaaaagactagtatgaattcttcatatggcaagctgcttgttttaaaacttccatttattctaaaatcctttttacttatactttttaagaaacgtattcccgatatacaaaagtaacacatgctcattaaaacaaattaaaaatagtattgtataaagagctgatacatttctgccttgccccatttaactttcttaagtgttcatgtgaatcatccattcacatcaagacatttatctgtattcatatgaacgtgttttaatatatataacatatatagaattttatataaactttccttttaaaatagaaatgaaattatatgatatatttattctgtgtctagctcttgtcacgtaattattcaagaacatatttctaggttaatatctgtattcttaggtagcattcactaactcctcatctacttgttttcttccattctaattgtgtttaacatttcttcatacaattggttgtcatttggtcttctttcatggagggtgcataatgttcattctcaccaattctttacactttacataactgcttgatacgaagccagaccttataaatatcaacaaagcaggaacactgtaatcagctatcagtttcagttgagctgaatgaccctgaatatgtgtacacatattttccaggagattttaaaactgacacctcagatttctaagacctggagaaatcagcatgagaaacattgatctatattattccgtgaaatgatttcactaaatagtgaagcatctcccacatgtggactctgtaatttattagaataaagagttcatgtgcttctgaagaacttgaactactcttctggcctccgtacattggtttcttagctataggaaggctgagcatgtttttcctatgcgtttcctttctagctcatcattttagtgacaaaacaatctttcgtggtgttgctctagctatagaattgtttcagattcatttgaccaaaggtggcaaatacaacagtcccaacaaaaacaaaagacctattacagaatgatggaaatgaccccagggaacaatggcacctccacatttcttaattccaaggttataagcagtggtgtggacaattctcaattccaatgctgaatcgccttctaatttcaaatacctgtgctaaaaattatttacgtctactgaaataatgaactggaccccaccaggaatggccgatatgcttgtagtcagagcacaactgtagaaagaaaataacattttaatttatagaggtatgatgatagctgtttcatactgttttcagaacgatgaatggcctgctcagtagtttcttgtcatcgtactgagacactttaatttcttaccagctgagatgaggaatacgagcccagtgtgcaggtgaaattggttaacaggagccattaaaatttggaagagtcagaatagcatcaatcaaaatgctttcagtgtaggaagtaaacatgtactagcctgacccacctgtcttttcttttaggtatgttggtaatattacaatcattttgaggtatccataaacaactgcttagatctgaagaattgtatatctttctttactctgccctggcctggggttatggttctcattgagctctaacctttcagaaaaaaaatgtagagaagtggttcaagaagaatgctttatcttgcttcataaaaatgatagtgatagttttattgaaggcttactatgtgccaggccaaagtgcgttttattatcgttcccattttccaggcaaagaagctggagcacagagaggctaagtgagttgtccaggatggctcagctaacatgctgcagttgggatttgcacccagaccaacttcttttcaaccactgtcccatcctgtgtcttctctactcaaaaagtgtttcagctccaaacctgaaactttaaagaaaaggaaatccttagtggaaagactaggttttagtcacaaattatctccttccttacattatttgtctctttttcaaatactccaagctttgattaaaactgtctatcactaggaacattgtagaattgctaaggtggaattgttaaaagaactcaattccaattaactttgccattgattactgtgtgttctggaggggtgttctttctttcaggttaatgatgctttattgtatatctcaaagattaaaaataacaatgaaggaagtagcaaaccggaacttctctcacaatgcatctttcaatctcgtgctttaaatgaagataaaatcatggctgtggtaaggttgcaggaaggatgatatagattaagtttcttgcaaactgccctctgaattttcaatagctgtagaaggtattggttttccaaaaaattgacaaattgaggattcattcagcagtttttttctaggtctcttaccagaaagtgatcactaaaaagtgtagggaaaccactcaaagttggatagatcattattttcacttaagcattttaatttcttgaaggagctttataatgcaacaaagaatttacagtcctgtgtcaccgcttaaattttctagggtcatcagtaaactcagtggaaataaattagttcatgaatataattgacccttaaattctgtcactgtgcaagtaatcggtgggtctgctggatatggctttcgagcagacaggtcaacttcttcaaacagagaagaagcatagcataaattgaagacaaataacaaactacttgtttcctccttctttggcatcaccctatggatggagtatgcatttataatttaacacaatcaagagatctttattatcctacttttgggtacaactgcttcgtttctcttttgaatctctacagctatttaaaaatctgttttgtaaaattctttaaaaaactaaaacatcagattcatatttcaggtatcttactatcttataccaacttaagcatccagtattatcacccacccttcccctgagtgaatccttagcactgggctcttcctgttttatccctgtgcatgctgagctctttctggccttcaagtctacttccgttgcaactgttgtctgaatggtctctctatgtccttcttactctctaaatatttcggaatttaaagcctggaataatctaccttagtccaaaagatatgctacactattctagttcacaatgatctcacactgccgttgatacacaacatttaatatcaacttaatatctatttcagttcattacgaggtcacttatgctacatcttatattgttgccttggacttttattatctcttcatatatgtgtttatggtgctcccaccctcacgagaagttgcaaataccatgttagctgtctgatggctttctatgttgtcaggtataccatttcccaaccagttggcattcaatgattaagttcattaacaaagaattgtatgtgttgaaaaagatgtttttttcttaatgaagcacttgtttttatttttttaatgaaatccaccctcttaataaattttaagtgcacaatacagtattgttaaatataagcaaaatgttgcatagcagatctttataatttttttaaccctacatgcctgatagtctatacccattgcacagcatctcaccatttcttccctcctccagcccttagcaaccaccattgtactttctgtttctataattttgactactttagatacctcatgtaagtggatgcgtgcagtatttgtccttttacgacttgcttattttatttagcaaaatggctacaagattcatccacattgtagcatatggtaagatttcctttttgtggcagaatgatattccattgtatgtatataacatagctttatacattcccctgtcaatagacatttagtttgttcacacctcttggctactgtaaaaatgctacaataaacatgggaatgcagatatctcttcaagatcctaaattgaattcgtttagataaatatccagatgcgggattgctagatcttatggtagttatattttttatttttttgaggaaactccatattgttttccacaaaagctgcacaattttatatttccaccagcagtctacatctccaattttcctacaccttcaccaacacatgtaatgatcttgggctttttttttttttttttttaataatggttatcctaatccgtgaggtagtatatcattgtggatttgatttgcatttccctggtagttagtgatgttgaacatcttttcatataactgttggtcattttaatgtcttctttggagaaatatctattcaattcctttgttcactttaaaaattgggttgttcgaatttttgttgttgttgttattacgttcctcatgtattttagatattgacaccttatcagatatatggtttgcaaaccttttctctcattctataggttgcttttaattctgttgattgtttcccttgctttgtagaagctttttagtttgatatatttctgcttatctagttttgtttttgttggctgtccttttagcgtcatatccaaaaaaaattattgtgaagaccaatgtcaggaaatttttcccttatgttttcttctatgagtttcatagtttcagatcttatttttaagtctttactccatttcattttgagttgatttttatgtatagtttaagttaaaggtccaattccattctttgcaatgtgtatatccagttttcccagcaccattggttgaagaggatatcctttcccagttgtgtattcttggcacccctattgaaggtgatgctaggtttatttctgggatctctattctgttccattggtctatatgtctgcctttatgacactatcgtgcgctcttgactgaggtagctttggtaattcattttgaaactagcaagtgtgatgcctccagtttattcttcttcctcaagactgttttggctatttggagtcgtttgtggtttcatatgaattttaggaaatttaccttatttctgtaaaaaatgcgattgggattatgataggaattacactgtatctgtagatggtttggatatatagacttttaaatgacacatcagatgtatttccatttatttttgtcatcttcaatttctttcaacaatatttcatagctttcagcacacacatcttttaccttcttggttgggtatttactaagttatttattctttttattgctattgtaaatgagattgttttctaaatttcctgtttttatgttgctagcgtatagaaacgcaactgttgaatgatgactttgtatcctgcaactttgctgaatttgtttattggttctaaccatgtctctgtgtggcgtcactcttaagattttctacgtatcagatcatctaatttgcaaacagatataattttacatcttcctttccaaatttgatgtattttatttctctttcttatctaattgttctggctagtacttctggtacgattttgaaaagaagtggcaaaagtgtgcattcttgtcttgtttctgatcttaagggaaaagattttcagtcttttgccattaaatgtgatattcactgtgggtttttcatatacggtttttattatgttgcggtaatttcgttctattcctagtttgttgtgtgtttttatcatgaaagtgttgaaacttgttaagcgctttttctgcagctattgagatgaccatagatttttagcctttgttctgttaatgttgtgtatcacactgattagttttcataaattgaaccatttttgcattccaagaataaatcctatatggctctcgtgtataatcctttcaatatactgttgagttcagtttgctagtattttaatgagttattttgcttctatatttatcagcggtattgttctgtacttttctcctagtgtcttttattgactttgatatcaggatactgatgccccttgtagaatgagcttggaagtgttctcttctctttaatttttctgaagaatttgagaaggattggtgttaattcttctttaactgttcattagatttcaccagtgatgacatttggtcctgggcttttctttgttggaaggttttggactactgattcaatctccttactagtttcggcctactcagattttctatttcttcaagattcaatattggtagattgcatgtttcaaggaatttgttcatttttttctaggttaacatacagttgtttacagcagtgtcttataatcatttgcattctttttggataccagttgtaatgtctcctctttcatttctgattttacttatttgaattttcctttttttttttttttttttacttaatctacctaaagatttgtcaattttattgatttgtttttaaaaaaactcttagctttgttgatttttctattgttttctatttcaattttggcttttttctgatctaatcttaatatttccttccctctgctaactttgggcttagtttgtccttctttttctaagtctttgaggaagaaaatggcaaggacatgactttctttagcagttggaaggacaatgctgtaaatactcaaaaattaattatttttatagtgacaaaaacaaaataaaaaacacttcaaagcaaatgaaagtttatcatttaatttatcaaatcactaagcagactgcttgatcagagagaagatactcatatgatcacataaaactgaaagattaagaggtaaggacattcatgttatcattacatctaactttcttatttccaagatggagaaactgagggttggagaaaaagaaagatttctttgttagatacaaacagacaggactaaactcagtatagcagcctcctaaattccaaagtatcatgatactgtgattttatgcattcttcagaaaaatagtagagccactggattctggcaaagaagttatataaaatgtcaagttcttcctttgcctcagaaatgaagttttatgttccaaaattgattgggaagttctccttatacctcacatcacgtctactattttacattgtttacttttgaagaatttttttaattgacaaataataattgtacatattcatggagaacctagtgatgtttttatatatgtaatgtatagtgatcagatcagggtaattagcatatccattatctcaaacattggtcatttatttgtgttgggaacattcaacgttctccttctagccatttgaaacttctatattattgctaactatagtcaccattcagtcgtatagagcactagaacttatttctcctatctagctataatttatttttaaatatgctttttgaatctgttactataaattgaatgtcacatcgttttgaaaatattcttaatttatgctcaacaggcaagattacacacctgtgataatatctttaatttaaaacattactctgtttaatttaccagaatatggaaccctagtcattttagaggtggagcaaatttcagtgataatctagtgcaaatttctcatcttatgaatgaggagattgagtctgatataagggacgagattttcgtcaatgagcagcttgttaacattagctctgtgatagaacacaggcacttgtcctcccaggccggtgtttcttctactctatgatgggctgttttgttgtagtttttaaacagcagcattttcaccatgcatagttttcttccaaagttcgttcttaacgtttttgcacagaataactagattttggaagtagaaaaaggaaattctctttgcatccttgtatctctggttattttctttgtcctttgatctctctctcctcccctcccctcccctcccctccccttcccttccctcccctctccttcccttcccttcccttccctcccctctctcacacattagagaaagagttaaggtattaaagaatacataatactattaaatttccttcacatagagaaaggaatgaaaaaaagtgaaaaatggtcctcaccaaatgtccaaacttctgtaggtcatttccatagtatcagcaatgtcctgtatggtgcctcggggatatgtaagcaaatgagcaagtggttagctaattctagctttggcaaacacttgttatggcttacttgaggagaagtcacttctccaaagtgaaaataatgtgcacaggtcaattagaatttttttgtagaaaaggaaaatactttgtagggacatggatgaatctggaaaccatcgttctcagcaaactattgcaaggacaaaaaaccaaacaccgcatgttctcactcataggtgggaattgaacaatgagaacacatggacacaggaaggggaacatcacacaccggggcctgttgtggggtggggggagggtggagggatagcattaggagatatacttaatgctaaatgaccagttaatgggtgcaggacaccaacatggcacatgtatacatatgtaacaaacctgcacgttgtgcacatgtaccctaaaacttaaagtataataaaaaaaaaaaagaagaaaatacctccttatgctcctgacttattttctttttggttcctcagtcctcttctctctctctctctctctctctctctctctctctctctctctctctcacacacacacacacacataccccacatatacaatatgattaaggatatatgtgaataatgaaagcttcttgtgtatagatttagaagtctaatggacaaaatcaatattttcctatgtgcatttaattcccccctttgatttaggtatatagtctttttttaaaaaagagaaaaaaaattaggtgaccttaaggtatagatcctactttcaaaaggtttacagaactagggagaggaacatggacaagatttaaagaactattttaagcagaataaaatgtgatttatgaacaaagcatatattatttgtgcgtatgtgtgtgtgccaacaaagatgcaattaggagattgcacagggagatgtcattagaaccaaccttaacgggtgagaagtctttgaagacatttagaacatggaagatctctgacagagggaacaaaggcatagtgacaaaagtcaagggcatatttaggactggagagtggtatgtgtggcttgagagtgggcgagaaaaaacaacaatgcctctgtaataggaaagtagacagaggcatgacattaagagctttgccagctgtgctaaaagtagtgaacaagagctaacaaagtgaagaaatgtaccttttctgatgtgtatcattcccttattcatatacttcttgagggggaaattcattctgtgttgatctagtaaactactacaggaccaaatgataaaaagaagtataggaaagaatgtttcagcatactttacgagataacttccttgtagctattctccatagtattttgagcatcacaaagcaatgagctgaaactgtctaagccaaaattgacttgtcatctgttagggatgcttagatgagaattctacatttgagagcttcttagattcattgaccactatgtcccattctaagatccatgaatgcgtgacctaactattacaccttcttttagtctgattgtcaattttgtattttcaattgtgcaagtttctaaaactattttaggaagataaatctagcagtggtgtgggaatagacaagagagaaggggaaagactcttcaggaaactaaactcacaatttatgagtattctttattgcccaagtcttcccaaagtctttcatcaagaaagaggcattgcaactctccttttatagtttgtttttattctggagcagtgatgttttggtggagttgttcctcagtgcgtaattaaagggcctatgacaattacagttcatctcctgctgctcaaggtactgcagatatttggatctactactctcattcatttccaattaatgtcagctttagatttccttcagtatgctatgttataaaatttgattatcgttgtgcccaccttcccacttaatttcaagcaggtttctcgattacctgactaaactaatgaaatctgactaacccaatatctgtggacagtagtgtgatgttactgatttttgtatgattagtcaagtcatattcatgccacgttttcatatagtaccataaaggatattcttctcgtggtccttttcttttattctgaacatacaatgagaagaccggtaaagtgggctaggaaattaaagaaaaatacaaatggcaaaaaatatgggtcactcgaagtctagaatagagagcacaatcaattttgaattaaggggtgataaggtgatttggtcaggtgactggtgaaacaggaaagaaactatactttttgaagtgtttcatccatgtgttaagattcatttggggtcaagaatctaaatttcatatccctgggagtggaaactaagtaaaaaaaaaaattatggaccttggtttaatagctagaggagcaagagtgtatctttatgtgacttaacttctatgtgaaaagtgaaccttaagattaattattgggggaatttacttactcaggttctatgcctagatggtctgcccaactaagaaaacttattttcctgttactccatcctatttttcatacttttatactgcacttgcagaaaagcatatatttctacccaatacgaaaattcctgggaacatatttttctacatttcccaaattacttcaaaaagtaaacttaggttatttcatgatctccattacaatggacaggtggccttattgaatgttgtcctgtgaatacaaagatccagagtttaaagaacaaggtgtacttgcatctcccacttagggtttgcttgtggtggagagagaatctagtttgcttaaaaggatgacagtgcagtgccccaaaatatctgatatcattaaaagtctcatatttgtctttcgtaacttctctagggctgtcgatgacaggagacccttaactcctatgccttgattatgtgaataagcacatgaaaatattttagttatcttagttcacttttaaactaagtttcaattatcactagattctaaatatcatcattgagccgttcttaaggaactgattttctacatattcattcacttcacctatatctagtgtgtctactatttgccaagaaaaatttactctcttaattcagcattccatatacttaacatcataaaaagtaggccatttttagttttctaaattatttatttaaacatttctttaaaattacattctatcattacactatatttcaacactacagtaagcagcctattttgtgatttttccttatataaaatacataattgaaattaaaaatgaagttaccaagagccattttcactctggggaatgcacatttataaattatggggttattttttcttcatcagctttcatattattaaactttgtctcttcataattacagagatgactagacacagaagggaatttaacatttggtgtgcatttgtctaacctatactttatgttagaaaatacatttccatttgaaaaaaaatcagtaattgtgggtgtgatcaagagggcagcctgaaagtcgggtgatgtgactcacacctgtaatcccagcatttttggaggccaaggtgggattatcgattgagcccaggagttcaaaaccagcctgggcaacacagtgagagcctgtctctattagggggaaaaaaaaaaaaagaggaagttagcctgaggcaatgtaaatgaaatacatatttcaaggatatttatacatgattcacgttattcatataaagatgtgccagagaagactataggtacgttattttacactattttgctaggattttaagaaattcaatgtgtttttatttcagttaacttagaaaacttacctaacttatacttctcatggacacaaaagtttttaaagataggatcaaaaagcccacatggtgaagcattttgaactggatgaaaaacatctattatctttaaaattttatgatattactgattgtaatagactccctttttaagaaatcattccttatagaacataaggtttacatttacaatcaacaatttctatccttactacaataaaggcacatataaaaagtacagttgcatatttagcaggtttaattgtacattttaatgtagaaatcaattcaattctttcatttatcagcattattacagtgatttcaaattaagcataggtaactttgatatagataaatgatgtacacagcagttaaattttattttcaattatgtagtaattgtataacctaggcagtataatttgtaaactttgtattttattattatgcttctcccacttggcataagcacaacacttcctaaaagcataattttctatagacttaataactccctaaaaacctgttttggacccctatactatttgatataggcagaaaaaaaacataatccatgctcaaatttgaaaaatgactggtcacatttggtataatactaaaggtaaataaaatcaagagtctatgaacatttccggacctgcacatttgttttattaaaatgcataattgtctttagtgtgtttctatttgtttatactctactgattttaattaaaaataccaaaatacgtttattaaaaaactgtcagaatctaagttgttaaatatacttaactaggaaagtaactgtttaaacgagataatttatagagaaatgtggtgtattgccaattagatgtcaagatacaatacaactgataatgaaaaagtagcattttcttagggatggaatacagtgtaaggaacaccccagtaagaatacaaaaattactgaaaaaaaatcttccttcctgaaaaaccaagtgcccttcaagtgcagaacctcatccaactaattgttaggtatcactaaagcctgataccttcaattttctggatcattcaagctgtatttttgagtccttatactagaggaggtaaagagctataaaaacacttaatggtatctgatgtgaactgtggatcactttgacccatcacttctacgtctacatcttggataaattcccattgttgtcatagattgtacaggtttaatggtgcgtttgtggagggggctcgcttatagaaaatggagactctgaagggataaggaataaatgtatcacttcaggtcttttatttgaaattggggtccagagagcctttttgtatcagacttgtcaaaccatttccatttagtaattatatatgcactagcacttattcctacttacctcacctctttatgcccatttccttgtagttgcggttatgcatgaataatttattgcaccccttaccaacaatggaataaaacttccattctgaaagctttccatactcatttccaatagcaatagggtttttttaacggacgtattacaaatgtacgagtcagttgaacatagtattcctctttgtaagaactccaagtggatgcatgctgttgtctcaaatctcaattagaccttgctttgaggtcccttcattgccagtcatctgttctccttcccctgacttgagtatttctccagatatagataatacattttcccaactctgtgttccaagaactgacagtggctttcattcattttgtttgtttgtttgtttcttctcgttctcaagtatcccgcagtctactgtttcttccctccattcgtttgtcctttcagagtttcaaaatccagcataggtacttcttctaaaatgtcttacccttcacatacacacaccacttgagaccccatcagcctctgtccacacagtttggttacattcatagactatttttatacatcaaaatatttgaaaattttagggtaaatctcagtagtcattcatttttgctcttattcaaccaatactagtcaatcagcctgtgccaggttttgttgcaggtaccaggtatccatccataaagaaaacaacgtccctttgttgtggaatttacattttagcaggggaggcaaagaacccaataaatatgataaaatatcagattaaaagtacgatgaaaaaaatcatcagggtaaaggaaaaagggaagcagtattttagcaagagtggtgaagagaggaggctgagagtgtgacatctgagcagagacctaaatcaagtcaaggaatgaaacatgctactatctaaagaaatgagtcaggataaggaactagtaagagccgaggcccagagatgtgaatatgctgttccaggaacagcaaagagactggttgatatgatgtgaaaaatgagaagaaaccttatgatatgtgtcaagagaaaaaaaaaatttaaaagcatgcttgggaacggaggcctccagatgaaaaaaaaaaacacagttcaaatccttgttcatgcatttagtttgctttgcaatcttgggcaaaatgttaaatttctgtacgttttatcttcctcatttttaaaataggcacaaggacatctacttaataggttcattgtgaggagtaaatgagatgatatatctaggatgcctggcattatatcatacacttaataatacactgaataaataatagttatgtctatttatttccttatcgtttttattattatttcaatgcacagacctgttcataagataatgataaatattagtggcagaaactgaagatgttataaattattaggaggcgggaccactcagttcaatgtatctgttttaatatagtcagcaaaagtgtgaagataccaacaattaaatttcaatgcattcttccatttcactagttttataaactgatgaactaccagaatgtcaatgtatgaattgcatactcattcttaacaaacagatttgcaaaattatgtgtaaaattagccctcagccttccaatttgttattgtcatatttcatggaaatacataatctgtaaatttttgttttaatgatatgtgaaactgcctaaagtagagtcttggcaactacttcacatttgtcctccagagatagtggataaaagtgtcaataaatgaacactctatattcactaatcacaggcaagggacaaggaacagagtggtcacaaaataccacaaaattaaagcacattccaaattaaatatatatgtttttattacagataatgtttgctagactctttctaattatctgcaaagattttaggaatgttttaatgttttaatatttacacacctgtgtatttcaagttcagtcaaacactattgttaaaactaaatcttctcatctctaataataagatgtgaacttatcttggaaggtggttattaggatgggagagataatgtatttcattcaaagtaaaaatatttctctgtttctatctttctctttctctgtcatctatttatcatctatatccaggtatctatgcacctatgtagactagcattcaatgaaccatagatattattagtagtagaattgttactaatattaaaataagaagtatttaagaagaaacatgtcctaaagcataaggtcaattattactctcatgttttttggcatatgaagcctaaaaagtgtcaatttcaagagagtattaataaagattgtgataactgaaaggttcctgcttgaaattttgtgtggtcttacaaatatataaactctaagcatttcagtgagccaattactgactaggcactatgtcttatgactcttttgtcatagtatgtaaaaaacaaagagtagagacatcataaaaattatagtagatgggcactagggaattacgcaaaataatttgtagatttaatgtgaaaccaaaacatctgttcaagtcaatttcccacaggtcatgtggcaaagagtatgagttccagactgaggagaggaaaaggttgttcttccacagggaaataaactgagtgtaataaacataatttttcttcttaagcattatttaaaacaaaaaaaatgccattaaatctatctttcctgcctctcttatcaatgctcccttccctttcaccacttgtttcaaactccaagccttgggattttattttggctttttgccttaatgtaactaaaatgagagcatcacaaatatgaagctcatcaaataatttagcagcattttcccctgtttttaactttctctttggaaacgtagatttcgaaatttaagggcccaaaatatgaaatgcaattataataggccatttgttcattcagcttgataaacttgaataaatagtattgaacttttaatgcaaaaagaacaaaacaaaatagaactctccacgaagaaacttttcaatgtttgcatttctgtgtgaggagaagggtaatgaatgtgggaaccttaatggaatccatgttcttccagtgatgacaagggtcaaaatggagaaaaatggtcactttctacccagtacattatattagttctatgtggacaactataacatagctgatgctggttttcaggccataaatgtaggtatgtattttcctactatttataaggcaaaatttctatttgtttaatgatttctatataggtagattattctgtctttaggattaaaaacgacctgtagaccaagagactttctaatgtccaccttagagtatatggcttttactgttacagtttccatttcctttgcttgcccctttgagagaaggaaaggagacatttgggatacatacatcaatgaggagctattaatgaataaatgaatgaaattgtcagtcaatttatccacatgatcatcaattgccaataattttatcacctctgtgggattaagtagaggtaacagtttagaaatttgattttttgaaagcatttaaaatgttcaaatatatcactctggtaactaagggaaagtgtattattttcttatgcttagtcttattttggttttgcctttttaatttaaattgaacacttatatcaaagagcttgcaggattataatttgaatttttgaagcaaagatcattttcttaacatcaaacaaagagtagatacaataggaataaaatcggcagaaaaacaagagtatcaaggacagacggggagggtgggtctgtgttagcatgtattgctatgaagaaatagccgagactgggtaatgtatttttaaaaagagctttaatcgattcatgattctgcaggttgtacaggaagcaggacaccagcatctactcagcttctggggaggcctccgggagcttttactcatagtggaagatgaaacaggagtaagcatgtcacatggccagagcagaagccagggggaggttgccacacatttaaaaaaaaaaaaaacaaaacagatcgctcaagaactcagctgctatcatgaggacagcatcaagctgtgagggatccacctccgtgactcaaacatctcacaccaggccccaagtccaacacttggcattatatttcaacaagaaaaaaagtttaattggctgatggttctgcaggctgtacaggaagtgtggcacaggcatttgcttggctcctggggaggcctcagggagtttttgctcatggcagaaggtgatgcccacacactttaaaaaaaaaccagatctcatgaaaactcactcactacactgaggacaatacaaaaccatgagggatctgtccccatgacccaaaaacctcccgccaggccccaccaccaacattgggaattatatttccacttgagatttgagtggcggcaaatatccaaactatatcagggctcatgtccagttatatgtcaacatgcctgcattcgaaacatcctgtccaaatcactgccttgtcataatacttatatttttctttattgaatacgaacacaagaagattaaataatagcatttctactttaaaacagtgggcaccatattaacattggaataatagtagtaataacgatagtaataacaatgatataggctgggtgcggaggctcacgcctgtaatcccagcactttgggaggccaaggcgggcggatcatgatgtcaggagatcgagaccatcctggctaacacagtgaaaccccgtctctactaaaaatacaaaaaaattagctgggcatggtggcaggcacctgtagtctcagctacttgggaggctgaggcaggagaatggcgtgaacctgggatgcagagcttgcagtgagccgagatcgtgccactgcactccaacctgggcgacagagcgagacttcatctcaaaaaaaaaattaaataaataaataaataaataataacgataaaaggatatgtgtaggttttttttttaataggctgttaacattaataggcattgtgatttcagggatatcatcaaacatcctggtcctaagacatcccctattgaataggaagggcttaagttaaacttctcatgagccacaattttctgattatatgtttggtgtgtgtaatagccacctcagtgatgatttgattagcctggacccttacataatcattgaagtatacccatgttcctttatatacttctttagtgttgaaagctcaaaattaagcaaaatagtccccttgataatgtttagattcttaacatttgctttctaaagctggcaaatactctcttcccagtgtcatgaagttaaataacatgttgcttagtgaggactttaatgttgccatgccataggaagaccttattcgaaatccccttacctgggagaatgtcagattattaccccccaacttgtttaacacttttaggattttaaaggtgttcacatttgtattagaacaaaatactattgagaaacatttctagaaaaaaattatctttccaaattaaaatcagtggtatgtaatgtaggagtctgattataatgattaaaatacatgggctttgggcatactgcctaggtgaaactcctggtttattgcatcactattagtataacctatgggagttaacctacgtaagcctcagttaatttttctctcaaattgatctaataatcgtctctcataggcttgttttgatagatatttcagtgtatataatatacttaggacagtgcctgatatcagtaagtctccttatatgctatttttctttctattttaattatttatgcaagagaaactattatgctttaactcaattaaaataaaatgcctttgtatttattcatgtcaaaggaaatatgcaagtattgcattcacttcctaggtgcctttttgaattgagctttgcatggttagtttgtataaaaggttcagtgaactttctcataatgattttttattgaacatatggaatccattaagtgttagcaaaagtcactatccactgagctgtgtccaggggctgacagttatgtctatctcttgcaaaaataaacacatacataaatgcactaagacgtatattacctgtcgtcatctcttagagcatttccatttttcttttaagttttttctttcaatgggttttttatctttgtgagtacatggtaggtgtatatgtcaacggggtacatgaggaaggtgtatatattgatggggtacaagagaggttttaacacaagcattcaatatgaaatagtcacatcatggagaatgggttatctatcccttcaagcatttgtgctttgtattacaaacattctaattatactctgttagttattttaaaatgtaccattaagttattactgactatagcaaccctattgtgctatgaaacagtagatcttattcttatttttctaacatcttagaacatttccacaaacactacctgcttgttaaatatacctattctaatcttcatataatcaattacttttttcctctagaatgtactatgacacatccatggggaaaatgtagtaatctaattaagactatttcctctcattttatatttaaaagaatgtgctctatcaatttatttacttgtacagccgtaggcaacctctaaaatatttaaagttcttaaaagtcagatatttcagttaatattgtgattatatagttgattttgatgaacatgttcatctaccagaaataaattatacacacacattgatatggttaggctttctgtccccactcaaatctcattttgaattataatccccgtgtgtcaagggagagaccaggtggaggcaattggatcttgagggtggttttgcccatgctgttctcctgatagtgaatcatgagatcagatggttttataaagggctcttcccccttccctcctcactcattctccttcttgccaccttgtaaaggaggtgccttgctttctactatgccctttctactatgcccttcaccttctactatgattgtaagtttcctgaggtctccccagccatgctgaactatgagtcaattaaatccctttcctttataaattacccagtctcaggcagttctttattgcacatatatgtgtgtgtatgtgtatgtgtgtgtgtgtgtatatgtatgtatatatgtatacatatgtgtgtatatgtatgtatatatgtatgtatatatgtatacatatgtgtgtatatgtatgtatatatgtatacatatgtgtgtgtgtatatatgtgtacatatatatatatatatatatatatatatatatatatatatgaacagagagagagagagagagggaggaagggagagagggagggaagcatggagaaagagagagtaatagcctaaatagaaataaaactagctccaagtacaggttcgtcaacactctcctatcatacccccaccaaagttaatgttaaccacttggagccctgttcttccttagttgtggagtactttagcaaaattttaaatctaattatgcctaattcaacgacagtgctaatttgaaagtgttagaaactgaagacctataataataatgagagttacaaaacataaatagtgagacaatgatgaatgtagtggatgcatgtacgagggctatcatttgacagtagagatgatgctcaaggacagacaatgagtctttcaatgtgtggagaatgtgctgctgttacagtgatgtacaggaaagaaacaaaaactgaggaagtatcagtaaacaaaacactcaaacatatgagtatacagctagaataaaagcaacagtactagatgacaataagcccaatgttaactcagaaagcagaaggtttttaagaatttggggaatactgtggctgatgatacttatgtctcaagccacagatgccatatgggctctgcgcccagttgaatcggcaccacctggcagtaagtgggcaggtccacgactgccaggacatcccttccaacacttgtggagatcaccaggaaggggggagagacctgccttgacagattttcaatgtgggcgaaacaggtctattttgagaaaagatgttcaatagaacatatgtcagcaaggaagaagagatgatgcttagttctaaagctccaaagagctggcttacactccaacttggggaaaatgcatccgggaaatgcaagattaatctcatcttagccattcttttgaatggatggacatgacccctttctacttgaagacagaaaacataaccatattgatttcaggttttcttcattggtttccatttaggattgttcctccccatcttctttctgtgtaggcatcccagttcccaagtgttcatgaagcacgtatggccttcaggggatgtgtctgtatacattgttatcttatggatgcacggttttgtctgcaccttggttctgaatgtctttactcttgagcatctgcccatgggtccccttctcaaggcctcaatttcttgagtttaacactgcatggcccatgcagcttttcagttaagcatctcttgctatgaccaactcttttcctcagtcaactcccacactcttttcagggacaggaaaaatgtagccacttgctggctgcactctgaggcctcaagaaatttagtgaatctgcctttgcccttcttgctgatgaaatactgccacatcaggccccctcttcggaaacctacaagcatctaattttcttgcttcctccccaactttctttttgactcccccccatccagagagttcttatgtctactgtactaggaaaaactcattcttaaggtatggttttcaaatcattctctggtctggactttagctacggttttaaatgaagaaacaacccagagccaaaatataatgaaactatttccttcttccacagagtggaaactgctttggggttaaagggccagtgaaccaaatagaaaaggatctcagggaacacagattgaagagagagaagaaaaaatatgaaggcattgttggttctcttttgagtttaaaatctagtggggattgtaagcacacacacatatacacacacacgcttacacacacacaccagtgaagttatgaaggattttgtcactccaacgaccttgaatttgattatctaggtcagttgttaccaaagtggaatgtacatgcccaataatatgcgtgctaaacagttggggtagtgagaaaaaatactttttatttatcttgttctctagaaattaatattttgattgtatattttatagtgtatgtgatgtgtaagttgtgtctacaaaactagtgtcaatgtaatttaaaattacatatgtctgtgaatatatatttatatagggtacatgcttaaaatgtgtttacttctgaggtacatgaacatttttcccccaggcacagaaagacaaataccacatgatgtcacttaaatgtgcaatgtaagaaaagttgaattcatagagatgtagagtagaatcatggttaacagaggcttgggaggtggagtgagggaatagagagttactgttcaaagattacaaagtttcaactagacagagggaatacattttgagatctatttcaggaacattttgagaccctcactctaagtaataggaaatcattactttagttaacatatttgaatatgagttgtgatgttctatatcgtttatttggattctactaacccacacctagatttttatggcattacctttttactcactgtgaatatcctactcatagacagatgccctgggaacttggacttgaggcacccaagaactgagacagtgagatttgggggcacaaggatctatggataagttcatcttagtgatgataaaatcaatttggcatgtttcacggacagtgtgcattttagaaagggtaaagacttggaaacgggatatttttgagcccaagtgtttccaataaatagctgtataatttgaagcaaataattgattttttgttctctttgtgccctcgcctgtaaaatgggagaaatgtattcctttctcatccttctcatgaggccattgagagtatctaatgagatcagactgtgacatagcataataattctcatttcttgaaggcctattatacactttgcaagcactgtatgtgttgtttctacttctcttgttcgtttttcctggaataaatatccccccctcctttacattggattgccattattcaccctgtaaggaaggcttcatggttctcattttcatctgagaaaacttaggctcagagaagatcagtaacttatctaaaacacacacatacacacacagacatatctatgcccattattcttaacctagtttctctattcaggagttatctctgctgtctctgcttctgattataatctgtgtaagctgatccaagtgacacgattacagggaaattgtaagccctttgagagcagagactacctattgatatctacattttaaaatttgattttagccaacctgtttatatgcaatgactaacaggttagtttgacttgcaataaatattccaaatcctagactaagtaaatttattaatgtaatgatttaacttgattttttcattggcatgtttccctgaagtcgtcatgcaaaattgaaaaaaaaaaaagtatagtgtgtgattctagattgaaattcaggaatcctccagggttaccttgtttgctttccaaatagttcagattgcttagtctgaccaacaaggtccctgacacttggaactctgtctatccctctaattgactttgtccctgatgacctcgcccagagatactcttcaccccagctatactgtgttgctagagtttctctgatatcccatgctattgtttcctttgttctcttcataaggtaccatttcccacccgccaactcctgttttcctgatggacttttgtttcaccttacaagatcattgctaatgtatttattttgagaataaaaagtgtaggaaaggtcacgggacaaagctgtacaccagacctttcccagacgaacctagtgtataatctccctagtccaacatcatggcttaaggcagtcgatagatccgtcttaatgtcccttttgagttttctactattattatatgaggatttatttttgtctgaattcctccctagatttgccctagagagcaatgactatttacagtttattcctctttgtatctcttatgttaaggccagaccttggcacatattctagctgattagaagacgtttgttgaatgaccaagtgattgaacaaatgaccatgtgctctgccacagtccggtcagttctactttggtttggttatgtgtttgccacattaaagttgtagcctgggaagttcagttgtgagatgtctgcagaacatgaaaaattggaataatgaggttatttctaaaattgctataatttaaaataaatagtggtttattccatatatgaatatacactggaaacaaagaatttctagaatactggagattcaatgataacatcattgaaattaaataaataataggattatgctagttactttctaatttactagaaattgaccgtgtgcatggcacgtataatgagtatcatgggatagttacaaaaagtggtgcttagtgagtttctgtggaaaatctcggtaccaataaaacggaggatttccagaaatcgatattcctcaaagcttgacagtatttatgcacggttacactttgtgtgtctttcgtttgaatcaatggaaggaggctataactgaaaattattgttttagtgtattatatctttaataataagagttttaagaatctatcattagaaataattattcctcaatttgtaattctcaacatttgaacaaataaatgctctgtgtctatcagttaatcttgcccatgaagatttaataaagcacgctagtttttacaaatgtgattttagagatggtcattacttggtaaaatattttgtgttaacacttccatgaatatgttctgtgggaatatactgcctccacattgcttgctcatgaagacatgatttttcacatcatcctatcagtattttgagaaagagattgatcccatattctatgagcatttgaacattctctagtatttttgtttaatcattaaaacaacccttgaagtctatgtgctacactggttatttccctcttgactttcctttacagataaccctctatcataaacaacctatctatatttgttgtctccacatcatgttgccagccctgctttaacacactgcacattgacttctagcagcaaaggctcatgggaggtactctcatcaaggacactgatggtcctcatgttgctaaatttggtgggtcctctacagtctttatcctagttcaccttattatggaccactgtcaactctgttctgcttaaaacactctgttccttgcttatatgactctacactcttaactcctttgtgaattcctcatctgcccttccattaagtattgacgacatccttcatagttttgatctaggacctcttttcctcttacttgacattatgtgggtaatcttgtctttgaacgcaattaccattcttatgttgatgacccttaagctataattccagcccaaatcatttttctgaggaagctacaagaatacacaaatgtctaatagatctctatttagatgtccctcaggtgcttcaagcttaaaatactcacctgagctcatcacctcatctataaattctgcttctcctccctggctccctgatttatttaatatgaccaccatccacttagttgaataaagcagaagcctggacaccatctatacctccaattaatcactaagttttgttgttaaatacgttcttacattttctctctagaatgtcttattttccccatctttacacccaaaaccaaaagtcagatgaccctgatctcctgcttagatttcaaaacactatctcttgcctagactctggaatttcagtcttgctcctctccaatctatttctacaccctagactctggaatttcagtcttgctcctctccaatctatttctacacaaaagctagagtaattttttaaaaaacaaaaatctgaatgtgttcattttctgcctaaaagccttcagtaattcttatttgttcttccagggatagagtaacaactttcagacctagtttattagctagttctttaaccacaaaggactctctcacttgtctactccccctaacacacttcgccctaacctttgccattcctccctttcccttttccttcccagatggacttaagtcctttcagattcttaaatgtttcttcctccagtctcttacatctcttttccttgtaactctaaaaactacttagcttacgcaaggaaaaaggtctgtacaattcccggaatcagcgatcctaacgttccctgttgtttttttcgttgggacatgaattcattcacagtggctctaaacatcaccacccctgcctatctctcccattcctactttatctgagcttatccatactcttgaagacttacatattttttttctaccaggaaatcattactagccttattatcccactgtccaaaccaataagtctgattaggtatctgtatatatttaatattactatatgtgtttttctaacactctagtagaggagaaggtgtatttctttctgttttttagaagcctgtatttctgctattatagctcttaaggaactctcatgcaattgcctactagaatgtaagttacggtaggataagaactggatcagtcatatcacacatccacatataggacctagcaccatatctaacacacagcaggtactcaatacatttctttcccaaataactaaagagtttaaacaaaccaaaatgattaaatgagaagtaactgttttggtaattcttgtgtccttactagagtctaaattgagtgatttttatatcatcagtttatactcccctttcccaaccccaattctttcttttttaaattttttaaatcaaatatgccttaaaacttcaggatcagttgagtaaaatgatgcttttgtcgtcttttgcaaaataattgtatttcagaattttgatttagatattataaacacacctaaaataatagctttagtcttaagatgaagtgcttcttaaactccctaagatgggttggactatggatatgaacatggacaatatcacattaatttgtgtacacagttctaacacagggtctggcatataagaacaagtcagtaaatagttgttgaatggaattgaaaatttaagtagcaaataaagtattttgacctacaaagcaagaaatcacatttttctttttgtcacagttccttaggaagataattaattttttagtatttaaggatgttaaatatttattttatgttctatttactaggcttctttttatgaaaattaattggtgaaaatagcgtacatatcttcctttaccagaacatttacattttgggcagtaacgctggcttttgttaaaaaagcaaaatatgtgtgaaatttatgtttgagttgatttcaatgcattacatttccattttaaatcttctttgaaatactctatttttgacaccatgaaactgtattagatcttagtatgttagcaatgttttgcagttttagagccataattattttaatgaccactttcagcatatacgttttctacaggaaaaataatctcaagaacatgaaaagtgaaatctatattttgggtttcaaaatgatacattttagctaaaatatcatagttttaatttctcagtgaaaaatatagtgtggtaatttatgaagagactcagtgtttaaaaattatgactctatagtcaagtttatgtttataggacataggttattcaattacatttaaaataattaatttagaaaatgtgatcaatgtaacaaattttacctgttcttttctaaagctaaatttgttgtttgaagtgtttcttctaaaatgctaatgaactatcaatttaattgttgagcttagagttagaaacttaattatattgccagaaataaagaaacaaatggatcccaaaagattcacacattagaaatgtatgccagggaaatgcttttgaatgtgttcaagtcatggcttctaactcgtaacttataacttgtgttatgtctggcttcattcccttaagaaaaaggaataataatgccttcggagagcatcccagctgtaagagctatgcattggtgtctaaaaaagcttctcactcctcataccatcctggtctgggaatttaaaaaattgtcatcttttgataatctgtatcacatagtcttctgcatagtcatatgaggttagaactgccccataacttttgcagggcctatagtaagtgtgcaaatggttgcctgcatgccacatatttaatatttataaggtataaagtcaacagactattaaatatatcctatctgctttccttgacaattatacaatcataatgatatggacatctagattcgatttagaattctctctctctcattttctttttcttctttctttctttctctttctttctttccttcctttctttctttctttcttctttctttctttctttctttctttctttctttctttctttctttctttctgtctgtctgtctgtcttgtttttttaaatagtgcaagcagtttattccctggcaaggaatttggaaaaaactcaaatagcaaaccacttgatacaataaaataaattccttagagttttgtactggaatgaggcagcttggttagagctaaccctaagcctgttatttaggatacattggcttttcttaagcttaaaaaaaattttactgtgttaatgacatttaacatgagatctatcatcttaataaatactacatgcacaatacattattattgactctaggtagaatgttggacagcagatctctagagctaattcatcctacttaactgaaatgtaatgtctgttgattagtaacttcctatttcgccctatccccagcccctggcaaccaccagtccagtctttgattttatgagtttgactgttttagataccttatttcaagtaagtggaatcatgcagtatttgtctgtgtctgtcttgtttcacttagcgtaatcttaaggtccatccatattgtttcatattgcagaatttccttttataaaggctgaatagtattccattgtgtatatataccacatttatctattcatctgccaatgggcatttaggttgtttctgcatcttagctattgtgaatctgttgccttttttccctacctcctttactccatcctgcactgtgaggaactctgtgcacatagatctggtcgccccatttcccacccacatgttcaagtttttcccactcacctcatgcaaagatttaccccttagccatacccagtaactgactttgaaacatttgcccagggagttgagggattctgaatgccagatcatgggagcggggcttctagtgagcatgttggcttggtcctacagactcctaatcagagctttgcctttgaaagcatggggcccaagggcaaggaccctacttgttaaggtctaaattttttttctgaaataaccacatcgagcttttatgtgtagatggcctaaattgggctaacccagaggcagtgacactcaagtagtttacatctaagcgctttccatgtgcttcttttcccatttctgttacttcttacaaaataaaaaatcagcatctcaattaccctgatttgatcattgagcaatctaaaaagtatcaaaatatcacatgtagcccccatatacatacaactgttatatatcactataaataaatatatacacattatatttaaaaatcaatactttaattttacatgtttaacaaatcactagcatatacattccagattgaacttacgagggatgtggaaaagattcagtgactaaataacaataaagtactctaaaaatgaaaatgtgaaatggagacagtataaatctaaaatcatatcacttatgaagtattgtttcaaataaacaataaaatatatcttcaatcaatttaattttattttagttgtataaaatctttcggtcagcattaacctaattggaacactaaataggtacatctaaaaaatataatcccccccaaaaatatgtagctcataagagataatgcattgaacacagataatattggcgttaaaaacagaactctaccacatttgcaacgaaatgtttatctgttcttcctactagaaaataataaaatagttctgcatgagcttgaactcgaagtattaggtgtacaaagaccttttagtgaatgaatgctagctgaaaagcaaattttaaatatgaaaaattagcaagacaaacatttgaatttgtgggagatgagtaaaactcctataaaaatgaattgtttagtgttaaacagattgtgtatgaaatattaatggcatattgtcctgagctccccttccgctgtttccatgtagatgactgaatttcaaacagaaatatgccaggaatgattacgtgaatgaatattactacatgagattgcttaaagagtatttcttcttttgccttctttttactttcgttatttcatttagtagttagaaaatactgtctacaaatatgtgagaactgcttaatttatttttgagacattaattaattcaactaaactatattgactgtgtgagagagattcccttggtgaatatgtggatttttgcggtggtaagaactctcctctggagcgcaaatggtattgctctaggaataaagcatatacctcaggcccagatgaaccagtgcaatctacagtaacaggttcaaagatgacctcatgacctactgtggactaataaaaatcaaggagacctactgcaaaggtttctgggaaattctttttctcttgcgttgaactaagtaatatacatatgtgatagttagagctgcagcctttgtaataccatgacagaagataacctgaaataaggctgacagacacaagagggagacctaagagtactgagagatatggagcaggaccccctgattgaacttcacttgcagcccccttctgcagttttcaatgacgtgaaccagtagaatccctttgtttactgtttttgattaatttgagtgcagctttatgttatgagcaactaatagcatcctcactgtcacaactgccctctatacggcaggcactttgtgatactaaagaaagcagtatacagagtagagcccagtgaataacagggcagatgttgcaattaaactgcctgtttaaattctagctcttccactagctaacttgtgactatctaagtaatttaaccttcctataatcatacctatcttgaagacttgttgtaagatttaaagcacaacagtgctactataaaacaggtatacagtaaagcttagctacttttttattaggccatatgatatcatttcattaaaatcttatagccatgctataaggtattatgatcctcaatttataaataagacagctcaagttttggtcaagtgactttaccaaggtcatagagctagaaaataatgattccaagttacaagccaaacctcttcaatgccaaatttacatcatcccccattacttgaagtgtaagattcacatggacagaaatttttgactgtttgatcactgctatctccttatcatctaaaacagtctctggtccatattaggtgttcaataaatatttgtagagtacataatttccttcacagactccacaatctggtgaaggaggcagacatgtaagagaattatttcaggattccacagttgatgctgtaacagagctaaatataatgaatggaggaggaatgaataagtttgtctgggagcaatgctatggctattgaaataagtcttgctcatgctttgattgaaatggtggatatagatcacacaacaaataacaattagataacagcttgttgggagaaagcgaggatcagtgtttgccataaacatttctcatagctaatgtcaggtgtttgatttctcaacattttatatctttgactttgattttctctgtttttattttttaactccattctcaagaagtctgcacataagagtttcaacatctagcacttcataactccgtcatctcctctcaggcttagagcaaattctgagacgtggatttatcgtcgagtgatttcttcctggcattttatctctgagaccaggatctggttgctaagcatgtagacatagaaatgcatttcttcattgaaccccataggttcaaactagtggataatgagcacaatgtcaatgtgattatttgtaatgggggaaaggttaccggagaatattacacgaccatccacatagactaacattttcctcatgactaagtttacttagcaaaacaaattaaaaacagaagtttgtttagcagcacagaattgaaggaagacaaccagatggttatgaggaagattcatccaaactatgccagaactgaaagaaattaagttcattcagtacaagaattgtctagaataagagaatccattttgtgtcagcacttcccaagttcttgttaatgctaccttaagttcaattcaaaccaggcagcatttattacgtgttgtgctgggtcctaggaggaccgcgttttaagaacttactgtgatcttctagatcaagtttttatttcaatatttctacctcatttctgattcttaggtgttccttatttcccaatttatcccctgcagaaattgaggcaataagatgtctatcttattgcctatggtgttgattatttatgttatattctgttttgtgaagtttgacctctacctaattaaattacattttcaattgtatcttggattgatttattcaataagtattctttaatatttttgcatgaggtcggtcaggtttcatcagacattaggaattaattataaaaatctctagattggtacttggagcttaaaggaataaggtggtggaacgttaaatgaggaggaaagaaccagcagagctgggataaaattcatctctatcatcttcccacctgcttgatctctggcatataatttactatccgtgaacctcaggtttctcttcagaaaagctgcagggttgttgggggaaataaggcaattcctgggcttcagtatgttcaaaacagagcattaatattattatagacttttgatgatttacacaattttagctttttggcaagacatatttactagtactaagtaaaagcacgttgactttctaaaatgaaaatgtgtatgtgaggatgaagaaaaagaaagtgttttgtttgataatatagcattataacactgcacaaaaaaaaaatggtatatgcagagacttccatcacttgcttatgatgccgcattgggatctcattaataagacacttcctcagacacttcctttgtgttcaataaatttcaatttcctcctttccttcagttcacttcaagaaggacggcagcaactttcttgttgccaaacctgacaaatgttttttagtgctgattatactcgagcattctgtagcaaaatgctgtgggtgaaaatgccttccttcttaagggaatttagcttctgtagtaccagaatctccttgttgaatgaacatgtactgcctaagtcttagtaatccctcctttttgagcccattttctggcatctctccctttaatattcctcaaaaagttggatttttcctggacttttcatattacagactttcctttggtcatcctcatccattccgtgattccaactacattttccctccatcctggcatcttctttcttccagacttgtatatgcaactgcttccattcatacacttgaccaaccttttaatttctataagatcaaaaactcagctcacaagctttcccctaccatcgagcggggttcttcttttgcttctttgtttcagacaatggcaccaccatactcgagtaaggcacgttcatttatcaggtcctaccaaatctacaataaactctcttgaatttatccacttgttttcatttgaacagtcatttctttacctgggtagcctgcaccttctacctgcattgattcagcagtctcttcaccactggctctccctccctctcctgcctctcttcttgctccttcaatttattctctactcttcatagtgacttttattaatgcaaatatgaccttataactcccttgcttaaagacccactcatgtttgtctttgtatccataacttccggcctagggcttaacgcatagcaggtgctcagtaaatctgtggtagatgaaagaacaagttgtataaatactgaatggtctgatgtgctctttgttgtgtcaagaaggacattttgcagtcaggatagctacatcagtcctttagtaggcatttgacagcactcgcattattcctcaagagaagatggatgtattgattctgtatttcaaatgacataacttttgtgaaataagaggctgccacggtaatctgagggatctctcaagttcaagggactccacagtgctttgtgtaaggtaacaggctaaagggttcagtcttaaactttcttaagactgtagttcagggttcctatggtggggctataaccctgaattacatcctctttcatttcatgctgataatgagaactacaaaccaaggggtattaggaaagaatccaggtttgatgcagggaaaaataaaaacaactgataatctctagtgtccccaacttcaagaattcctttcttctttacaccaagctttttttctctgccaggacttactttgtcttctacatgtttaagggagaaaaatgagttaacagaaggggaggtacagcatttctatttacttagatgctagagaacaggatgaaaggtatgaaaaatatgaaagtctctctctctctctctccccagccttcccccgcttctctctctctctctctctctctgtgtgtgtgtgtgtgtgtgcacgtgcgtgtgtgtgtgtgtcataatactcaacctttcttttctttcaagcatatgttgtggcagagacaagtgtacatcaaaattcgtggtccctctttcatagtatagagttcttgctaggatccagctgcaagccagcaactacatttcccagccccactggcatctagttagagccatgtgactagttgtgaccaattgaatgtgagtgggagttatgttgcaggcataccttttccatcttcttacttcccatttgctaaccttatggaaaagagtcccaaagacctaggagatgaaaaagcctaaaatggaaggactcagagtccctgaattactgggtagagaaaagctgtttgcagatgggaatgcccattttgtagtattctttcttttcttaagccactaaaattgtgggatctctttgttatagctactggcattaacctcttacgtatacatacagctatgtgctacaaagaggaatagatacattttttaatcgttgaaaggggagaaagaaacatatttaggaggaaaataatttagtctctacaattgaaaagtgttttatgaataatattttgttttggcagcatattaaatctcaggcagctgaactacattaattttcaattctctatatatgtttttgtcttcagggtttagtaacactgatatataacagtttctttcttttaatttccaaatttaaatgtctaagtttgccttctaggcagaaattaagtcccattgtggaatgagattggatcaacacttcaccaagatcattttagttctttgtaatcttaaatgaaataagctaataaagcattaaattagcatgttgtaaaacttcgtgaagttttaatatgcttctaagtggcagctcttagcttattatctctaaagctaaagtcaaaataaatgtctcagttgatgaaatggagatgaggcaacattttatcaaatttaacaaaatattttatatctgaattataaagtccagattatctagtaattatcatataaatgtatttaaccagacatgcatttttctctaatcagtagccctggagtctttggaccacaaatgtgccttatctcaaatgctttaactgtgacattttgctttagactagctcgactacttctacagaaattatacacttcattcacattcatccagatgaaaaaaatacatgtagaaatgatcataataagtaacatttgtttaggatttcagagtttacgaagggtttttctattcactttctcacttgttcttcatgtaaactggtttggtggacaactgtcattatccctgttacctggagcccctgggtcttagggagacttcttgacttctcaaggtcatgaaggtgctaactctgaccgtgtttttattcctactgtgccacacttctcaggtaaaaatcatattgcagacactttaagagaagtacttaagaaaataaattcctccagagaattacatttaagttgtttcattaactgcagtgcataaagaaaggaaaagtgttcccaaacccatgtagtattttgctattgcttatggtaatattctgcacacctaatattgtcagcataattttccatgtaacaaaatgtcctaaatcagcaatgtccaatataactttgtgtgatgataaaaatgttctgtctctgtgctgtccaatacaacagccactagatacacatgactactgagcaatggtaatatggccagggacactaaggaactaaatttttatttaatattaaataacgtttaaatttcaaaagccgcatgcggctagtggttgtcatcagatactgcagttatagaaaattagaatttacctctttaaatactaaacctatttttaatagtaggatttttaaattaaaatagttctaagtgcttttaagtgatacgaagtcaaatgcaagatttctgttttaatagtactctcaacccagagacaatcttcatgcatccttatacatgttctttgttgccttattctagttttattttaacattaaatgcctctgttctacttgatattgacttgcttcagagaacaccaagtatagtggaaagaaacacacacatgaggacttgaggctaccaaccaggttcaactaaatgcactctgatttaattgtagtattgggatcccctgttgcatttattgaagaagaaaaaaactttgcaaccaaaaagatatttgaaagcaactgttcttcttggacacatgatccctcataaagtggggcttcctgcttttcagagacttaatttctgttcatattcatttcagcaatagtaataatgatgatggcgatgatgataataatcatgatgatgcctaagtgttgtagtaatgcttcttctgagccagacgttagtcaaattactttctctacattaattcaggcaatcatcacaacaatcccacaggacaggttttattattatacttatttagctagcaaatgatataactaggttaagttacttgcccaaggtcatactgccaagacagtggctctagtgtccctgcttctgaccatatgttatgctgcctatcctagagcttttctcttctaaaatagtaaaataatatattctttgtttgtttcatacttttttttttttttttttttttgagagggagtttcgctctttcgcccaggctggagtgaggtggcgcaatctcagctgactgtaacctctgcccccaccaggttcgagtgattcccctgcctcagcctccgaagtacctgggataataggtgcccaccaccatgcctggctaatttttgtgttttcagtagagacagggcttcaccatgttgaccaggctggtctcgagttcctcagctctggcagtccgcccgccttggcctcccacagtgctgggattacatgcatgagccactacacccggcccatacataaatattttaagcgaagtacacatgcatgatcatcatacttttaataatttcatttaactgtttccaaagaatgttagtatgaggttttctttttttctttttataatttcaacttttattttagattcagcgggtacatgttccctggatatagtgcatgatgatgaggtttgctatatgaatgatcccaccacccaggtagcgagcatggtaaccactagttcttcaacccttgcctgttcccttcctccctccttcctctgtagtccccagtgtctattgttcctgtctttatgtccatgtgcactcaatgtttagctcccacttttaagcgagaacatgcagtactcgttgtctgttcctgcgttaacgtgcttaggatagtggcctccaattgcatccatgttgttgcacaggccatgattttgttagtttttatggctgtgtagtattccatggtgtatacgcgccacattctttatcctgtccaccattaatgggcacctaggttgattgcatgtctttgccattgtgaatagtgctgtgatgttatatgtactttttggtatattcaaagagaaatgctattttcctcttgacatatttatgtcaatttaacatatttatgtcccttttctttttaggagcaccattctcttcctttaacattataaataaaatattttttgcttttctgtttttgtaagtgcagttttattgacagagtgagacatacacgtcgatattgtgactagctgcatgtcttctattatttagaggtctcactcaaatgtagattatcaaattctgttagtgaagagggtagaacagcagaactaatgctggtttccttctctagcattatttgatgataaactaagatgataataccccccaggtcttagatacctgcagtaggacaggcaccctacatttaatgctcctaggaatccttcaaagtgatagcatagttattatacagtaattgagaaaactgatgttcataagttagaaatttttccgaagttgcaaagaaagtgaatggaagaattataccaagttctggccgggcgcagtagctcatgcctgtaatctcagcgcttcaggaggccgaggcgggcggatcatgaggtcaagagattgagaccatcctggccaacatggtgagaccccgtctttactaaaaatagtaaaattagctgggcgtggtggcacgcacctgtaatctcagctactcgggaggctgaggtaggagaatcacttgaacccgggaggcggagtttgcagtgagccgagatcgtgccattgcactccagcctgggcgacaagagcaaaactccgtctcagaagaaaaaaaaaaaaaaaaaaagaggattataccgagttctctttgattccaagcccaaacaaatccttttttgcaatatatgacattgtttccctgtttgcattccccattctgtgtatcacacatcctgtggcctgatcaaaattcattttcagattctgaatttattttccattgaatctatataaactataaagacagaagatatatgtatgtgtgtatacccacgtttctcttccagtgtcaactgataaaaatagatttcaaagtctcaataacctttaattccctttttctcttaaaaattctttagaacttgtacatgacattctgactctagcagattttagaaaacagagaggccattagatattcataccttactattcagatgaagtattcaatgctaaattatgtaatttatctgctttgcaaattgtatggtcagattgagttccacaaaggagagataatttttaatataggcattctgtagcttccctaattattgaattagtttagagcaaaatccttaaattgtatcgttgctatgctcaaattttgtatacttgtccacgtaggctatattaagatttcattgaattttggtttctttctcagtgataattcaatatatcaactcaccactcagatttgcctttgggaaaatccaggccccttttctggatttttagagcagattttaaaaaagtgattctgtatatgtgttgaaattaaccacatctcattgcttttgaatgattgaggtaatgtatacctactactttaaaaaaaatgacttacttagaaggtgtccatagttttataagttccattgaactggtttatattgtatttagaaaggaaaactactccttttatccttaagggtgaaaacctggattttattatacaattaacacatatttattttttattatgaaatatatcacaatataaacgtttacagggagtgtttaaagtggtgttgtccaatggaaatataatgtgagtcaaatacgtagttttcaattttctactagccatattagaaaaagaaacagagaaattaatgtaataggatactttatttagcctagtatatccaaatcacaattatttaaatatgtaatcaatataaaaattactaattatgtatttaacctttttctttagtaagtctctgaaatctagtgtatattttacatttatggcacattgcaatttgcattagtcacatttgaattgttcaatagccacaggtggctaatggctaccgtgttggacagcacaggtttaaagaataatatgaacatctgtgttccaacattctgagtttcaaataagaagaacaccatcagtattttgggagaagctccctatgttaccccttgctaatcaccttccttccccccagagccaaaagtaaccattatcttgaatttctagtaaacaatgctcattttttaaaaaacgtatgttcaacacctgtatttgtatctttaaagagtagctagttttagtttgcctggatttgaactttatattaagggaaccaccccatctctaatcttctctgtgaattcttttctctcaatactatgttttacatatttacgttcatcaatgtgcaactcattgtatgtatataacacaatgtatatattttacatgcgtatggacatttgggttgtttttatgtttttgttcatcacaaaccacaacacacatgtgttcttgtatatgttttatagtgcatgtttaaaaatttctcaacagtattcgctagtagtattgtcaggtcatagggtatgcacacataaatagaaatgattgattagctgcaatttgtagtgcacacatatttgctatgtaagtgatccatgtttaagactttaactgaatttaaaaaatattttattggagccaatctaaatgagctaagggtttgtattgtttacataagcaaagattacacttactgggtcaattcggttgattaactttggatatataaaatatatagctagttgttaaatagatataattattaattggcattacttttgtttgtatataaaaatttcaaaatatccatgacttaagcaaggtaaacacccactgggtggcttaagcaacagaaatgtatttcttgcagttccggaagttgaacgtctaagattaaggtgatgacagggttggtttctggtgagtcctcccccattggcttgcagatagccgccttctccttcatgacctttcctctgtgtatgtgcatcccttgtagctgttcttccttttatgaggacattagacttattggattaaggtcctacccatatgaactcatttaaccttaattacccctttaaaggccctacctccacttgcaggggttaaaacttcaacatatgaatggggttgaggagacctacttcagtccataacagtttctatattctgaagatggtctttaattaactaaacagttaatgttactttactgggaatgtcttttggatgggggaataagctgatgatatgagaagggttggtgaatttctcataagtgtgaaatttgttgggccggcccagcatgattttcaatcaaatacgctttggggacaagtaggttgaatcactacgagaggtttaaaagaaagcaagttgtaattgcaacttttaattgaaagaaagacaggctttgttgatgtgccagcaagactgataactggctttaacgtagatagtaaggcagcagattcaatccactgatcgtgatctactagtgaatttcaaagccttatgcaatagaactacaaaccctttccttgcccaccttgcaggtggatccataggcaaaatgaacatttgcaaaaaagccgctatgtttcagaatttgtgctagggctttaatatctataatttctccaaatcctcacaatttaagaattaattcaacttagccccatgaatagggtgaaaattctgagatttaacaaactaaaataagttatctgaagacagacaaatagaaagagttgagatattctatttgaatgtaaaattttcaaaaagtagaatgacagcgtcaggaattacagtctcagtgttgaacacaagacttaggaacaaatttgctgcatgtaatttcattgagatgggacaaagtacagcatacgtaaggaagttttagaacaaataagataattattttacgagctttgaaacatgtgtaagaaagatacgaataaaagtataatcacatttgactaaaacatgaataccttaaaactgaaaagcactgagattatcattatataattttgaatattttaaaccacaatgctttgggagtgcactgtaatattttagaattggaattttaacttactggcttaaaaagtaatgtactttgttttaaattcaaagattatcttgtaaattcagttcgatctattgaaaaaattataaaattcggcaagaagccaaagaagaacaattatgtagctcaagataattaaattttcatgtttggctttagaaatatattcgtcgtgacatagtacatggtaatctagtgagcccagacaagtagttttctctttttgtcaaagggaacaatttgatgcgtgttcaagttgcttaaataaaattttgtatgtgctttctcatcacaagagaacaatatgatttttgaaattatttttactttataaaagaaaaaaaaaagccctcacagagaaaaaagaaaaaaatgatgatgtctttgaaaaacaaagttaatacagctttacatatatttgacctacatcagggttaatatttttcaaggtgaaacattagatgctggaacttgcaaaaacaggcaatcctcctttagatgaaacggacactctaagggttaattcattcactgagacctattgtgaagtaagccctacagagactgaaaaagttaaatgcaactcacaaaagttgctagaagagtcatgatgttaaaataaaataagtacacaatgtatgctgcaagtatacttagagccatgctaggtgcggttgagaagttcaatacaggtccaagataatagctgcttctcctatagaacatgtcttctcattggagggataagacctgtgtctatgaaacaggcgtaattacatagctctggaactatatatgccgaaataaatgagacagtaagtgttattgtactataaagaatgaagaaatcatgatgagaagtaacagttaatgaatgttttctagaaagagtaggatctgaattggccttaggttgtaagcagagtttatagatagagtagtggtatgtcagagtcactctgggtgcttaaacatacaaatccccaagtctcacccaaatgtgtcttcagatgaaaggaaaaaacaaatgacttgagctcccccgcaaagaacacgggtggtatattgagcagccaaggagtgaccagagtggcaggcccatgttgagggacaaaagaggacaattagaatatgattaatacaaatttacagtgggatgagttgttagcctgaggagcttgaatgtgaacctctgtgcaaaaaggagtcattaaatacttttgaaaaaggtgggatgggaagaaaatgacattctcaagacaattagatcgaacagtattaagcatgctgacttattaagttatgcaccttgagagggtggaatgagggaaaagggtctttatctggagtaagacaggaagaagctaagctgtaattcttactggactgtaaattatgtgcagatatattatctgtcatgttcgtgggcgcattctcagtacatagcacttgaaacaggtactcgataaattgtcaaatggatgcatggagtgatttccatgcaaaatctaatattgtatagtattagaagggggaaaaaagcatggcattatgctagcagaaatgtcatttggtattgaggatgaaacattttcaacagtttgcaaagccatccactcaaacattctgtcactttccaataattttgaaggatgttctttctacttctaccttattacacaatgagttgagtaagataaagaagtcatgtgcaacaaaacagagggagattttctgaaaggcactacaccaggaagttgttgtactcttgcttcatcttgccatcttggatatacttctggcgctacctccaggccagttcctcgttacatatgtcatttacttcccacatgctagactcaccgagttaatcattttgctgcagttaacacattttagcagagtgtaggtttatgggtgagaaggaaatcaatgatgtttcaatacagggttcttttcccatcccccttatttccacttagaactgtctctcaagtcttaatttgcctctaaacttttttcccagcttacattcttttctgaaaaatgcaacgacgatgccaatgtttgttgacctgaaatacattgtaaaacattcataatactttgagcagagcttccaaactcccatttgcctcttttatctcccttaccttggcccctttttgaaggcaatgtgatatttaatccgtttctattgatgcttcaaaattattgaaaaactggtaattgtatttttccctttacttatcagttgctagttgacaatgagtgtttgcccaaacaataaccaatcaaaaggtaaaaaggagattccagacatatctgagaagaaattctttggaagaagcccgtaaatggaatgggaattcaaacaaagccgtttccaaaagaaatactaaatggtctctaaatgcaaaaggattgctccccaagcattttatgggagcataaaaagctcccaacacattttatgacaatacttctactcaatgacttcttgtgttgacatatttgttgcactcgacgttagtatttacagcttcttatcccaaatatttacttaactgaagccctgatgtttttaaaaacttttcatctgtgtttaacagcccattttacagaaacttatttgtttcatcaggcagatatttactgagaacttgcaagtgccatatattctaaaaatgctgatgataaaactgtgaacacaatagattctcatggtgcttatggtcagggctagcacacacacttgtgaaatgatcactgatgatcaaaggcataaacactacatttggaagaaataccgagggatccagaagtatcttggaaacactagcaagtatagcagatggtgggattggtgcttcaaagaacttcttgtggaagatgttacgtatgtaccttctctgtgccaggcactgctaggaagtgctggagagaaaaagatgtgctagataccgcctctgtcctatgtgcttgtgctttgtggggaggtgagtaggataatcccagttctcatgcagtgtaatgagtaccatgacggaaatgcactccaagaactaggcagcatgaccagagataggacatttgagaaagacttcactcgggtggtactatcttagtctgggtgctaaaatagatgtgatagatgagtaagggtgacccggaagcaggagggaaagggaggggctttcagaacaacaagtgcgaggacattaaggtgaaatagagtataatagtattcccagatccttgggattgttctccattaggctaaaacaaaggtgttttctcttctttaagatttcatgactgcagattgcataacagaaggtcatttaatagacctctaaactgaaggaattcttgaattaaatcacaacatatcttccatggccagagaaaccattgcctccttatgtcgacattactaacagcaccagcacctgctgctcaggccagcgggagggttgggtgttgctgcctaggtaatgctcaccaactgatgtcctgccatgagtagttttgccaagttccacaaaaaaaacttagtgttctatcagcatctaatgagaattacagtcattagttaaataaaagaactattagataaggagcagaatgaacaacacacaatccatcagcttggtgaatggtatcagatggtttctgggtgctgggcagctgtgcatccaagtagacagggagaatatatatgtcctttgccttatgtacttgtttctctaatccaaaggcacagcaatccgtggaagctgctatgataaggtgtttagtggtgaaaatgtcttgaaagccagtagattattaaagtgatgtttttaaaaatgcagatggagagtaagtactttttatctagagtagtagttctcaaagggaggtcccgggatcagcagcgttagcatcacttgggaacttagacctgcatgggccccattccagatctcacttgaaaactctagggggtgtagcccggcagtctttgttgtgaccagctctccagggggttctgacactccaaatgttcaagtttcagaacgctactcacaggccatcatgctcggcatcacctgaaagcttgttagaactagaaagtcttggccccaccccaagcctactaaatcagagtttttgggagtagggccaagaaaactgtgggttaacaaggtctccaagtgattcttattcatgtcaaaatttgaaaagcgtcgatcgaactgttggttctcagctttgattgcgtatctgaatcacctggggagacagttgagctattccgggcccagatcacatctagaccaattgaatcagaatctatggaggcaggacccagacatcagtattttaaaatatttcttgaatgatcccagagtgtagctaaggttgagaaacactgttctaggattaaaggattaatgtgtttgagagtatgttaagatcttaggcaaatcacaagggtgttaagaactaccatcttcgcaaaaggagaatgtgcctcagatattctggtactgctttgattttaccttcagtagtcttacctattttgagtatgcttagtagtactaatatgaggcttattactaatatgttaaaatttgtcttttaattaagtgggtctaaacgttttaatctttaatctctgacccaactagaacttttctaaacattttcataatagtctccaccttgtcttctgaccttcacttatgttctttcagggttcttcgtgtgttactagtaatagtaatggcaagtgtttattgaacacttactatgtgaagattctaactggcttttaataatcacatcagctctgggaggtagaaggtagggatcctccttgcttatcaggtgagaaaactgtactatagagaagttagcaacttttcccaggtcataatatgtgacagctaaagggagcataatggttggaataaaataaatctactctagttgtaccgaaggctcatatttgtctcacgtacttgatttggtcgaggcccaaggggtcaatttccaatgcttggattcctggatatgtagagttgtattaaaaatgctaaaaacctattatgtatcatacaatcatacatatcacctaaagtattatggaaatgaatctgtattattaagggaaaaaggcctgtgtgaagaacaactgaaacttcattttaattgaaattaaataacatgcatcatacactaaaagtgcacgttatgaccccatgaattacttcaggtggctttgattcatgttacatacactaacaaatatagaagagtgatataatgcttcttaattaactactaatggaagtttactatttaactgcttcttatgtaagaatgtaaatgttttctgaaatatcagaacttttcattaggaagcacttttaaaaatagcaaaactgatatgcactatgatttccatatacattaaattgaacttgtaaatgatgttataaattatagaaaccaaggggatgttcaaattagatatttgtctaaataaatcatgtatggattgaacaaatactcattgagaaataaatgtattccttttctttcaattatctaggattccttgtttatctcttcagaagcaaaatgtcttctgtccgttttatttccagttaaacattcttcagattatgtaaataagttaacttccaatcctcttatttctgtttatctcaccactcttctaatttagacgtgatcaatatcttatctttttgcatttcatagacatcaggatccagaataattgagtgagctcaaaacaacaatggcaagaatgatgttttcagaaaactcagcaatcattcgtttaataaatattcattgcctaccaactataagcaaagtattggctaggccatgtggggtatacaaaaatgtattaaatatggctcattctccctaagaacttacacctattagacaaagtacatgcataaaaattataatgtataatagaaaataaatacaagccctagaatgcacagttgaagtacgatttgcatttattataaaaagaaagatgaattggctgggcacggtggctcacgcctgtaatcccagcactttgggaggccaaggtgggcagatcacgaggtcaggagttcgagaccatcctggccaacatggtgaaactctatctctactaaatatacaaaaattagccgggtttggtggtatgcacctgtaatcccagctacttagcaggctgaggcaggagaattgtttgaacctgggaggtggaggttgcagtgagccaagatctggccattgcactccagcctgggcaacagcaagattccatctcaaaaaaaaaaaaaggaaagaaaagaaaagattaatttcctgttagctaaatcaaggaaggcttcatggagaaaaaaatatttcaacacacacttgacgtagcagtgggatcaggctgatgttagggaagaatgaatgacattctacactgagaaagagatattcagtatatatatgaagagcagtagagaaactaacaagtggaaatagactcaatttacaatacttgcctgcctggagtactctatacgttgactgtaagttgcagtttactcagaacaatcccactttctacttgtttatcctatgtaatcatttattgggcctccttttgctctcaaaaatatccttgtttggataatagattatcactctgttcctaaatgaactgccctgtgtcctatcccagtaaaagggtgcattcgggcccttcgtaactgcctccactacatggttgattgaaaccagagcttggcattaagaagttagctgaacaatcagatttctattcttggaaaacccaagaatttcagaatagatacagaagctgtatagctttaataacatgacagagttgtagccttgaaagctatgtacaattcagaattatgagggagaagaaattgaagaaacagtagcagccgggtaaatgcagaaacaaatgagggagacacctagggggtgactgaggcacaataatggaagagaagtgcagtgaaattgcttgaactcttactgatgagatttctactgttgccttgaatccaggaccacctatatgttcattctttgtcatgctcagagttatgacagatgctgttattgaattccccagagactcccttatcgtctcacctcaaaccttacaataatcccttctatctttctatccatccaagctggcttaagtaaagtctatgatccatattcctagtaaacagagaagggaaagagactgaaggcaaaggccccaattagtaggctattgcaatatttcagggaaaaggcaatggccatcacattgttgtcccaggaatgagaatagaaatgaaagaagataatgaaagttgaaaggactgggggggcttgacaactgtttagacttgaggagtcagataaaataggaagccaaagataattcagaatattttgattttgattttcatcaccaaataagatagtagtactatgaagaaaaaatggttaaaaaacaataataataaagagaactcctccaaatagtaccaagggagggagtttaatagaggaaattaattccgtaggtgatgagagtcctgagaagccaaacgagaaaagatcaaaacaacccagggattggcagtcgcaggaagctgttctcacttatggctggggctttaagcacaaggtgacatgagatttcagaatttgaagtcgtctggaggcagctaggatcaggtggggcctgtcctgttcggcaggacctgcaaccacaggaggaggatgcgtcaagcagaaagttggaacacaagaggggattcagccataagccacaaaataccttccagagcagagagaaggagaaataccctgaattccgtattttccctgccatttagttccctgctattgccacacattgacgtattccatccagagaagtccattggcatatgagtctgggaaatgtagttcccagggggacatgatcttaagggaaatagacaatgactggtgcaacaactgacctgtgtgaggcaggagggaaaaaacaggaataatatagtttttctctagatcccttcatgcacaaagatgcaaaagaaatgtgttggcttaatgagccattctgggtggccctgtaggtggctgtcctacgaataagatttttagacaaaacagagatgacttcaaatgtcacaagaaaagtatcagacaggaattaatattgacttgatctgtcacaggcgtcaatgatttgcattaagccaacgatcttcattgttaatgtctgggaaattgccagcagcattacgactacttgtgtggattagtgtaacggattcccccactaacattcaggaaatcatgtcaagcacagagtgcctatgtaagagtggttgtgtctattcactacatttcttggactaataacacacttagccttcctgaattgccaacatgtacaaaaccagattggggttttttagttgttcatggaactatcatttattgggtagctcctgtagaagcaagatacagaaactctaattaggaataagacagtccctgtacttcaaagagctctcaggggaggcacacaagtaaacaagcaattattatcatacgttaggataataccgtcatggtgataaccactgagtgatagccaaacacatggaagaggtacccaagtctaacttggggtagtcagagactgctttcaaggatatccgagtaagtgttagctaagacatgatacgtatttctaggagggaaattttcaaggcaaggtggagattgtgcagtgacgcccagagcctggattattttggtgactgctagtatttcagaatgacttcagcaaaagttgtagagaagatagaagacaacaaagtataagcagaggccagataatgaggacctggaacagtggtttgctggtaaatgtttaacaagaggctcttggcggggagagagagtgtctgatttgcagcatttggcaaattttgttgcacaaatgctccagcatagccaatttcaagctaccagtgtgacgtcattgaatgcagaattggaaagaaacgggcagtagcacagcattgtatagttattttcattacccagatataatagataaaatatccagatggtatttaatagatatggatgcaaaatttaaatatatgtacattcatgtgcttcatgttactgaatgcgcacaacattcattatccattcattcacgtgttaatttaacaaacatttctgagcctctgctctgtgccaaacgcagttctagctgctggaattacagcactgaaaaaaaaaatttgtcctcactgaggtaagacaaacattattatgcccattttacagctgagaaattaagacatatgaggattaagcagtatagttaaaatcacacaattggtacatgaaggaatcaaagaggaaatcagctctcagattttaaatccagggactcgtttctgctataccatactacctacctagttgagctggattttatcatggtttccctatttttatcaccatgtggttggataagtaaaataaatatatgtgacctttcaaataaatttgggtcatttttcttggaagctcatctggtgtgaactttaaaatactgcaattaataatgattataataccctggaactctgtagcaacctcttttgaagaactccaaggagcctctaaatgtatcaaactaagttcttcaagtgaattagttatcatctgagagtaatatagacttttaaaaatgcattaattgtattaaccctttcaggcccatagacttaagtgtttctttctccaaataaaaatagtaatctctgtccattttctttagagaataatgaagtaattttcattgaatatgtagtcaacataattacttcaattcaatcgtgaaggattttaaaaattatttatgtctactaacttaaagacatgcatagatttcaagaacttaaaaatgcatattgcctctttgccctatgcctcataaaacaaaattatgataacgttgtgtgttacagaaaaacgcactgattgtaatgaagggtgcttcaaaggccatgaacttggaaagcaacttatttacagagacccccagcaatagcagctaaaagattgactgactccctttattttcagttatccttcagacacttttgacctcttcctgtgcctttctagtcatgtgcaatcttgtggatatctcttccttcctcttgttattttctatttcctctgtttctatttgtttctaaaaataatcatgtttgaatataggattagcttccttcccatctccccattaccaatctctcactataccgctatgttattaatcttcctgagaaatatatcaggttcattacattagttaccagctcaaaacgtatcagtggctttctagtcctcacaggctcaagttaatctgcatattctgactttcatattctgggttcatgcaaacttttcaactttccctcttatacctacttaggaggaccctcaggttccatcatgctcatgtttcaagccagaagttctcctgcctcttcctctatgtagactccacatagactatgatatcctgcttctcttttaatcctccatcttcagctcacagccacactcctctgtgaacagttaaatgattctcccacctcttacctcctatagcacttatttttcatgcagcatttttgagacttaattaaatctacagttttaaaaaatgtttttctaccacagtctcttattcatactaaaactttcaagtctatccattttgcttatacaaccacaccgttaggtcttttaggtccaagaatacaagagaatggcaaagcacgttgtttacatccacacatactgtgtaaattcaggtaattttttttaatcctatgatcctcaattacctcacctgtaaaataggtactactcatactgcagaactcttgttggaattaaataaatgagtgtattaaaaatgctcaacaagatttggcacaaaatcggtactcagtaaatgctaatcattattccctttctcttcaaagctccacaattctgtattcatatcaccctctttatatcatttgcaaaaatgtatcctattccaactctttccacctagcctcaacatttacaaacactcctggtgggaagggaaagcttttgaggagagcacatctatactcatttacttctcagggatgcaagctgccctgcttactgagggcatatgttcatagtcacaccggagcccactgtccccttatactctcaaatgggcagtagcaaatcatcttgatcggtagtaatgacctgtctctaaattttcacatgcatcagataatttcttttttagtaagtgttatcttacatatatgccaaaatatcaccattatatggaacactagctgaaagaaaaattattcagtagtcttaattttctagctaacataaattctctccattttcatcatccatttagattaaagactttactgttagctgaatattcagagactttattctgatttttaaaatttatgaggttcataatgttaagacttcaagggtgagctgtttgtgtcatttataatgcgtgactagacagtaactagaaaatggattgttgactttacaagatttctccccaccacgtccccccaaacctgtgctgctgtgtatttggcctgaaatctttacttctagtcaatctttggacctaaagcctaccagcttttagcatcctttaagattgacgtgtctctgggagaccaatagatgctaaaccaaatttcgtatgcacttggcaatataggataataacaaccatactccctgcaattgtttcctaacacagatgtaacaaattaccacaagctgggtggcttaatagacatttattctctcacaaatctggaagctaggtgtccaaaatcaaggtcaattatccctctgaaggctctggggaagaattcttccttgcctcttccagcttctggtagccccaggtgttccttgatttcaagcagcacaagttcaacatctgctcctgacctcacataaccctcttctttgtgtgtctttctgtgtccactcttttctttattattattattattattattattattattattatactttaagttttagggtacatgtgcacaatgtgcaggttagttacatatgtatgcatgtgccatgctggtgtgctgcacccattagctcatcatttagcattaggtatatctcctaatgctatccctccccccctccccccaccccacaacagtccccagagtgtgatgttcccattcctgtgtccatgtgttctcattgttcaattcccacctgtgagtgagagtatgcagtgtttggttttttgttcttgcgatagtttactgagaatgatgatttccaatttcatccatgtctctacaaagaacatgaactcatcatttttttatggctgcatagtattccatggtgtatatgtgccacattttcttaatccagtctatcattgttggacatttgggttggttccaagtctttgctattgtgaatagtgccgcaaaaggacaccagtctttggatttagagcccaccctaaattcatggtgatgtcattttgaaattcttaactaattacatcttcaaagaccctatttccaaatctggtgacattcaaggtttcagggacatgtgactattcaggggaaactattcatcccaccacatcccccttgaaaattctggaaaatgtagtaataaaggcttctgataaattagtgtggaaagtattcacggttataaattactaaaaagtctcactgtgagctcttaatcaaaaggccctataaaacatttatttgcttgattaaaactacacatccgatattttggttttggatttattattatttttagacttggaataactattttatgtgaaatagattccataactgaagcagcatacctctcaatttcccaacatttattttattattttttgtcttcacactacttaataactgaggaaaaatcatttagaccaaagttcaccttggttgacaccatccagacagctacaggaaataacaatggaaactaaatctctaagaaaaagagtctttcatgtgaaatattgcagagttgattctagatatatagctgttggaagaatggatactattacatagatatggcagagtggtatccagcacctttcaacaaagatctttcagagtcagtcttattatgtctggagaatttacccagggcttaggtgcttttactgacaatctaaccacctgcaccccacccaccgtctaaagctaaagtttattggaagacttaggaaatcagtcttcggaatgtttctgagactggtacacccaccacttcattaaagtgcttcacttcacttcattagacaagaagtaaaatacttgtcaggaaattatttatagtaccatgtatatgggtatcttatttaatactacttaatgatggtactacaagttatataaaatggagaaataagtcatcaagtttgacaataatgatatttgatattatcattatcttttttattcgttcccacagaagtactctgttattggtttagaaaaatgatatttgatataataaagaaggaaaaggtggtaatattctttattttttgtatctttataccccagctctttcaccaatctcccccatctctgtagttctcctctggtgtccccaggcagtgaactattcccagtggttagggaacatctcattgagtaagttacatcaacatttcttcacatttcaggacaacaggaacagtgccaaatcctagcccattgttcaactctcaagccttattatcctaataacacatccatcccaagaaagaattcatcaagatcagagaggaatacgtataattttttatagtacagtatttaaaatgaaacagcttttggcccgcgtggtctcagtgggctcaagggggaaattcaggatgctagctcatctcacaccaagtttaataaagggtgtcctataaaaagctaatttcttgctggtaaattgctttttaagtaatccttgctgttgcaagagacccattcatagcgctgacactgggagccatgttggaaaggctagatatgctctgggagataaggtaagatccaggtggaatcttctctttacagaatgacaatgtatatagctaatattgtcctttgaggctagtttgcatgcagttgctggtatggcactgctcagcagcctgctgcagataagaatgagtgatgatgccctagattttaatggaacttttagagtgcatgcagcagtggggtgcagtcttcagcaaagaaaaacgagctgacttgcaggcatgagagatcatcaagaaagataaagaaataggacatccactctaggttaggcaaggctttttagaggatattatggaaatgagcaagaaccaatttaatttttataatgccactccatttaactttaaaatacaaggtcaaggtactgtgtttttcataatgattaaagatttggagcactctttctgttgaaacatactgcatctgtttggcagaaaaaaaaagtgacaaagaataaaactgggatcagagaacaacaaaaacatattctgtcacttgcctaacacaagttaaaaagcaaaggaaaaagagacaactctgatggacatgttcatccttatcccaacagaaggatttatttacctaaggtcctattatttcaagttactttgatcccaggatggtaacataaaatgtacattttaaaataaaatggaagtataagatcaataaaaaccacatatctgtggataaaacagcagattcaatcttgtggctgaaagtttgctttaacccaacatttggtaaactattcactctgtaatttattaaaagacatactgttattataaaactatctcagtttgcatcttgttggttctgtcaaaatttcatcctgctaattctcaacttgtaatatctctgatatacatgattaatctattttaggaataaaacaaaaactacctttatcttacgcatttctaggaagtgtttttagatgtaaagtaggggtaattgtagtatagtggaaaggattttgaacttgaagccagaacatatgtctctgccaaaaactaggtgtgtgaccttaaataagttacttagcttcctgaatcttagtttgtttagcttttttctataaagtggcacacctatccacatcacagttttgttgtcaaaattaaataaaatactatattagaaagaaacttttagaaagaaatttataaactgaaatgtactatacaagtttaaatcattctcattattttcttaccctaaaattttgaccttatttttcttagcaaatggctgaatctgtaaaatttaacccccacgcagcatctggattcaagagaactacggtcatttctttatacagaatactaattatacacatatagcaaaacacaagttttttccaactactctgtgtttttaaagattcagtgtgggcagaaggaattttatcaactatgttaggggaaaaaagtctgaagaaatgaaaataatgagaaaaagcactgttgatttaagtgcaggaacataaaacttcaaggcaaatgtgaggccaactgagttcatatatatcctcacaaaatgatttagttaatttaaaaacttttctaataagcaacacaggtaatcccaaattctatcttttatagctctaagagtccccataatttattcagcaattatttaccacccacttattataagaaaagccctgggataagtcttgagaagaaactaacaaaaacaaaacttgattgtttgctctcaaaaagctgggtctaaaataggcaaggtaagattttgttttgaggagcccgtattttccagcactgtccattgtaacattaaaatagtttgccaaaatcctcactctgtgggtgtatttgcctagggtgctaaaattgcttaaaaactttgttatttggctaactaaaatcactgaatagtaaacagtagcattagagatggcagagacattaggtgtcatgcagttcaactgcttcacctagcagacaaagacattaagttccatttcttaaatttaactatctggttgaggatacacagtagcagagctaaatcaagaacctcttggggttagagtttttgtttatgcattactttgttttggaattaaaaacagtgcctgtttgctaagttaaattgaaaatatgctctgaaggagaaaaacagctataaaaatagacttaacttccaaactatggatcacaataaactaaagaaataatttctgtagcaataaactccaacactttccataggaccagaaaggcttgagaaagaggagaacaaaaaaatgctttggggcttaccatatatatggagaaagctaaatgaataaaccagttgaaagacagcgagttatactagtaacaatattactgatatcggagctctcacttataaattgtatattatgatcatagtgactaggtactttatatctgctttctcattccttcctcacattaattcacatgtaggacagattacctcttctgtttctatccagaggcctagagctcaggccctcatcgaagacagacagagctatcatccttattctaaaaaaaaactaagaccccagacatagctgtgctacttatagactagaatgtgagagaaaaagacaagctttcatcatgggcttaacaaactgaaacacttcttcaattttgagattgagaaacttagctaatgctaggtgtaaagatgatatgctaccttcataaccttggtgaggagaaattagcatttctctcagtcctagaaggaggatgaccatgaaggtcttcattctcttgagaagataatcaaatgcttcactgccctgttaacggtttactcaatattcaccaagaaaagtagatgggattatttttgcagacacttatacgggtaatttattctgataagcagagacatacctttagtgcataaattgttccctttgtgctctttgtaataaacatcaccatagagaacaaacacgaagtaatgacattgaattaaaagacaccatagaggcaacagcgactggaatttgtgaaagtaaaaggatagtgcaaacagttgtgcgttgcattctgctctgaagattaacaagctgggtcaggctttgaccatcatgatgagcaggagatttttctaatggaaatccccaatcaagttcctgctgcacccagaaaggaacggcttacagaaatcttacatttctttgcacataccaaattgcttggcatattctatcacaaggtttactttccagggaatgtgatcaagaaatcatgatcctaattcctagttaaccctcaaagtttctcagaacagtcagtgcatcactgtcaacttttgtgcaatgtggaaatcagaattggtcacacgtttttccggccactgttttagattcatataatattagtgaaatcatgtcagactggtatagccatgaatttatacttcatgaataggcactcaataaatagtggattaaatcgaccgatttgatttttacctccaataatttcaaaaatatcattgaagacaaggttgttgaagctgtcacttttcttgctgaacctttgttgtgccaggaggaacagatggtaaaatcaaaagtgattagagaatcagtggggtgggggtgagattggaggggagaggtcttcccagtgagacccgctagcgtcttccctgagcagtatgttaacccaagacaattttagaaatctgtgcccctaagttgcttgacatccaaagcacacttgatgcatcctacatttctaaatatttttattgttgtttctcggtagtaatcatctggtttagtcactctaaaagtcaaggatgaaattttaaaatgcaaataaaagtgcctactttctctctttccaattcctttttgttttattgaggtataatttacatgcacaaaaaaatcgcctttttaaagtgtacagtttgatgagttttgacaaacatatgcagtcctacaaccacgtccgtgatcagaataggaaatatttttatcacttcaaaaagtttccttgtactcccgttgcagtcagtctcctgccccaccccagcccctggaaaccactgataggtaaaagcacttttaatctgaaaggtatttaatgtatggcagtgtcagtggtaataataacaagatttattcattggttcactgtatttttgagcacttatatgtgcccgttgtatgcaacccattatgctcaacccctgccctcctcaccagggataaactagtggcagagatagacaaagaagccgtctctctatcacccctatcttatagaacattcttcaatgttagaaatgcagtataatgtggccattgagaacttgaaatgtgcttagtgggaatgaagaactgaagttttaactttatttaatttcaattaatttaaatttatatagccacatgtggctaatgactatcccactggaaagtacagcttctatacaatatgataatatgatacattataacgcaggagtttaaccaagtgctaaagctttactatcaccagggtcactggtgttatgtgaaaagaaaacttacaatagaaaaataaatcctttaaatagtcacagacctgagaaagtttccttctcaagggaacacacattggctcattcaaaggaggttaaaaactagcatttaaggtaatttcatgaagctttcctttggatttctcatgcttattgtatacataaataggcaattttcgatgggacctaataaatcactgttttttatttgaacattttaacaaaattatcaaacagcattgcatttatgttcaacctatttgttctgagaaagacaacgattaagtagaagtcatcaaagttaccagaacaatttttgttcttatgttttagaaggcattgaaggtgtttaaaatgtacacttatagagtcagagtactatgcaactgtggcccttatagtttatccgtcatgcatctaaagccattgttacatctgtttctaattgtgcatggattgtccaagatacacaattggaaattccattttatttatcaatttgaagaggtttcacccatgtggtcactatgatcactatggagtcacattaaattgagaagtctccagaagttgcagtatttatttaaaattctaactttcttcagaggaacaaattctccatttctggattctgaatcctcattagccataaggttgttgtaagaatttgcagctaataggaacacatcctggggagagaccagttgaaaagtaacttggttctgagtgaaattatacagagacagtttctacttcaggtggtgttgctaatgaagctatcatggtaattttagcccatatgatccctaaacgacttcagaaccacttttcatccactaagaacccacttcaaccactgccacgttcactaccacagtataatatggaacaccctctggaattcagtaagtaacttcttaactcattggctatagagctttgcctttgtaaattctttccttttgcagtaaaagagattgtttcaaagtaatccaattagtccctaggcatgtctagaaaggtagagtcaacaacagtaaggtaatagtccttataagatatgtaagaaattatcagtcatttactttaaaataatttgtacacttttccttttatatggttcttctatgttgaagccagtggtcatccagtgattaagattagccaaactcaaaaggctaaaactaaattcaaatggtattattttgctttaattttatgcaatgctatgtatttaaatttcatgaaagtttcgtatggcattgctatcaatttcagtcaggataaatttcccgtgaaataatccacaattttcaactgtacgttgggtacaggtaaggaaacacccttaagagcttatccagttattagctggtattataaatttcaagtaattcaatgttcaattaataaacagttactttaaatgggaaagtatgagtcaagagttagtacaaaggagaatcttaaaagatgaacatcaaagaatcttactattgatttgttggtgcctttgcttgcacttctccaaattgacttgacgttttaaatttgtactgataatcatcagagtcaaatctgcttttaggcaaaaagtatccgctagttattcccctactatgaaagtgatgagatgaattgatcatgtctccagtgtatggatggatgtctttgaggaagacctactgaccttatgtttatcttctgtcagcatggtgtgactatgtggagagacagtgctatttgctaaatactttgtttttcaaataaaaagatttcacagattatgcattgtagaatttataagtattcttttatgtctttgaatgtgccaatacaatttttatgaagttggaactattttatctattttaatgaaattgtaagccttctgtgaattcttttattaattttattctgaagaaaatctgaccaggttagggaaatcaggtcaggttacgacgtgatcccagtggaaaagctgaactgtggactgtgatttaaaatagggaagaggtactgaagtgttgtttttatttttgtttacaaatcagcctttctaactattatgtactcccatccttctatctttttctccaccagaacgtattaacaggcatgcatataattaatgcttttcttgagataatattaaaattaacttcatctgtcaggccgtctgggctaaaagtacacagtcagatctgggtaacatttgagttgatgtaaatatgcccacacatactgacaatgcttaccatttattgtgtgaatgaaaagcagtgtaaatattgtttgttctactagggaagctccacattttaatcaaactttgaccgtatttctaaaatgccagagcatctggaattgttaaaggaactgatagtttttgtgtttttaactgttaggatacttgaaatccaaagggtaaagaaactcagctgatttatacgtttcttcctctttattttaatgtgataaaatgtagtttttgtcatgggctgacaaacagtggtagactacactaactctgcgtttgctgggtttaatcttaccctctcaaggcatggaatgggagctcacttcagacccagccatgcttcactgtccactgccttctcatggatatagtgtgaacattaattagatgaattccataaagtgctttaagctctttggagaaagatactcgctgcataattattcttaactcccatacgctcttatgatataaaccattctgccaggaaatcctttttagggattatcacttaaaatgaaattttcattattaaaagcaggaagaatatacatctactgacagacgaaaatgtgcttaaggcgactgcttttaaataggcagaaatcctgaactatggagccatccatgcctgaaaatactgagtaataatgaaaactggtagcaaatttggaatattaatcatcacattaagttgcaaagaaaaaaaaatacaagccacatgccctttaaaaatacgtgcacaaatctttattctagaaatatataactttaggcctaaaaaagtacaaaaagtaaattattttatggctctgaaagtatccttaatttactcaggtgacaacaattagtgtttaaagagttagttttcaatcttagctacaagttggaattactctggaagctctaaaaaaacaaaaaacaaaaaaaaatagagatgcctagttcccacctgcagaaattctgatttgatttttctggtgcgagacctgagaataggaatttttttaaagcttccctagtgattctagtgtgccacctaggttgccttaaggtaaacctcatattatgcagaacctagcaatcacctatcctgattttatagacgaagatcataagacccaagagggcaaattgatttattcaagattgaatatacaaatgatagaagattcacataagatgcagtatacagagtggcttgtggattcttgccaatgcaggcagcagaattttctttagggttcacccagttcaggcacctctttgcagcagcacttgactaaggttcttctgattggatcattatatgggcaaaaagaaaaagcttaattgaaaagagctgaacccacattgtggaatggaagatatacagtttacacgttataaatgattaatattcatgaaagcatactgccctttcctcttcccttcccatagatgacatcattgcattggtgtagttaggttggtggtttcttgttgttgatcttggttctgacacagttcatcacttattatcctggcttattatctacttctacattcattgttcactcactcactaattaattcaacatggtttttattgttttggaccggttatatgcctgcaacgctacgtaaggctgaggatattacaatgaacaggaaacaaccctgaagtttaaggtatcaagcctttgagttactgtcttttatcatagctgatataaaattgaagccccactttttttgttttcaattactgaaaattcagtgctaaaaaaatgtggatttttattcaactagataaagtactacaattaggtttccactgaccttggctgtttttgttcccagttgccattacataaatctgtgccactcacaacttaggaagggtgtaacattctctgtaatagtttgcctttcgaatagtgtttggattcattactgtccctcgcagtttggaataatgaccactgaataatcagtgtttggagactaaattagtgctgcaaaattccctcaaattacctactgttcttttccctgtcgatgtatcctcatattcactatgattaccctgagaagaaagatattgttgagaaccactttacctactcgaagttttggtatttcaaagattcatacttatgtcatgttgattacattagcactaatactattggcagaattctaattcacgttattttctttttttccaatttctctccatgcctatgtgttgtcccttcgcagctataaagccatggccgattcatgggtgcttttgttaaggcgttcagcagtcacgtttgtagatttttgaatgggacttagagcccttttttgttctttatgtatttctctatttctcagcaaaggaaatgcagacatgcaagaaatagtgatcaaatgtcctgtgtactattgtgggtgtcattaatggtatagggagaaatagaaaatagttgcaaagatgcatttaacaaataaacgaggtcttgagattcaccatgaatgtggccccttctatgaaaagtagttaacatccaactgcaaagttgtactggatcagtttgactttaacctttagctaatatgaaaatatggaattgtgtggtggtgctcacaaaaaagaaaactcatttttcttaattatcatcaattaacatgtactgactacccatgagggaaagttaatttgctcttgagtggaaccagttatttgccctattatttctcccttgcttattcccctctccctccctcctccctttccattcaacaaagaaaaatagataaagcaatttctgattagccagtgaaagcctctaacataaaatttccaaagatgtgccataaattatccacaaaatgtaaaacttttcaattttggtttgcattttcttttttcttattataaaggtaataagtgctcattatagaatttgaaaaatataggaagttgcacggaagacgaataaaatcagccataatcctacaaacctattgacacttgtacatatgtttgttatctctaatgcattcattatgataatgcatcttttcaaccaatagagtaatcactggtgactttcaaatttgcctactcatttttcactctgtggacttactttactacctcttgccctttttcagtaaatgaataaatatttaagtaagtaaatacaaatgtaataacttatgcgctcaagcacacagatacacacagagagaatttggaacttcggaaatgccatcctctccctagggccgcaagtgagttgataagcacgtaaggaaggataatcaggggagccttctcgtattgcccagatggctcaaaattcgtcatctctaccaaacaactatttggagctttgaagaaatatccatgacccctttgaattcttcagtttctttcgcgttcactttgagaaccaagtgacaagtgaatttcctgacttggtcttttaaacctgttagcgcagttccattgagattttgtgggcacaagattgcaatgaagagatcaacagggagaaattcatttccctatatatgtgcgattaatccggagtgctaagggcagatataaagcaggtgcctactcctgtataacttggaataaaaccatttccaaaggctgatgatcctcaagtcttgttctgcaaatgactgatgtataacttcaggccaatttttctccagttagtctgtgtcactgggagtcccatttctcggggagcagccccatgctttgtcaggtgcggagcccacagaaggttaatgcgaaaagaaggcctcttgccagactgttttccagatgatacgtagggttattagtttgagctccttaagaagatttttctcacctgtcctaccaacttatgtttatttcattggtgttagagggtttcagtggcggaagtaaaatatttagcggggaagggacagcgttcatgggaattttgcctaacttaattttgtatctttagctcattcgtagtcattgtactttgtgttttgtcaactgaattttgtttgcatacaaaggcacaaaatgtttgcttcagacctgtcactcttatttttagcatggttagacaaaaactgagatgctttaattgtctaacttatcccagtttaagtgctgcaaaatctcccaggcaatgtcatgggcaactaagggataaaatcagagatttaaaggtgccaggtttcccacgcttctaacagttggcgttttgggtgtatacaatccctcagctttcttctttagtttatggagtcttgtggagggaatagcaggtttttagctaaaattatcatgctgtcgagttgggtctctagtgcatcctgaagagcttgcattatttacagaggctgggctatcattttaaatcctgatgcttcaatgcccgttatcattcttgacaaactcttccagcccgtggtctgttttcctctgtttgcttccatttactttcctgagcaaccagctgagcaaagatttacataacttttgtttaaacaaaccctgtacagttcactctttcagccagtatgtaaacacttttgagacacagttacatttttctattttagtcccagattctgtttatttgctacattttttgtgcccacatttttgtctttgttaagtctcttacagattcacatgaaaaaccagaaaccgtggctgctcaaaagtcattaataatgagatttttagctactgtttctgcttgtaaattcttcatttcacataatacagtctcaaaaggccacagagaattcagcctcgcttatctctgtgttgcagatgatggcttctagccttacccaatcccagtgcagcttgcttgccatccaggagtcgaatttgtttccatctgacattagcgtattaaaaagattggagatcaacaagcaacaatgttcttgtagaaaggtaatcaaggtttagagcctgtgtgtcatgagactcctagcatttgaaaccgctaaggggttgaccaccattgtcccaagcacctgtttaagattctttcctatgataagggacctaaagtgattagcatactgataagattttcctagaataacctatttatttcagtattattctttcaaatcttaattaccatcttttcctttacccagggtcttctttctacctctacgacacatttaattacctatattccccaacctgtaccatattaaattttgaatggaagttttatagggtaatttattggaaggatggccttgagtgtcattatgttcaatgaatgccctattttgacaaagagatgactaaatgttattgaaatctttttaatccaccacgcttctgcttagatgtaaatgcaaatctgttctttacatttgtgattgaattgaacttgaaaagtaccgccatattgattccttctgcaaataaaatataattacatttccctaaactttctacactctcccaagagattggctggctttgtattgtagatttttggtgatcacagaggacaatgcattatcataagaccaataagatttatttttaccttggtaaagaattttaatttatttctagtttcattttcatttatatccatctcttctcaccctctgctctacaaaagtatatatgactatataaattgaaaaaaatatcaagtgcaaaattacagaaataaataattaggttattttagtggaggaaggtttgttgtgggtggaggaggagaggagtgagccaagaaaaacgagggaccatacgtgatcatatttttgcagctattttaaattgtttgtgtatatactttaaaatattataaaataaaattttaagtgcaatgcatatttggagccaatgatgagggataacttcagaaacgtagcatcatcatctagtgctttcatagtcctttcaacatttccagatagttttaatggcctgctcatggaggcaatgccctaattttaacatatctcttcacaactctgatttcttgcttcctaacattaaatgtcttcaaagcttctttcaccactaattccttatcaagaggataagccagtttattctttaagaaaaactagctacacaaaaccgtaagtcattccaacataaatccttcactatcctctctctatagatttggttttgattcctcctgctgaaattcaaccttctttcttcagctatccacacgtcttaccctctaacttccctcaggagtgtctattagctcccattacagtgaccacagtaatatagtaatcccctgctgttctcactctccacttccttacactgcgttttaagtctcttcatattctttatcaccttgtatcatgcatcggttttcttagttgtttattttatgttgccttcataaattccatgagagctcactgccgtatctttagaacatggaacagtgcttggaacataatgggcattccttaaatagctgtagaataaactttcaaaatcaacaataatgtatttgccaaatccattggcttctctgccattttatcttgttcaataccactgcgatattccccttcctttttttttttttttaaagtctgtaaccctttagcttctgtaatattcctagttttttattcctctcatgtgtcaaaatcatcagttgaggcttattgttttctctttctcactctgacctcacctttgtttacatctcatcttctggctttggctatcctgttttttatctctgttccaacctgtatttctagccctactacctggacatgacatgtggatatctccgtatgaccgcagtttccatatgactttgcaaattcatccctgctctcccctccaaagtcatccccacaattgacttcctgttccttccaacctattaaggttcaaacccacttttgctcctcctttgcaggctacacttttccttctcagtacctcttttttttccaagttcttagataaaagtcatagtaccttacgttgtaattgccactggtctggtctttctgcctgctttcctttccatttgtaatcacattatccattccaatccatttataatactgtgatcagccataaaaataacatttatcatatcgtttgtctccttaaaacctgtagtagatcccctctatttacaagatctggtataaaatcacccttcctgatattcaatgcctgttttaatataatctcaatattatgcgtcataaatccccctgtgttcttgcactttttatttcttatacatctcatcaaccatgtcttatcaactctcaaaacctgtattggttttcaggaaaactcataaattattcttttgtagaccttttgtttgtcatctttgaagatctctctctgaactacaatattttgtctgtataatcaatttggaaattcatcaggtattgaaatatgacatgtcttctattgtcttgaacattaattaaaactttatttgactttttatatgcttacatcttgtttcctcacggagtgttaacctactagaaagtaatagtttaatcttatatttattttaattcagatttagtagcatactttacacgtggtaggatgtgtaactgccttacaccttgcttacgtgagttattaatgttttcgtatatttaatctgaggatgtactagcaatgttaaaactgtaccgcatgaaattgagtaattgaactatttgttttaaatgtgttgcttaacttattgtaccattttctcataatcacagctcaagttaactttgtggttgtacgtattatttcttgtgaaatgccaacaaacttagagcaaggaaaataacaggtataatcatactataaaggcaaccttaacactagcatagtctcttagctcatatggtaactacaataatgtacagtgacaaagagaatattgtactttcttagcacacactttcctactactctactgttgtggataaaaacagacatactttaggagaaactatgttatttccaaataatgccttaaaggttactccaggaaaaggcatttacataaactatctaggaaaagaaccttttaaataatataaagagctcacccaaaaggactgaagtgtttagttgaaaaaaagtaaaaatgtcgaagactttgaaaaatagtttcttgcagtatattttcatcgcttccacttacgttatgaagacattaagcgctagtttatcaaaaactatttttgtacatgtcttctaatgacagaacaatgtcaacatgattttcatcattgagaatgcgtaaagaaaccctttgtacagttttttctatgaatgttcccctaagattaaagcaaatttccaacacgaattaggcactccgaaaggaggaggggagggaggggagcaagtgctgcaaaacttcctgttgggtactatgttcactatctgggtgatggaatcaacagaagcccaaacctcagcatcacgcagtatacccttgtaacaaaccaacacatgtacccctgagtctacattaaaaatagagattaaaaaaaggaaatcagtatataatctaataaatacctctcaagctttctcatttttaaaataaaattttagattattattttaggaataaaataggctcttcattgtatataagttcatttctgagttgcaaaaatcctctctttatgtttttttccccgtattagcatgtttttctcctgtttttccccactcaacttggctgccacaatcagaaagcacaaagacaattttttcttgcgcttgtaaatcaaaaccttagcatcagacaaaataactgctccaggtctgtcaaatagattcatttgagctttcttcatgcattgaatacggcagaatttctgacctgaagaaatctagccttttccaaatttgctttaagaacattttgcaataaatttaatataataaaaggaaaaaacacatcaggctagaatttggaaccgattgttattaaaaatctcaagtctatcaatttaacttcaacaaattacttaatttctgtgatggttaatttcatgtgtcaacttggctgggccgcagggtaccgagacatttggtcaaacattattctgggtgtgtttatgaggctgtttctggagagattcacatttgaatcagtagagggagcaaagccgattgttctcccttgtgtgggtgggtctgatccaatcaattgaggacctaagtccaatcgattgaagacctaatcaaaaagcctgattaaaaggaactcctgcctgatagctaaagctggaacacccatcttttcctgcctttgagcttgaattgaaaccttgggtcttcttgagtcttaagcctccagttctggggctggaacttaacgtcattggctttcttggttctcatgcctttggactcagacaggaactacatcattggctttcctgggtctccagcttgctgactgtaaatcttgggacttctccagattcgtaatgagccaatttattacaataagtctctccctctctggtttcgagagagagagagagagagacagagagagaaatgagagcacaagaacgtgagtgtgagagtgccctaatataatttctctaaatatcactggttactcttcaaagttataaaattggtataaaaggtgacctcaatttttcatggagttaatgtatgaaagtcacaattaaaaaggaagaattagttctggtgtcctgaaagttatttgaataaattaatatgctatggaggctttaaaatactatgaaaatttaatattgtattattcttagtgttgctatttttaaatagcactttttcttttcctttttttttttttttttttttttttttgagatggagtctcactctgttgcccaggctggagtgcagtggcatgatctcggctcactgcaagctccactgcccgggttcacgccattctcctgcctcagcctcccaagtagctgggactacaggcggccgccaccacgtccgggtaattttttgtatttttttagtagagacggagtttcaccgtgttagccaggttgttctcgatctcctgacctcatgatccacccaccttggcctcccaaagtgctgggattacaggcatgagccaccatgcccggcttaaatagcactttttcttgtgagtcactttttaaatatttgtgcaaaccttgttgccattctactcaagctaatatcctaaaccgaggacattataacatttcaggagtcaaaacttcagacacttaacatagtatcctcaggttcatccatgttgtcataaatgacaggattttattcttttatatgactcaataatatcccattgcatatatatgcaatattttctttattcatccattattaaacacttaagttgattctatatcttggctattgtgaataatgctgcaataaacatgggaatgcagatatctctatgacatactgattttatttgctttgtctctgtccccagtagtggaattgctgtatcgtatggtagttctatttttaagttttcgaggaacctccataccgtcctccataatggatgtactcatttacattcccaccaacagtgcataagggttcccttttctccatattcttgccaacactttttatcttttgtattttgataatagccattctaactggaatgagatgatatctcattgtggttttgatttgcattttcctgatagtgatgttgaacattttttcatatgttgtattaactaagccaaacacagaaagacaaatgcagcttgttctcattcatatgcacaatctaaaaacatcgatctcatagaagcagtaaatggacggtggtcaccaaagaatgggggaagtaggggaaaagcgagaatggggagaggattgtcaatgggtacaaagtcacgattagaaaggaagaattagttctggtgtcctgttgcatagtatggagactattgtcaacagtaaggtattgcgtatctcaaaacggctagaagagagggttttgaaggtttctaccccaaataaatggtaaatgtttgaggtgatatgctaattttcttgatttgatcaagtaaaggtcttaattgtttggcaattaagactcatgaatacaaataaaggtcttaattatttggcaaagcatgctgagttttgtaaacaattcagtagtgatttttgagaataggtcaatagcaaatattaattaaaatgtcttctatttatgacctacagctagatggtaaacagatagatgatagatagataactgatagataactaatagatgacagataaatgataaatagataaatatagataatcgagagagaatacctttcccttcacacacgtgcatataggcacactccatttctatcatagttaccaggattcagacattttgtctcactatttttctcaatgtgaacatgcatataggaatattatagtttttgttctgtgcccattttagttcgttttttaatatttcaggacaaaggcaatatggcggtttcactttgtttttcatttttgcttatactttttaaagctcagtgtagaaaagtttgaaaatacacaaaagtattaaattaagacagctgggcacagtggctcacgcctgtaatcccagcacttcgggaggccaaggtgggtggatcacgaggtcaagagatcgacaccatcctggccaacatggtgaatcccgtctctactaaaaatacaaaaattagctgagcatggtggtgtgtgcctgtagtcccagctactcgggaggctgaggcaggagaatcgcttgaacccgggaggcagaggttgcagtgagccgggatcacaccactgtattccagcctggtgacagagcgagactctgtctcagaaaaaaaacaaaacaaacaaacaaaaaagcacctatagtctttctcccataggttgccttcttaatgggttttacaccttttgatgttttcttgagttctgtcccattagcaagtagtattgtacaaaaaaaattttatcatcttttatttaatattttattgatgtttaataattagaattattttaaattttatatgtcattttaaaatgcaatacaatatagtaaactcccagatgtgattgtaaataattaattattctcccattattgggcattgggactgcttccacattttggtcactgcagtgaacatccttgtacatgaatctgtatgttgaagttgatttcattccacactccccttcattcaaggggctccaaccattctcgttttctttcagcttctttatatccaggcatataaagttccttcctgactcgggagcgtcatacatgctgttttctccatctggataagtagttaattctgttcttctttgtgcatctcccgtttcagtaacttcatctccaaagcctttccaggtcactttatctaaagttacaccataatcttgcaaatcctcaactattgagcattattagtctccgttatcattattctccattattctctgtgaaagcatcccgtgattttcttttgtccctattaccacaatatgtgtttattccgtgtatgtacatctttgtttgtttattgtttgtctatacctgcaatgaaatgcctaaggtcaggaactgtctgatgcaggatgcaatgcgctcaataaatatttactgaacaaattaattcatttgctcagtcttgcaggcaaatggtacttctgtatatttaaatatctaaaatgaaagcgttactcgttactgttggttgtcaatcaaaatttaaatgtcgatgtttaagcgtgaaagacctctgtcaagttaatctgtacttacccaaaggctattatgtagaagcgacataaatattttcctaaatgttgattttcatattttaagaagacaatgaatgtttcaaagcattttcttctacacagctatttattctggagagtggggcatatgtttcttaatattgttaaaattggcaaggggatactgttgctatatacaaagaacacctaatcatcatgcagacgttttgtttctggctctcagttatgaaaagcagagattttaaaaagttacctttatatgctaaattaggaatggcagaaggtaatattctaatgtttataagtggttcttctctgagtccttggtttctatgtttatgaattctctttttgaaagaaattatagttattattaccaggtctattcttttacattgtttctaattctatggtgatcttcaaaatagagtatcaattttaaatacttgggaatgaaattattcttcccatatcatttctttgtatggcatacattgtgatttgttgtcccatcattgtttcagtatgacctgttactgcaaaaacatattgagataaatcatcccacatactctcggccaggacagacatcacactgttgcagcaacacttcagatgagccccattcaaccttgtgtttttatagagaaggatgccacatgtttatattcatttctgaagattggctcatattatttattgaaacatactagtttaaaaatctgtccatttatataacacctggtctatctacataacttgaattacataaatataaaactaaacttcccctcttctccagtgtatagcttgcaagcaagtgcatgtgaaataaattaaagccttgtttgtgtttttttcatcatgtgagtacaagacttttcaataaaaatgaattacttttgaacatatttgtttggacaacaaacaagagaaaagatctatttgattgatagtggacagaattttcattaagttcaacagcagaaataccacaattgcatcattcaccttcgtgtatcaaaagaaaacagaaaattagatgtgatgaactctacacaaatgttcactatgcatactttacccattaaatacattatcaagaatcatgtcagcatgacattctaatatagcagctttacaaaaacatgtaatctaatctagggatgctgttgtcctctttaaatcagcttcaaacatattctgggttgatatttctcattcttttttgatccacattgtttattcacataatgattatatttaactgaagataacagcattatcaaagtgaaagacaaaatagatgtttaataggaaagtgagtatcgaatcatcttttttctaccaaaaacatctataattatgaagtatttggttaattattttcacaataatttaaaagtgtacaacttgccgatttttttgtactttctacttttcatgtctcgcatatatctctttaatatctaagtatttgagtcagaaaagagccagtaccgaataatgggaatctcactgaaatgtgataacaatctggggcctggtcctgggacctttatctgcaggacaacttggacaaatatttagacccccaattcctcgtctttaccctaggaataataacacatttttctgacctcatacttcacgtggatctcaaatggaacaatcatctgatagcactttatgaagtatatgaaagcaataaattatcacaataagataattgcaattattctttggcatagtattagtgatgtctttatctgtctgacaaaatcaacatttctgtatggtaactgcctttccttgttttaacagaagatcatgccagaaaagatgagtaggtagatacttaacttgttgttcctgaatctggaatgtattgcagatgtcccagactgatctttgttcttttttttccttacaaatttcttttcacattgacagtgtgatatttctttaaatgtgcaatacatagctaaccttatttgtttgtgtttactaattaaaatatctaaactgcttaaaggagaaaattcagttttaagttttattgatttatacccttcttcaatccacataggattagggtagtatgtaacaaaatttcaaactataaatgaaatattgagttttgtattaaggccaaggatgaggaaaaaaaaagtaagtatatatggaaaaagaatggtattgaatgggagttttgatggagcatgttgacatcatgataatacctattatctttatattctgaatgtcagaacaaaattagagcaattttcccttatttccctacaatacgtctgtcttaataattctaagctttcctgatttcagtagtaatctgtattttgcaaaaggcagcatgtttataagatatcaagtaaactaagtttatggaacttgtaacagcatttttaacaacatttctccctagatagttcatggtagacatgaatttattcaaaactagtatgtagaaaaataccattaacaaaagctctgaaattatattagaggagctgaataatgttacttgagaaagaataaaatgttatttatgatttttggtatcttttacccactatatatggccatatctctgaaaaactttagtaatatgtactaatgcaaatatggtagtaaattatgtctacaggtgctgataccatagtagataaagtatgataactttattttaaaatatcatatttaaataattaatatacagtactgggaaagactattttatctattctctcactcttgaataaaaaaatccagaaaaaaataccttgttttggtaagattatatcaatttatttcccaaatgggtagagggttatttttttctgatcataaacgtatgtctcttcattataaaaatccactaaaagtgatagaagaaaaccaaaagaataaatgtaaacaatgatgccattttccaaaaatcaccttcgacatttttctggatattgatacagtctaaatctcttttcggaagactccctcctgtgtaggttccccaactactctgcaatcttatttcctcttgttctgttcttgtagaaaggagacccattgtcaccatgtcaaataacacaaaatggtgcacgtataagatcattgtctctgtccattatttgccagaggacctcaaactttttcaggtggtgggcaactggatgtcatgctgctccttgtacaacagaacacaattcattatttatatggttatttcattttaagaaaatttaactttcattagctggaaaaaaaaagaagtggtttttaagttgtttagaaatgtgaaattcaattttcatactgcaaaagagattcaactgcaaacacaggcacacatgtctggtgtaagaacgagttgtcatacaaacccaaattagctgcctccacgttgtctttgttaacaagtgtttgtttgctccttgttccatcattcagaaatgctctttagcaggaattgatggaacacagtcgcagtgacctcttcctgtctttaaaaatcgagatgacatttgcccatctgcagtgttaacatagttcctcaaagaccactgacagtggggtaggactgtattgcgcaagttctctcatttccctagaatataattggtccagggccagagattttagctcatttagagcagcaaggtgctcttttaaaattccctcacctattttgggcttcatttcccttatacggttatgccttttccagtctgatgaacattctccttgacagagcagacaagcaaaaggagctgcacactgctgctttctgtgtcgtctctatccctaaccttctcccttctgccccaatcagtgaaccttcgtctttctggttcttcttcctccaaatggaagtaaaaaggccctgaatgttgtctttaccattatcacgagcctcaattcattccaagctcagcttttcctcactgtttatacagttctatattgttcttctaatatttgccctcagttctctgtccctcgtttcttcccatgttcatactctattagaatctgagcacctttgaggttgtccatacagtggcacacatctttgttttatactcactgggatgatttgccattatattgtcaaaattttattctaaagagcttttacaggctttcttgagccattttctcttgaaattcaagatcgttgaatctctacgctttttccttcttaatctaataaacatacacccccacatacacacgtgtgttcctgaaagacagatgccacttgactcgtcttatagattgtctaaattgatcattgtgtgtggggataaaagggtgaattgtataatatccctgatggttcacgaagtctgttcctgtataacctgattagtcttctgaactcttttaaattctgtctgcaaatgactgaggtttggcaatcagcctatttcagttagttgttttcttgcataagaagggtccatatgtactgtgtgaagtaagagagagaaagtacttagatttgctggatgccctgattgttagcatggctaaggtattgtgtaagtaaggagagcagttaaaaatgatattgtttttatttcttaattgaggtaaaattttatataagatgaaacagacttatttgggagaggaggaagagtttgttcttacataacatttcaacctgtcatatttagttgagaacttcaatctgtcaagatactttgtataatattcagattctgccatctaatatattttccacgctttcttactgggtgtgacagtaacttatactgtggcaggtgtataagttagtaaagatattaaatgctcaatctgttaacttttgtgaagtggtcccactgataaagtgacacctcaataaaataaaaatttccattacctcagaaagctttttcatgctaccttccagtcaattcccagccccaataggcacctattcttctgatttatatcaccatagattagttttgtctttttaaaaatttgtataaatgaaatcatacaaaatgtactattttgatcagcatactacttttgagattcatccatgtaagtgtatcagctgttcattcctttattgatgattaatattctattgtatagatataccacaatttatttatctattctccttttgatggacattcaggtggttttcagtttttggctgttatgaataagatgctgtggacatttgtgtacaagccatttgtgagcatatgttttcatttagtttgagtaactctgtagaagtggaatggctgggtgaaatgtttaaatttatgagatattgtcaaacagcacctaaacagttttctaaagtggttgtgccattttgcaatgccaccagtgatgatggagagttccagttactctacatctttgtcaatatttggtcttgtcagtcattttaatttttgctatcttacagaatatgtaggtatattgttgtggttttaacttatattcctctgattactagcactattaagcatcttttcatggatttattggacattcatatagattatgtgtgttgaagattattacctttatgattattgggtgaaaatagtatcattttgaggtcattcatataacttgaagactgggaatgacagacattttcctgttttgtttcttttctttttactttatctgaagagtctactagaatgcagtgttgctgcctgagcagcagggcattagctttgtaaaagctctgttccttggcaaccccaccactaatatgaagtgcagaacatttgaattgtctttgaccagcttcagcatcagcactattttttttttttgctagacccctagtaggtatttaaaagtacagaaatagaatttaatcatgctttttaccaaatgtgctatgctcttagagattctttcaacgtgcataaaaattctgcagtttcaccacataccagtaaaagaaactcagtcactcatttagccatttagtaaaaagaacaaattaactgatgagcatagtggagacctcaaaggtaaagaagacaatgtccctgaaataaagacaatcataaattttcaatcaaaataatgaaatttaggctgggcatggtggctcatgcctatgatcctagcactttggaaggctaaggtgggaggattgtttgaggccaggagttcaagaccagcctcagcaaaaaagtgagaccctgtctccacaaaaaaattttaaaaattatctgggtgtggtggtatgcaccggtggtctcagctactcaagaggctgaggtggaggatcaccagagctcaggggttggagactacagtgagctatgattgtaccactgcactcaaacttgcatgacagaatgagtccttgtctctaataataacaaaatttaatttttatagactgtgaaaaaccattatgtagatacagttcaagtacagtatgattttataggatagataacttttgcttgaaaatgtattcccaatttataggatagataacttttgcttgaaaatgtattcacaatagagttagtatttggggcacacctttatccatttaacaaacatgttttgagcactgccaggtagcaacacgttactaggcactagagtgagaaaagattacagttcctgctctcatggatctcatggtctagtcaactggaatgaaaggattacataagtagaggtaaagacacacatgatggaggatggagaatagtcaaaggtctggagaatgaccaggacgtcactgtgagttgtctaattgcactgaagcatggatgaagaattggaaagtcattgtaagaagcctaaaaaggtatctctcagggatgctatgaggttctgaatgttatgtacgctatttgggcttcaacaggcaggcactgagtattcagtataaatttttgagcagggaatccaccagaagaactatgcatctggaggattaatctggaaagattgtgtagaatgttatgcagtgaaagagtctgagatgaaacagttaggagggtgtattaataacataggtgaagtgtaatgaataaccaggctggaggaaaagcaataacgatggaatcaaccgggcaagaagtataacaattaggatcagtaaaatagaatttggattggaggaatgaaaaaaaaagggacaaaacaaagttgaactgctggtatccatactggaaaatacagatgtcattcaaataaataatgtaatgaatataagaaaccagttttaggagtgaagtggatgttggcttgaaaatatttcctttgaggtttcagtcaaatgaaaaggtcctgaaatgctacgtggtagcctaagaaggaagcgttcctagagagaaaaaaattagaaaagatttacatttgataatttaatcttttccttcatacaagctaaattgataagaaagtaaaacctatagttttcaccactcttttacaaatatccctaaccttttagatattcacatgaataattgagaaaaatctaacagatgacttgcttatgtcatttgtctgctttatccttaggttcctctggcttatatattgttcaataaaatacagatcattgatattgtacaatgtactgataatggggagtgaatccatgcttgtgcattcttttttttttttttttttgatttgcagagggcgtgcccagtcaacaagagaggcacaattgtttttatcatcacctcttctcatctaattccatgaaggagagtagtattaccatacaacagataatgagttggaaaacaagaaacctaacctcagaacttaaggcttggggaaaaataaaagagtaatttgtgtttaatgcctgtataacttggcaagagggacatataaggcttagtgatgcccaacatgtgcttagatgtggattgttagttgatgtcttgggggttctgtaatctaagctaaatgctcaaaatcaattaattgatgttagacacagagatctgctttgatccctctttatcgtatttctaggccttcccattctcaagagcctgagaaacgacagctttccttaataacttgttatttgtggtaggagatgaaactttgataaaaacacaattatttttaaatgtctctttttcactctaggctgttgtatgtatttcaaaaagttacttttgaccctttccagaatgagaaagcaatcaagaagattataatatcttgcttagttttctgctcaatttatcaacaaatatttcttaagcaattattaagctgagcagtgctcagcgctgtacttggtgatataggaaatggggaaaagactgtctttaaggcctttataatagtaattacctcaacttgtctgtttcttttccttaccatttcgccaaattcattgatctatcttgttctcaaagcaatcgccatagttatattgtaacacagcattttctagggtgtccccattaagttgagagtgttgacaagaaaatacaagcttatttatcattgtaaaacttgagacacctagtagttaccctaaattaaatatttgttggagtcagtcacactaaagagaacacttactgcattgaacaatttacctacattagacagcatttaaagactatgccacagcaaaggcccatggaattcttgtgaacacagaatagaagtgtattaaggaacaagcttaattctgttctcttaaagcacaacactttctcaaaacatattttgaaatcacctttgaccattttttttaactaataggtgggtgggagttagggtaggaaaacacaagcagcttcatcaaaacgatattctattttcttcaaatttgtggggaatcatacggcctctcaattttctacattatgctaattatgatattaatctctctgccagcaaatgaaaataatacatattagatgtagcaaatgtcaataatgacaaaattagtcatcatgcagatactcagggattcccaaaatatgtttggattatgattgctagctttgagtttgcccagaatcgtttcaataaaaataagggactcaaacacatttggagcaaaactcacatcataaattttagacatagctctgccaataatgctctcagttatattttcagtcctaatatttcctctgagttccagaccagtatcttcaactgtctgattgatactctctccttcatttctgtctccaatgcattaagtcctgtgtatttactttccaaatgccacttggttccatgcacttctctccatttctgccactgactcctcctcaatccaagcgaccatctttcctcactttaactaccatgatatctcctgcttggtctccttacttctattcccgggctcctccaatccattcatcctccagcagagaatgatgactagcaccttccacagtgtctggctaataggaggtatccaatcaataattgacttacagagtgaaaatataggcatggcaaataccagtagagaactacagggttttagaaccaatgacattagatacttccatcaaatatttacagtgtataatcaagttgacttgcacattgtcttatttttgaaaaacaattttgttggctttttctatatgcacacatacatattgtatcaccctctacccgccaaatggcttttgaagaagtatttatgtggctccaaattgataatacctctagagagaagagaaattagaaattttaaaatgacctatgcttcctttcgaatatcacgtcctgagacagtgttttttgagttacgtgcaatatgttccacgatgaaacatttaatgtgttcagaggcatgctagtaatcatgtagaaagaattttatgcctgaagtcacatgttctataaccaggatcacttaataagaaaacaagtacagctgtggacaagatgcctttttatcagggaaaggccaatttgttttctttgcaaatctaagtaaatggagagaaaaacacagcccttaaatgttttctatttgtcctgaagttctcatgaatgagttagaaggcgagaaggattaaataaatccttgaacgtagagagagctaacatttattttagcaaactaaaacctattcgctttgcaaagttctgttctgtactttgtaacaacagttttctttaaaacaagagccaccaattcaaatgcctttacagaatgattgaatgctttcatgccccacctaaaggcattcaaatcattaatcaaacaaagttctaacgccaaaacatgtctgggaccagatttaaaatgtagccctcagtttcagagggcaaaaacttaacatatttatattttcctcactttaggtaacactgtattgaatctctgcttgaaattgaggagcacgtgattttttctttttggcccagggcagcatttcttggaagagaaagaaaaacaacccaagatacccttacaaaacatgtagtacttaaagctctttatgatgaattaattttggtatacacattaatagcagtgataataacaaatctatatatatatatataattgatatgaataagataaatacatcaaaaggaaatttcattacaatttgatattaggtaaatgtcccattaaaataaattgctactgtacataattttccttcagttcattggcaggatgtttgctttggaaaataaacagtctatttctagttttagaaggaattctcattattcttttatagcaaccattatcaggagcagatgggaaattgtaccaagagcatatctactattatacctcacaggaaaaagagagtattaaatgaaatctaacaaggcctgctcctgactctagttcctgtaacaaatgaacacacacatttgtatggtttcagcatttgtattagtaaggtacaataaatgtttactgaaattgaaaaaaaaaaagataacaggagaaagaagaggctaaaaaggtgcattttatttctgatcgttcattgtaaagactgctcctttttaaaataatcaaattttattttatatacagagggtacatgtacaggcttgtcacaggggaatagcgcatgatgctgaggtttggggtacagatctcatcacccaaacagtgagcatagtacctacctgatgagtagtttttcaaccaatgcgcaccctccctccttcccacatctactagtccgcggtatctgttgttcgcatatttacgtccatatatgctctatgtttagctcccacttataagtgagaacatatagtgtttgtttttcctgttcctgcgttaatttgcttatgattatggcctccaactgcatccgtgcttccgcaaaggacatgatttcattctttttatgactatgtagtatttcatggtgtatatgtaccacattttctttatccaatctaccattgtttcacaactagatggattccatgtctttgctattgtgaatagcacaagacaggacctttttatttgactgagttccttgcaaattactaataaaagatctggaggtccttagttaaaagttgaatctgtagtgccgttcaaatttagagatgtattttctgttcaagagaagaaagccctcattcggtcatgcttaatattcagctgtaaagtccaaaacatatgagaatgacacaaatggaaacattttataaatacctatacaaaggaggggcacttagttcccctaggcctcttaaaagtcctctagaaagagggtacttttatgctaactattaaagatgagtaacgaatttgtcctatacaacttaacagtatcgtcaaggaagtagaaagttactcagttttactgggcattggagctaagcttgaaagtgaggaggagaagcggcaggagacggagccgagaaggcagtggggagaagaggaggatggtcctttccatgctccctgttgtactaacatgtttggatattatcttatacttcatatatggactggattcttgtccttctcattctgagctctccttgaccttgattcttacctcctataactttcattctttctttactcaaaaaaaggccatttatttcagccatttttcactgttttcttatccttcctagttgcttttctatactatttttccactcttttttttttctatactattttgcccttctctccattttcctaactgctagatttccccaattttagccatctttcaattgttctgactatcctcaggtgctcccacaaggttatcagaccttccaccaagacggaatccctcagtctatggacaggctaagttgaatgggtcctggtgctgtgcttagcatatgccttgagtatttgtgcatttattttgcttctttacaaaaatccatcatccgatagaagttgaaagaaacttgctgaagcacattaaaatctctgaaaacagtattggctatattttctaataattagcatgactggttaacttgctttatttatcattgaaaaaagtatcagaaactgtatatcaaactcctgaattcttggcactgacgaagagacacaatgagaatgaccttaggataaaaaaacaagataaagcaccatatttgtaggaaattgcaccataaaagtctgtttcacaactctcccaaatttcattttattacatcttttctcttgaccaatcagtaaactcggttaatgatttacctgtctcaaaataattcatgaacaaaattacaagtaaatctcagtattggattcttgaaacatctccttgttcaatgaagtttcctttttcttccctctatttccctgtatttatcttttcttccagttgcattttatctcttctgtttttttatcttgctccctagtttgtgattttttgccaattttttatttcctacataattcatccaatctgtcattgtacaatttcttataactgcttcttagcttattccttttcttcatttgtcacattctatttttcatctattgtgttttcatgcagttttggaaagttttacaaatagacttttaaaaaaatgtacgtaatgttttcatagaaaaggtagtggtttctttttcttatatccttccctgtataaaaataaaaatgtagcagttctttctttgcctatgtttcctctttccttcccccaatttgaccagacttgaaggacttagatatgtaacagtgttattttctataatttaggaacagcttttgacttaaaaagcagaagagaagttgaaaataatatagtaattctacatgtccttcctgcttcccaactctctgcacatgtttgtaacctcccctttcttttttagtgtatctctttcatatacctttgtccccagaaattctgattcagtagacttagaatggaattctgggcttttatattttgaaaagctccccacgggagttagatatgcacttcttattaagaatgaatgcttaatattggaatcaaaacacaataagctttctaactatgatgaataatccaacagatttaattatgattttctttttgtccagaaccaagactagatgttaattgccagagaaatagataagaatgcctatgacagcagtacattaatatgatatcaaagcttggaaattttattggtaatgaataattcagtacttaaaatatttagaagctatagaattaaaattaattaatgttgttcactgtgtgaataaagttgattgagattttacatttaattttgtaaacccagtgttatcttttccagctcagaaaacaccacatacaagctactactttctgttttgatcccttatttttctttcttatgctttatcactgaaaactctccttgagcaggccatgcactgtaaatatttctcctggttgcaaaaccttctcatacaaatgcagtagactgtgtaatgagctcttctttcacaaaattaaaaaaacctgaaagccctgatttgcgattctatacaaatgagatttagatctaacaattttaaattattgcttcactcttagctgttcaattctatctcttatttgggaaaccgaaataataaaaccattgctgattccacaattaggttgtaaaagtcaccgtagccatcagccatgaagcaaaagtgccaagatcaaaactacaaagcaaagaggctgagataaaaatgctgcagcattagtttatagcattataagcagcaataagaattccttgattgcttaacaaagactcaaaaggcatttactccattaccttacaactcaaagaggtattcctggaccagcagtattggcatttttttgaagtttgtaggaaatgcagaattttggtgcctccacggacctaatgcagcagaacttgcagtttagtaagatctccaggagatttgtatgcgcattaaagtctaggaagcaccgctatggtatacatctgatgtgtgcccatgcattttttaaaagtatgaagtaatagttgtaagtattggacactcttgaaggaacaaataagagccatggtctttactctctaaatacctccctgacatctatgttttaggcaaaatttttttcccatttcagtagtcactgatgcttgcacgatgcagtttattccaaaacaatggtgattctcatgtaatagttcatgttgccttaataatttacgttgcctcaagttctctgcccaggccccaatatacaccgagggctgtactcctcccctaacgcctgctctcatacagtggcatagagcccagttttatgctcttggtcacatcatggagattgcacaccacaggctttaacttctgccgtactctcactgcctctaaccctccatatgcctaagttctacgattctttaaattccaaattgacccagaagtctcctccgctcatccttttcactgagatcatccctcttctggcctaccatttgttgatcaccttgctttttttttatcctactgtatgtagtataacaaattatcacttgcaactgtgtcttattttttcaactagattatgtactgcctaagacctagaaaattgtgcttatttatttgaatctctaggaggatcagtaatgggtattaatactaatgactccatggtgatgatgagcctgaacttcctcccttcctttctttctacctctctcctttcctcccttcttttcttcctccattccttcctctcttcctccctccgcttcttccccacttcccttattcatagattcatgcgttcactcagcaaatgcttactgaaaccttccatgcatcagacattgtactaaacaataggaaactatcatgaataagacacaatatctgacctcaaagaatttatgatataaaagtaatggcataaaccgtgattacttttgcaccaacctaatatatagacacagtttgttatgactggtgtctctattactaagcaatgactgtcacatgcaacgctgatctgaacaggtggtaaagagtgagatgtaagcaatggagcaaagccaactagttacaaggaaatatcacatgtttactagagcacatctcatgggcattcaagagagtatggccaggacagcttgtgaatagttcagtaactgtgcatagttttatattcattgtgaggcaccgtgtcaccggtttgctgatttacagagtattttaattgctaactgtatgctaccaaaatttccagtattcgaaaataattttgcttgaatgtagaaaaagaaaaaagccaagaaatgtatgtgaaacgagagtctaagggagctttacctcagtctcagaaaacatgcattccttccttcatttaggaagcatgtactggggtctactgtcagcttgctattgtgtcaaggagtaggagaatacaaaaatattagagaatatgaatcacatctattaggagagttttctacatacgcacattattctgtcagtgacataaggatttgagtcattcagatttaaatacggtaggtacctcaagttctcagatattatttcattttctaaggttcgtatttagttaatatgttattttaatggccttacaaattctagattatcttttttaaaaagttaaatagaacgtaattgccatttttatttaatggtaaaaagcatttttgtttttgtgtgtacttggttgtaatattctccttttcaattgagctatttttctgatactttactcttaaaatttcattcaggaaaaaagtaaacaatatttaagcttgacaatcataaaaatgctctggtgactatagattattttaaaatttattactgtagcttagggatatcttgatgggatgctcctgaaagcaattaattctcagttttttgtggcttctaatgcaaaatacattgacgcagacagaatttgaaatgaattttcttctaatatagcaattaattttatttaaatatctctagagtttttttttaatactgtgactaacctatgtttgttctttttcacctctcgtatccacgatcactaagaaacccaaatactttgttcatgtttaaattttacaacatttcatagactattaaacatggaacatccttgtggggacaagaaatcgaatttgctcttgaaaaggtttccaactaattgatttgtaggacattataacatcctctagctgacaagcttacaaaaataaaaactggagctaaccgagagggtgcttttttccctgacacataaaaggtgtctttctgtcttgtatcctttggatatgggcatgtcagtttcatagggaaattttcacatggagcttttgtatttctttctttgccagtacaactgcatgtggtagcacactgtttaatcttttctcaaataaaaagacatggggcttcatttttgttttgcctttttggtatcttacaggaactccaggatggcattgggcagcggcaaactgttgtcagaacattgaatgcaactggggaagaaataattcagcaatcctcaaaaacagatgccagtattctacaggaaaaattgggaagcctgaatctgcggtggcaggaggtctgcaaacagctgtcagacagaaaaaagaggtagggcgacagatctaataggaatgaaaacattttagcagactttttaagctttctttagaagaatatttcatgagagattataagcagggtgaaaggcactaacattaaagaacctatcaaccattaatcaacagcagtaaagaaattttttatttctttttttcatatactaaaatatatacttgtggctagttagtggttttctgctattttaaacttgaagtttgctttaaaaatcacccatgattgcttaaaggtgaatatcttcaatatattttaacttcaacaagctgaatctcagttgtttttcaagaagattttagaaagcaattataaatgattgttttgtaggaaagacagatctttgcttagttttaaaaatagctatgaatatgactatgaagctaaaaaaagtgatagtgtcacttacctctagtttcaccacatttgtgaatacattcttgaaggggaacttgagccaaagaggtacaagtttaatggggaaaacaaaacctcaaaaaggttactgtcaaattcaatcatcatttaaatttcccttggaatgtattgaaggcacagaaagccaaatgcgtgctgctgcagttggaaagcctagagagtttataaatgggattttgtattatgcttccagttgttgatgttaatgtgtcttgtttcgtaaaggaagacttggcctttatttaccaaatgagactattgttatgaacaatgaaaacttcgttcttttgccaagctcttgcatcccacccatcatccacataataggtggattttaatattcaggaagctagaacaactcattgatgaatatctttcgttaagatgtattaaaaagaagattttggaattatgtcagttgtctttgcccacctcctctttccctctttattcatgttacattattcagaaagtagatacaattcatattttgtacaaaataaacacattagttgacctaaacacacacacacacacacacacacacacacacacacacacacacacacacacacacaccccttgccaaagttaaagaattatagcctcatcaaaagatattttgaataattaagtcttggttttgaaaatcttcttgattatagatagataaaataaagaactaaactttgtagttaaactacttccttaggtaagtcatatacttttttcccagattgaaattcttctcttaatcatacaagtattttattatttagataactgatgtgcttatactatgaacaggtataaacctgtataatgtcatttctgaactaggctcaatctaatccaaattaagatggtaagaaatgagaaaattaaaaaaattgaataccatactataaatatatatatacggagagaattcataaagtggattaaatcgactggaagattatttttctataatatataaagtattgtttcctattttaaatgtcttactcatatagtatttgaatagagtgtattaacattccctctgataactctaattcacctgaattttcaaaatcttgttatctgttattgggctctaaaggcacattataatttataaacaaagatgtagcaatatgcctgtttcaccaaataagctctaaaattttagatctttctaattttataagaaagtggtatatgctgactctgttgtgaaatagtatacaaattttaagttaattacagctagggatttggctgtaattaggaaaaaaattttcccatttaaacatgttgacctacattaaatattgcacttcagtgctttaaaaagtcaagttcagcttccttgagttttttttttaagctgagcttttaaagttgtctatttcacgctacattttaaaaataaatgttaacatatttaaatttccactgagaccacttttgtggcatacttcctcaggatttttatatcacttaaattttatgaaatgtaaaaatgtaataaaatataagtactggttctaccaatatactcatagctatttctaagcatccagtagcaaatcaagtaaaaattaataaaataatattttatgaataatatgttaacctaacaattaattatagaagggctgtaatcacgaacctattgctaatcaatagtgtactctcagtgcaacgcaagcagatgttagaagggaatagaagttatttattgcaccggtgaaaaatatataagatgcctattcaacttaacaacagtagtcttcgtttgtaatggactttaagtacagcggttagaaatatttaacattttttagtccagggacatcaatgaaagaaagtgtataaattcaagctagatgtctatatggagccctgtagttgcaaaactttaagtcttctgaaattttaagatattagaaataggaaaaaaaatctcaaaagttcaaataatagtggacatccaagaaggttagtctatgttggaagcaaatgaagtgtgaaatgtagtcagttagcgatgcagtttaagatagacaattcactacagcttcaattatgtaacagaagaactggatacatctataggcttaagcatgataataatgagtttaatgatggcgtagccaccaaaactgtctttgtacacgaaggaggtgcaaataaaaacctatcatcggctgtaaggggaagtcataggttgatacaaagcaagcctgtgtacaagtctttaagcaagcgtccatgaatagcaaggggcgccatgctcttcactggagaagaaaattacctatttgtctttactaacctctaactgaaattaagcattccttttcattttgaaagtaggcaaaaaaatcacagtagtacaatcagtacctatgaagtcacagatatgtacacatctcattacagttataataaatatatcaaaatatcatttatgcttatcactacttcaaaactgcagtacttattatatgtgctacagggtcttattgttgggctttaaaacattattctgaggaatgtcaggcttcaacagattgccaaagaagtccaaggcataaaaaaatgatcctagccagctgtctgtttatctgcccagaatctcatcctaatttactatggtttcagtcattttaatgtgcagtcactatcttcatacactccttttcttctggagtattctaggagaagacataccagtcgaggggttctggggagccaggccttcaagcaatggattgctgacaacataatgaagaggattttacttagaataatgtcagttgataaaagtttgaatgggagacggaagcaaggcagtgggaagtggaattcctaaattgaggaacctctgaatcataatccttagcaataataattaagatttcaaaacattataattctttcttcttttagacaagtctgatattgcttatcccatatcacagataaggcaattattctactaatatgcattaaggaatagtggttttaatttaagtgttaccttaatgaaaataattttgaattttttccttccccaagtctttttgtgaaaaatttcaaacatatagaaaaattgaaacaattgcaaaacatatgcccatttacactgttttcctccccctaaattcttagagtcaacaattgttaacattttgccatatatgctttttttctctcgctttctctaccctctttctgtatctctcatatatagggcatcacacacacacacacacacacacacacacactttttaacatttttgcaaataagttataaataccattatattttacccctaaataattcagcatgtgtcgctttgaaatacagacatgccatatataaccatgcctgtttattatgctctcctccaaattaaatataatactgcattattgttaatatccattccatattcatatttccttaatagttcaaaaatgtcttttatattttgcaggggagttagtaccaatatcttatcatggctcatgcattacatttggttattattatttttcatccttcttagtctaaaatagcccttccacatttttttcaccgatattgaaatttgaaaatgtccaggacgctagcctcaaaaaatgtctcatctttcaggatttgttttattttttttcccctgatgggatgatttaacttgttctgtagtctctgaatttctagtaaactggaagttaggtctaaataagacttcaagagatgcatgtcaaacatgtttggcgagaatacttcatatgagatgctgtgtattttgtattacgtcacatcaggaggtgcatcatatgaagtagtctcactaaatgctgcaaagttttattacttgcttcaggtggtgactgacagatcttgcattataatgtcacattttttcttcgcaattaataaatcatctaatggctttagtatccattgatgatccttccctaactcagttattacactggggcttgcaaaatggaggttttcctaatctgacatgatcttaacatttaccagctggctttcttctgtttgaaaaaaaaaaaaaaaaaaggtttttcctctatatttatgtcaaaatggactcataaatttttatttattcaatatattattatgaattacagttattattcttgcccagagcttcctgctcaattgtcccaggctcaccttggactttgcctatcccagatttagaattacccatttttttcaaggaactctggttacttttagaggtgaatagtacgtagaaacgtacatctgggtagtagccccttctcaatggaatgtgtgcacctttctggcaagcagtcccaaaggagataatattttcagattaccttggaaatgattcttgacaaatctctttcagaatacatggaagttaaaagtaagtctagacatgttaaaaagcccttcttgtgtgagacttcatgtacggtcattaagttactactcctttaaacctctctacttctgaattcttaaaccaaaatgtactagtatataatctatgctggtttgccatgcaaattaatggtgtaaataagataatgggaggcattcgtaaatgtacttaaaggaagaaattattgtttaaagaccttagctcattgtttgcatgcaaatacacgctgttgattagaaatgagccttatctaattcattaaagtaggcctggttggtcctcttcttgaaagtctccattagcaattcatattgctctatgcgcttccttgtaagacaactgttgtctcttaagttttctttaactttggcttcttacaaattcagaccccacccccaaccaaatagctttcaaccaaatagcttttcagcatcttatttcctacaaattaaaagcgaatattttaatgactcaaatggctctttacagtgtgtgcaatatgttaaatgtacccagtatatccgtgtgaaccagtgctacaagcctgctcacacattcacattttgcccccaggatctgtcccgtccgcttgctctgtactcaaacttcctttttttctcattgccagtttagaccttgactctccatccagcccagagtttggaaactgagtacccacaggctgaatcctgaatgcatgcagtatttttgcatagccactgtttttaaataattgacaacttttaaaaattgagagacctcattttttaaaaaaatatggatttctgtcttcttttgaaaatttagatctggctactaggcactcattactatattttctcttggcaccatcacctacaactgagtaacagatgtttcattttcttgctactcaaagtgtggtctctggtccagagcacagacatcacctgggagttgctaagaaatgcagaatctaataaataacagtcagcatttttaataagatttccaagtttccaagtgattcatgggcacattaaagtttgagaagcattgcctggggtaagcaagctttgtcctcagtttgcagcacctgtcccactttgctcatttatattaattgcttttccatagatatttgattttatagtacctcatgcagacctttgtatgatgatgacggttagggtggtgatggaagtgatggtgataacacttaatattgccatgcactgttccaagtgttttacgtagctcaatacttataacaactctatgaaatagttgctattctccttttaattttacaggagggcaacgaaggcacagactgataaaactctttgcccaagattgcacagccagcaagtatttgaaccaggatgcagtcccgcagtctgcctccggagtccttactctagatcagattttgcattatttatcccagttttgtccatcaggattctctggtatacacttgcaatttcttcctaccaaccttctccttacctttgatggccacacgtagtagcaaaagaattgaacatagaatctgttctgacctatctttccaaccctgtttttcataatttccactatttctgtttatgtctgaagctttgaatgacctgaagttttctgttcttcagcttttgcaaaaaaaaaaaaacaaagaacaaaaaacaagacaaaaaaaaaaaaaaaccgcttcctttggttgaattctctttccccttattttttttcccaaaatcttacacatcccttaagactcatcttaactgctattacctcaatgaattgtgacctgctcttctcaaacataagcagtttattctcttaaggttttcttgcccctttttataacactcatgtaatattgtatgtatatatcatgtatcatacctatttacatatgcttttcccccagcaagattaaaagcttcatgagggcagaggactctcttattgttatctctataacccacagtacttaccagaaagcctgatatattgtagatggccagtaagtactttcttaatttaaatcgtaagaattttattcacattcagattaaactgaagatttaaatctttacacttgacattattatatagattaaaaatagatctaaagagccagaccaatttttctgtttttatcatgttatcacatttccatggatacgtttgcaattctagaaattgaccttgatcccttctagtcttaaaaaaatggaaggagtttggttaataatattttaggtattcttcagaatttagtacatttaagagacaagtaacttcaatttatttagctagttatggcaaaaagcagctctttgattcaaacattttgtacatttgtttatcctactctcactgtatctcaactaataccttttaagtgaattaagcaggaattagccctgaaactgaatgttttagcctcatcctacatatagccacaagatgttttagatgcaatccatatcaccaaagagctatttttagattgatcagagagaatcatacagatattattattcacaggtgtcaatggaaaagctggtctcttcccatctgttctctgatgactcttgaaaagctttcaagggcattcataattcttcatcaaaagactatgaaaaatcagcttcatagttaattgttttatgtcatattttattttttcaacttggctagttctagtgaaacagactagctggcaccaaatatgttgttgcattggctggtaatgatgataccactgtgtggagatatacaagtgaatgtactttatttgtggccttccatgaactttatgtgcctgggaaagtaggagttagggagagtttgttagggaacgtgatctctgggatgggtcttaaaggatgagaagaggcaaatgaagagtaaatggacatgccagagagaaaaagtgacaggagcaaaatcactgaagcaagaaaaaatggcctacattgaaggactatacacagttcagtataaaaaggctctgttaagcaagcaccattgacttaccctaaactcttcattttctacatataaactgcccaattcccactccaaacctattgatggatattagtaacctattgatgtttttgaaaggtgttcaagtatcctttctggtaccatgtaccttggctcccaccatttgagagtatgttctccaagaggcaacagtctgtggttcctgacctggctatgcaagttattcttattattaaaattgtcctatttaattaaatatcatgaaaactaatgaaatagaaatgaaaagataagagaattgtggtttctatgaatactaaattgaatgctttggaagacttgataaaggtgattagaaaaaaaaaaaaggccagatgcggtggctcacacctataatcccagcactttgggaggccgagatgggtggatcacctgaggtcaggatttcgagaccagcctggccaacatggcgaaaccacatcgctactaagaaaatacaaaacttagccagacgtgggcctgtagtcccagctacatgggagtctgaggtgggagagttgctcgaacccgggaggcggaggttgcagtgagacaagatcatgccattgcactccagcctgggtgacagagtgaggaaaaaaaaaaaaaaaaaaaaaaccacggtgctgttgaattagatgtaggtaagacaactgtttaagattgggtatgagggatagaatccccaaaaaatggaggtattttgcattgagattattttcagcatctccaaatctgactgtaattcaaagaaaccaaactaaaagtcacagattatgaaatgtagaagtgttttatgcaaaaagtaatatgcttaacttcaacctgtgggcttttactccaggaaaagtctcggaccccataccaaatgagaagtaaatgagtgaccacttgtatattctaagaaaaataaaatgtttgaagatgtgtaaacacatttatataatccctccaattttacaatatttttccaaaaaccgcctatccacttaccctaatcaagtttgataaggggacttccttttatatgtaggaaggctgaaaaatgacgccatgacaaatgaaattgtcaagatggaccaggtcatggaagatttgaaatctcaaagaattttttccagggtagaatataaggatgttgggacgtttttatatgctttagatttgcatcctcatatgtccctttgacagttgagctcagagtgaaaaaaagagagtgaaactagtggcagggtgactcaagttagagacaatgagtaagcagaatagaactttaaaaacctgacagattcaagaaatacttgatgaaagtggaacaatttagtcgttaagtagatgggatgatgaggggaatgaagggacaattctaggatgatcccttttccaggttttttgcttgggggaactggctgcatggaaggctgttagtcaggataggaaatacaaaggagagtaactgaatggaaagaggaaagcaaatcagacatacagagctcaacttgggatataatagtcttaaggagctcttggaacattgaaaataaggtgatcagaaaacacgcatttgaataggtaagtctgaacatcaggaggaagacaagggctgaagacactgagccattttgctgtcaatgtagagatggtggcaatctccattgaactaactgcttctcaataaggtacctttctcaagtcattaatttgctaaccagtaaacaaaccagaattcccagagtacacattaaccattaagcactgctgtggaaaaggagttcaggtgtcaggaagccaacgtggcagatgagcactagtggtgacaaatgaaccaaagtgatatgggtgatctttatggggccacagagtaccactgtaaactatcacaaatcagaagggttgacaaacaaaatattggggataaatcagggaaaacctaccacaacatacaggaaaataagttcaaagatttcatcctacagattgcagataagaaatgagccctttttatttggggcaccctagggaaagagtagatgcccatatgtatatttaaagtatgaatacagcatttatttgaatatactgcaaatggtcaatacaagggtagctacagagcccataacatgaaaaggaaacacaaagaaatacatgccccagtcagactccttacttgggttgctgtaaattctctctccctttaaggttattgcatttaaagtctatctgttgattggacccaacagcagctgcaccaagactgtaccatttttaaaaaaaaaaaaaaaaaaaaaaaacaggccaaatggcattctgcatttattttccttgttgctgaagaaacttgaattgtctaccctcaaagcctgtcctttgagacacattttataattagaaacacttatttacaaagttctttttatgttagaatcacaaatcataacactccaaaaaaggaatacactatcctcaggtgagtgtcctacctttgtttacaaaagaaaacccaaagtcctaagagaaaaatgtgttgatcattttattgattccttaccttggtttaatatagttaatggatgtcttagatatgtataataagtctattatcatgttccctttaaaattctcttttgttttactaattatatgttgtcatagtttgaccattaatataagtctaaatttattataatgtgattttttctacaaaggttaatttgaattaaaatattttattttatctctctctactatgataaatgtttttaaaaatcgtttgtaaaatgaaagtactatatttgtgtaagctgccaatctaacaatttatcatttaccattatgatggtgaatgtataacaatccttatattcagcagaaagccttatctctcatttcagaggaatcttgccccggttaattattctgtctcttgaatgcacacaaacacaagcatatctttaccctttttctgctgcctcactatccctgatcaggtgaatgtttttagctcctagattacaatataaatatattcagacattcctttccaaatgcattcattccactgtacttgtcagagttcatagctgtgaataacagaacccagtttttgttgatagaagcggaaacggactttaggagaaagatacagacctgttcccattcctaaacaaagggatagaaaaccagctcaaaatgggcagaactcaaaaaagaggctcagctccaagaactatagtccaaatcataccctagattggatctcgaactcttggactcaagcgatccactcatcttagcctcccacagtgctgggattacaggcatgtgccacgacgtctggcccccatacactagatgtaaacgttgccatgcaccactctaccactgcagacactgggtgaagaatgtcattgctactggaaagaattctagatagtgccttataattctgtcactcattccagattcaaaaactgaacttcccccatcagattccatttgtatttggggattttgttcgacataatcagggcattcagattctgggcaaccaaagttaacaaatgtctcttacttcccctttcttgttattattcccatttgaatcttcttcatagttagtcactgttacttaaacacacattctctattatcacatttccctctcctctcttttgctgtttgcttttgatccaaaccactgctcagaaaccattattgccaataacaacaatgatttcttgtagttaaatccactggacatatcttagtcctattatccgtaggccatgtgccattaactgaacactttccgtattagcacttggtcctatcttatcttccaagtcactaatcttatctgaatttattcttacctctctatgtaattccttactatattgatgacactccttgctttacctgccccttacatcctgatgtttctctaggacatgttctgaaccctcccttcttctcattctatacggtttccctgattgttatccatagcaacaaatgtagctttcactgtatcaattagaataatatctagggagattaaaaaagaattatagtaactgaaacaaagtagaaatatattcatcttcttgtagaaggaatctgccagtaggtagtccgaggttggtatcattgctctatgatgttgaagatccagatcccttctgtctcacagatctgccatcctttggtgaggtccttacactcatggatcaagatgactatcagctctctatctatcacaactgcttttcaaaggctgcaaggtgtaggaagtggacaaaaaagggatacctctacccttttaaagggacttcatggaagatctacacaacactttagcttgtatgtcattggccagaatttattctcatgacaatgccaaactgcaatgggcattcaaaatgtagtggaatggatcatgggctaagcagctaagcagtctctaccaaagtcaccgatttcattttatggcctaagtctaatatttggcccaatatatagtttcagattagacctacatatgtagcttcaaatggaccatttcctcttctatgtctcaaagccatctcaaagtcagtatatccaaaactcaacatgttatattcctctcccaaaatctactgtgggtgatatcactatctattcatgtacccaaactataaatttggaagttacaagagctagtattaatgacactaagttttgtgcatttactctatgaacaggactttgataagagttttacaaatgtttcccacttaattgtcgcaatatctcagttatagagattttatacgtccatcatctcacctgactcttcgagatcataagcaaagcatggcagcattcttatgtccattttacaaattaccacattaagcacaagaaaaaacaagatatatgtccaaggctaaccaaagttatagaaggatcgagaactaaaagtcagtgatttagacccagatctgtgccttttcccttattgttacatatgaccatatctagctatgtgaacaaagcagctaatagtgacgacagggtagaacaaataagaaagtgaatattccccactacatttatgattatttgccagtttaacagcttcaagcctgtgtcttctcagatatgtgcttcctcttatgtctaaggaaaagtactatatttgatatgcttttatgaactttcttttttgagatggggttctggctctgtcactcaggctggaatgcagtggcatgatcacagttcactgcagccttgatctcccaggttcaagcgatcctccaacctcagcctcctgagtagctgggaccacagacacgggctactacacccagctatttcttttttttttttttttttttggtagaggcaggatttcactgtgttgcccacctggtctcaaactcctgaggtcaagtgatccacccacctcagcctcccaaagtgcggggattacaggcatgagccaatgtgattggcctgaattttttaaatttaattttattgaggtaaaatatacctctatataaataaaagtaaatatacctttaccatttttaagtatacagttcagtggtaataagtaaatttatgttatttttcccctttgtcccctctccctactcctatttctgatctctggtaaccaccaaggtagtgtctactttcatgagatccatgtttttagctcccacatgtgagtgacaacacataatatttgtctttctgtgcctggtttaccttacttaaaataattacctccagttctatccacgttgctgcaaatgacaggatttcaccctttgtatggctgaataatatcccatggtgcatatatatatatcacattttctttatccattcatcctataaattttaaatggtgtggaatttggagaatacttaaggaaaaatgacgattgtgtaaaaggaaagtatctacaaaagcaaggtttatctaccccataaagataacaagagaatctgtgaatgtggatacggtttctggagtgtttcagaggttgaaagattgtgaagaactggatgggtataaaaaaaagtgaggaggagaagaaatgaaagttctggaatgttctgtaaattgtagatgagttccctatattaattttaaaatgtaaattgagattataattattttttgatgatctatttttgctgggctgattctctgttggtgtaactctttaacgaatatgggtcacgtgggaccctggattttattagaattacatgtgcgaatcaaattctaactttatgagccaatataatgattgtttttttaatgattagagtctatccatgacaaaaacagcttgtttctcctactgacttatttggtgttttcttgctaattagcctttatactaggcagtagtaaatcagagtacttggacttcaggttggccattacataaacctggcaactaaatgctgggtaataatcacctatcttcccacctgtgtttattacctttggaagtatgtaacatggtatctttgcgtttatatttttaatttgttcttttttctcttgcaccagctacttaaattatctgagcttccttttactaatccaaaaataaagataatagtacatatttatagagatgttgtaagagtaagaggtaatgtaaataaattggctagctctatgcccagcacatgagtaggtgcttagaagttagtgtctgggtacatgacttctggggatgataaagtgagtagctcgataaatctccccaagaatcagtaaaatgggacacactggagaaaacatcttatgaccctggatatcaaccaacggcatatgctaaattaaaaagtgattatttataaaaagtactaaactttgtatatgaacaatatgaatttgtggtgtatttgcctgtattgcccccagtccccactcccagcttggtcaagcataatagttctatcaaggtagaacaagccatggaaataagcagcttcatcaccacagggactgattttatttgaagcagaagtttaaaactccatgtccagaagcattgtcagtaacggtggagacctaggcggcaaacaaaaaggcagaatagcaactcagctggcctaaagttgcagtcttgattggaacaagtaactgactggcagactggccagaaatttaatttaaccagcatatctgcaaaatgaggcagccgtaataggcctcagtaaggactccttgtgtctccttcatgaaaacttaaaatgtgcctgcatgttgaatataccctttaacacatataaagaacctttagcaaaacttggaagtcttactggcttgaggtatttaagatcaactgctggccaactattgactaatgcaaattaagctatgcttacctctaggaaactaggcatacagtttgtttctgttgtttgacagagaaagaatatcaacagccacacactgtggggaaacagattccacagatttcatctaggcaagttattaaaacttcaatttaaaaaacgctgggcataagaaggaacatcagaatttggggctcctttaatatgttatttaaaatgtcaaattttcaagaaaaatttacgatacgttcaactgtgacccattctcatggggaaaagcagtcaacaaaagttgtctctgaattggcccaggtattggcagatagagacttaaaggctcctactataaataccttcaaacaactgaagaaaagcatgtttaaataattaaatgaaagtatggtaacaataactacaaatagagaatctcaactaaaagatacacactatataaaagaaccaaatgaaaattctagaattggaaagtagaataaccaaaatttaaaaaaatcactaatggggctcaagagcagatagtaagacagaaaaaaaaaaaaatcagtaaatttgaaaatagataaataaaaattatccaatctgaatgtcagaggtaaaacagtataaaaaacgaacatgagtcatagctttgtgtcaaaacattgagcatatcaatgtagatgttacaagagttccagaaaaaaagagaatgttgttaaagaggcagaaaaattatttgaagaaataatggccaaacacttcacaaatacggttaagctcaacaaaccccaaatagaataaacacgaagagatcaataccctaaaacataagagtcaaactattgaaatagtttcatttgaaattattgaaagacaaatgggaaagtctttaaaacaaccagaaaaaaatgactcctcatgtacagggatcacatgattgatagttaatttctcatcataaacaatagaggccagaggtattgaaatgacatattcagagttctcagagaacacaaaattgccaaccaagaattccgcataaaacaaaactatccttcaaaaatataggtaaaataaatatattaccaagttgagaatgagaatatttcttgctagctgacctgacttacaagaaaaaactaaataaagtcattcaggctgaaaagaagtgatattcagtaactcgaacccaaatgaagagataaagaatcacagaactgataaatatgtagatacatataaaagactgtacaaatatagatatatgtttttcttcttttaacttctttaaaagacctaagattgcataaaaattataacattgtgttattgtgtttataagcaggaggagcaaaaatggagcttagcagagaaaaatatctaaattttactgtgttaaattagtttgaacttaagtaaattatgatcaattaagatgcatatgtaatctttagagcaagcactaagaaaataaatagttaaaaacaaaatttaaaattacacactaaaaataactaacaagacagtgcagtaaaggagaaacaggaacaaaaaagacatgaataagatgtgaaaaaatacaatatggcacatgtaattgcaactaaaagttgagaattcccattaaaaaaatctgaaatttgaaatgctctaaaatgtgaaactttctgaaggttgatataataccacaagtggaaaatttcacacctgacctgtaatgagtcacagtcaaaacacagccaaaactttgtttcatgcaaaaaattatttaagatactttataaaattacctccaggttatatgtataagatatctattaagatatatatatatacatatatatatatatacatatatatatatatacacatatatatatatatatatgtatatatatagtatgtgtgtttaaacttaggtcctatctccaagatattaggtatatgcaaatattacaaaatctaaagaaatccaaaatccaaaacacttccaatcccaagcattttggatatgggatactcaacctacatatcaatagttatagtaaatgggagtgaactaagcattccaattataggcagagatttcagacaggattatttaaaatatccaaccatagtttgtttaaaagagaaatgtattagagccaaaaccatataatttcaaagaaaaaagaggtactatgcaaattgtttacatataaaaaatgaagtgacaatactaatgtcagacaaaatagactttatgacaaaatatgtaacaagagaaaaagacatttttaattatataaggggtcaattaagcagaaaatataacaattataaacgtatataattaataggaaagtcccaaattctatgatgcagaaattgacagaattcaaaggagaactagacaattcaacaattattattggagacttcaaaccctactctcaatagctggcaggccaattagacagaaaaatagcaacaatatagaagaattcaccaacactatcaaccagcttgacctaactaacatttataggagacgccaccaaatgaaagcagaatacatattattttaaagtgcacatgaaattttctctgggatagattctatgctaggtcaaaaaacaaatctcaatacactcaacaggcttgaattcataaaaattatgttctcttaatatgtcagaattaaattggaattcaacagaaggaaatttggaagatatcaaaatattttgaaattcaacaacttctaaatccattggttaaaaactaaatcacataggaaattataaaatattttgaactgaataaaaataaaagcacaacatgtcaagatttataggatgtaactaaagcagtgcttacagggaaacttctagttttaaatacctattttagaaaagaataaaattcttaaatcattaactcaagctttcgccataagaaactagaaaaagaagaacacagtaagctcgaaggaagcataaggaaggaaataacgggggttagagcagaagtcaataaaatagaagaagaagaaagaaaaatcaatgaaaccatacattaatctttgaaaatattttttacatggagaagctttagctagactgaccaaaaaaaaaagaattaccaaaatcataaaggaaaaaggggtaattactaccaaccctacagaaattagaaagactagaatgtaataacatgaacaacattgtcaacaatttctgcaaaacatattaaatgaaaaaattcttagaaagacataaattaacaaaactgattcaagaaaaaaatagacatatgaatagacctaacacaaacacagaaactgaattagtaatttaaaattttccaacaaaaaaacccaggtccaggagaaagataggaatccgaggcatccacagtatagaagaagaaatgaaactctctttattcacagacaatacaatcctgtatgtagaaaaatctgatatccacaaaataactgctagatctgataagttcatgaagcttgcaagataatcaatatacaagaataaattacattcctgtgtactagcaataaaaaattgaaaatgatactaagaaaataatttcattctttgtagcataaaatagattaaatggtcataaatttgaaaatataagtactaaacctgtactctgaaaactgtaatacattgctgagagaaattaaaaatctaaataaatgggaccatattccatgttcatgaattggaagactcaatactgataaggtagtgattctccccaacttgttctatagatttaatgcaatctccatcgacatcttagcagatgttggcacaaattgaaaaattgcacaatcttggcacaaattgaaaaattgatcccacaatttatatatagcaattcaaatgtaccaaatagccaaaacaattgtgaaaaagaagaaaaaagttagaggactttgaaatcaggacattacctgatttcaaatcttgatgtaaatctgcaatgatgaagacagtgtggtactgtcataaggacaggcttatagatcacctgtaggtttaggaaacaaacctattcatatttttttcttaaatctactaactgcactcctaatgttgacaatggaagagactcgatagtccagcaataaactcttatatttatggtcaatcaatatatgacaaaggtgacaagataatccaatagaagaaaagcttattattgggtagcttattgttagtgtacagaaacagagctgattgttaatacaactcaacaggaaaaaggcaaataacttgatttttaaaatatttaaatatatatttctccaaagaagacatagaaatggccaacaggtatgtgaaaaggtgctcagcatcactagtcatcagggaaatgcaaatcaaaacctctgtgagatgaacactatcatctcacccctgttaggatggctactataaaaacaaaccaaaaacaagagataagaaatgttgttgaggatgtgaggaaatcggaacgctagtacaccataggtggtaatggaaaaatgatgcagctgctatagaacacagtagaaaggttcttgaaaaagttaaaaatagaactaccatatgatccagcaacctcactcctgggtatatatcccaaagaattaaaaccagaatctcaaaaagatatctgcactctcatcttctctgaagcattattcacagtagccaagatatcaatacagcatagctgtgcatggaagaatgcatggataaagaaaatgtggtgtattcatacagggaatattatttggccttaaaagggaaggacgtcctgccatatttgacaatatgtatgaacctggaaggcattatgctaagtgaaataagccagtcaccaaagggcaaatactgaatgattccatttatatgaggtgtctgagacagtcaaactcgtagaaccagagagtagaatgatagtaaccaggggctgggcgaagggggaactgggagttgctgttcaatgagtataaagtttcagttatataatgtaaataagttctaaagatctgctgtacaacatagtgcctgtactgtgcacttaaattattattaagaggatatgtcttaagtgttcctaccataagaagaagaagaagaaggagaaggagaaagtgaagaagaagaaagaaaaaatgaagggggcatgagcaaacttttggagttgatgcatatacttggttaccttgattatggggatggtttcatggttgtatgcttatatcccaattcatcacattgtatacagatgctcctcaccttaggatgggattgtgtcctgataaacccatcataaattgaaaatgttatgagtcaaaagtacattttcaattaatgatattttcaacttacagtgagtatatccagatataaccccatcctcagtccaggattatactaaatgtgtatcgcttttgcaccatggtgaacttcaaaattgtaagtcaaaccatcgtagtcagtcggggaagatctgtttgttaattatggacccatcgtgtacaccttaaatacttaataaagctgttaaatgaaaattaaaagttgactgggcacatggctcatgcctgtcatctcagtgctttgggaggccaaggcaagaggattgcttgaggccaggagttcaagaccagcttgggcacatagcaacattccatctctacataaaattaaaaatgtagccgactgtggtgatgcaagcctgtagtcctagatgctcgggaggctgagttgggagaatttcttgagcccaggagttggaggttacagtgagctataatcatgctaccacaccccaggagaccctgtctcaaaataaataaatagaagctttaaaaaatattggtatctcagtgttcctcattatccactgtatttaaggtttagctacttgtgcttgatgcttgacaaggtaatcttacttttctccctgatattggtatgatgcaaatttactatatatatgacacaaatttatatatgcaatattttctcgttaatggccttttattttactctcattttcattatgctttgccttttaagtcatatagcaaataaattatgtggcattttcttagcaactattaattcaggagaatgggaacagaattctctcatagattcagctggaaggtaatgatggtcagctcccagtggagaaaaaaaaaaaaactcccttcagttttcgtaaacatacagagaaattttctcctaagtgctatgtcagtctgctgtatgtcctattgatctgagaaccagaaaacacatattttagtttacactgccttgactctattgtacatggctaggtctgtttaaaaaagaaatccttgaagataccctttggattctagtattttaaaacggatgcttagctaagtgaagtggtctacttcaaggatcaaaaccaatcttgagtaatctgttaggtagactccctaagttcatctgtaccttgtaccaaatttttaatgaatttagtaattgacatggatgtaaaataaataatacactaataaagttcatgcagaatcaaattttaatgcccagaggtaatgtagaagatattacctgtccatttctctggacttagctcctgcaactctccatttttctctctaaactttagccacactgaattcctagtttcaattcctctgactcgctaagtatttcttctaccttgataaaagctaattcctttgtcttgtaccatctgtattccggctgatattgacatagttttcagggctcaatttcaatgttacttactcagagggactcactgttacaaccaccacagccttttcaatctaagtaagatccactgctcttcttagaaacaggttatattccaaatgactgtaagtgcttttgttcttagaacatatgtctccattcaaaagaccgatagatattcagttaagccctttgagaaaattataaatgttgaggaccttgattattattgttattattgcttcttttctatgttttcccaggactctcaacaaatttgctttgcttttgtactcatggcacataatgagattaataatgtttagaaaacatttcaaaaatacacacagaggagacacatcttagtctaaagttagacatgataccaaaaactataataactatagctgaccagtgaccccatttattcatggaaagtaaaatttgatgcatatttgcctttaggagcaacatacctatgaaagttctgaaagtgaaagtttgtaaaaaaggagtactctcctaacaatcttaatttttttctatatatatgtatggtttgcattaaactcttttgtatgattagtggtttaatgttgatgtcacccatgacaccataagctacgtgtatggactggctctgttttgttcactcctgaatatccagcaaaaatagtatagtgcctggcccttggtagatgtgtaataaatgtttggtgaatgcatagctacacttcaatgcttatcgcattttaatcccagctactcggaggctgaggcaggagaatcgtttgaacccaggaggtggaggttgctgtgagccaagatcgcgccactgcaccccagcctgggtgacagagcgagactccatctcaaaaaataaaaacaataaaaaaaaggagacccattcatgtatctgtatcactgactagcctgtcaacattttgttaactacctcatcaagtagcaaaatcagtacctggtatgtggtagatgctcaaatatttgttgataaaatacagtaagttaatgacaggcgagcttgcctcagtgaaatataatctgtaagtgagcagtgtgtatatcatttgaaggtgccctacttagcctagcatatcacagagattcccagtaaatatttaggcagttcattaactctaaaagttgaccctcatagtcattggcctacattattcacctccctctgtctctaataaattcattggcaaatttctgaactccaactggaatgtttgtggtggatttcttcatacctaatggattatttcaattttcattttacattgtattatttacttgtctgaggtctttataatgacaaactcggcatgcatgataagctgtcattacttatgccagttgacaaggacatattatttttctacaaaaaaaattatcttggccaggcgcggtgcctcacgcctgtaatcccagcactctgggaggccgaggcgggcggatcacgaggtcaagagatcgagaccatcctggtgaacatggtgaaaccctgtctctgttaaaaatacaaaaaaaaaaaaaaaaaagcagaacaaaacaaaacaaacaaacaggagtggtggcgggcgcctgtagtcccagctactcgggaggctgaagcagaagaattgctcgaacccgggaggcagaggttgcagtgagccgagatcgcaccactgcactccagccgggcgacagagtgagactccgtctcaaaaaaaaaaaaaaaagtggtaattgttcaaaatatttacttattaattcattttaaaattgcatgttgaaataaaaaataaatgtttagtttttaaactatctcttctacaacagaaacaatatagtgagaagagtgatcttgttttacatttttgcaaatctctttaaaagttagcttaagagaaggcagctggttcttatatctgtttctgcattgaatgtgctgtcatatctcgcatcatgtagcctctgaaaaactcataatagaatgagagaggaaaaagtcaaataacatcttagtattattacgaaaataatttggacctcacagaaccactgcatgggtctcagggactcccaggggtccccagaccacatttaaggaaatactgtttcagggaatataactatttttgtacctcctgtggctatattcttttaaagaatagtaacctctgtttctgaggaacttagctgcaattatgtgcagagtttaaataagtgaaacggaaataccctttgcctttctgctcgagtatgaaagtgatgatcaaaatgttcccttttctctctctctctctctctctctctctctctctctctctctctctctctcactctctggggaacttcgggtttccgtctctatataatgtattcatattccactggaaacatacatagtttgagaaaacagatgacattttttctgggggtggaaagaattactaccacgaggaattcaaaatacagacacagtaataaaaatcaccataaagcccagaggggaaaaaaattgagtaacaaaataggaggtgaaattataaaactgagtaacaaaaaagaggtgaaattataaaataaatgataaagttggttgtgggttaggaagaaagagaaatataaagaaactggcataatgtaaaagccaagacaagaaaagtgaggcagaggcataggtcttttgactattttccatgtttgattctaaggtaagtagatatagtttctcatagttggaaatgttcgtgaatttaaacagaattaatgtttataatcagatgcaatgtctagtttttctatttgtcctgtgaaataataattgtgtaaagtgctcatgattgtttcaaggggtgaggagtagttctaattatcatagatattttcatgacttcgcataccactggtttatagagattatacagattttcttatatcagaactctcgtatctttaattccctagtagatgtctaagaaggagatttatcacatagcagatggtggtaaacttgagtaaagtgccagatactaaatgcctttggctttgtgggccattcaatctttgctgcaactactcaactctgctattgtagcatgaaagtaaccatagacaatatgtaaatgaatgagtgtagctctgttccagtaaaactttatttacaaaaacaggtggtgagcacaacttggttcatgagccatagtttacaaacacttgctgtatagctttccctggttgaatttcgttaattttatacagaacctgcctcccatacacacacactttgttcttcatggaaaatctccccagactactatgaaataatgttattacttggagatatacaattaagatgatgtcattaggagattattaatataggaactaagcaaatactatatgctaagtactgaggatagggtgcgatcacaatagatagaaaatctgcaatagtttgatgaacatgggaaattacagtatttcctgtgatggaaacattatgaggggctgtgggactacataacaggacctgtgacctatacctgggttggggatgtctaattaatcaaggaaagctttgtagaggaagtgatgtctaacctgagattggaaaggtcaacctggagctacctagatgaagatgtatggaaggacatcccaggcagagggaacattgtatgatgaatcctgatatggatatagtgctggattttaaggaagagtaagttgttccatgaactatacagtgcaaagaaagatgaagaaatagaagtagagaccagatcacaaagggctttttgaccatgttagagaagttatattttatcccattggcactaggatgttgttgagtatatgaggacatgatcagcaacatattttagaaagatctcttattctgaagtgtaaagagtggataagaaggagacaaggtaggaggcacgagctaattagaaagcagtctcagagaggctgttagaaatcagaacagaatggctattattaaaaagtcaaaaaacaacagatgatggtgaggcttcagagaaaagggaatgcttatacactgtttatgggaatgtaaatgagtttaggcactgtggagagcagtttgaaaatttctcaaagaacttaaaagagagctgccattcaacccagcaatctcattacttggtatatatttaaaagaacacgaatctttctaccaaagagacacatgtactcacatgttcgtcgcagcactatacagtaacaaagacatggaatcaacctaggtgcccaccagtggtggattgaatgaaataaacgtggtatacatgcaccatggaatactacacagtcataaaaagcatacagtcacgccttttgtaggaacatggatgcagctggaggtcattatcctaagtgaattaatgcaggaacagaaaaccgaagatagttagaagctaaacattgggtactcattataaaggtgaaaacaatagacattggggactactagaagggggaggaaggagaggggcaagggttgaaaaactacctatcgggtactatgctcactacctgtgtgtggtgggatcatttttaccctaaaccttggcatcacacaacatactcaggtaacaaacctgtacgtatactacctggatcaaaaataaaagttgaaatcagaatgagaaggagcgaaggagacagcgacaggaggatggagagaagtgggcagattcaagagagatttctcaagtggacttatgaggacatgcttattgatacgctctgggagtgagggagagagaagaatcaaggatgacttctacactttcagcttaaaaaaccgggagctggtggagtcatccattgaacttgacagaggagcacgtttaggcaggaagatgatggtgtttgaatgtctgcgaagggaaaaactgaactgggattcaaatcagaaaaaacggtttgaagtcataccctcttaattgcattttctatcggatggtaatggctttgtgacaggctttactgataggtgatgtaactctgcctctgacagatgaagatccaaagcatcctcagattttcccgaagcctgtttcagcaactgtgtagacagcacacacaaaaatctggggggaagtcctagggctcagttagttgattggatctattaaagtagcattggagaacacagttcagtctgagatttcccaaacatattgctctataatttatttttacccagaaactgaattcgatgtgggatagggattataaaagccttcagattccagatagaatctctgaatagaaggcttttgggccacatctagtaatctcctttcctcactccatttctgaacttcttgttcacttcttcgctgtttttaggacgttcttactacactcctgcctcaaggcctttgtacttgttttctctgcttagggcgttctttcccgcaatatttgcatggcctcctccctcgcttctttatttctatattacctatctttattaaagctgctataaaaaaaaaaaagcccacacctcagtggcttaacataatagaaactttccgttcatgcaaactttacaaaaattttctggtcaacaagtagatttcctccaaatggtggatcaggggggcccagggcacttcgcttttgtggctctgatgtctttaacatacggatttcaaaatcactgtgctcttgtacataagaatgaaaaagaacaaggaatattacatatgtggtggtggttattggaggtggggttatgagccaggcttcatattcatgagcatcacttttgctcacactccattggctcgaactcagtcatgtagccaaactaatggcaagggagactgggaaatgacagctagctgcacaattaagagaaatgagtagacttgtctaatgagcagctagccagtccctaccacgaggactttgctcaaatgtctccttctccatggaaccttctatgatcaccctttataaaatcacaactgctccccatcttcccctcaatatttccatcccttttccatgcttcatttttttcctctgtaacacttactgtatcacaatctatagattttatttctttatcttgtttactgtctgcctccccttcctcccaatcggatgtaaggtccatgaggcagggattgctgccgatattcacggccatatcaatggacactagtagaccctcaataaatggctgttgcattgtgattacatatatgcttcacctagaagtagtctcatctggtggcacatttactcatagattgacattaattctctattgttttttccccagcaaaatttgtcaaggtagtttgtcagtagggagaaataaagttgtcaggtggctcatcaaaagttcaattttgagtactcctcctgtgtactcataatgttttataaatacttttatctatgtaagcacgtgggcttagacacaattctaggattaaaacagaaagctctgtatccatattttcccttttttgtacctccttttatgttctctaccattttttttgagtgctgttagtgaagcactaggctaaatcttgggtttctgcaaaaaaaactttaatcctcacaacactctaaaatgtttattgttctaattttaagacgaggaaactgagggctaaagagattaaggaactcgcccgtgttcacgtactcagctgataactggcagcatttagatttggacttactttccatacagatattcgcattgctaaccttcaggtttttccctcatcgttttccacatctactcaaaagttgctaatcatttccttaatagtgaggcataaatgactgagaaatcttgatatattatccccctcaggagcacttcattccgacaagacacaaactttagggaaaatgaacaaatgtctacttgtacaactcaagcaccaaccaggtatggtagacatgttggcttaaaaataaagttgatgcttgggttctgattctgataatgacctacggagggtatggcctgaggaggttactaggtgtgtgtagaaatcaatgttttgttttggttttccctcgggaagggtcaacttatacttgaatccttctgaagtttctcaaattacaagatggtcatttattttacttcaatcaaaacaacaaagtactgtccgggaaagatgtattgccttgacttattctcaatttatgcttattttggaggcttgtagaagtaaacctgatagaggagggcaaaaacacacacacacagacacacacacactgggagaaaataaatttaacacagtttagggattgactttggttgtatgacatcacaattgcaagagttggatgccattgtaaacaagctatggaaagaatactgttaaaagtaactcattaagtggttacatggtgtagctcatggacatatggcacagaaaaaagataaagctgtctttacataacataaaactgtattctgttatgtaaatgtgtgcttgtggcttgcagtaaaattcctagtgaaacattacctctagattcagcagtactatacctcaggccacatggatgtaagtaaagatgatgccctctggaaaactgagttaggcaacaacaagtgcatccatgaggatgcaaatttcaatgttgaaggtgcctgtgaagaatttgaacaaaattgttgcatgaaatatgaatgaagaagtgtgatctaatgacataatattttgtactatataattttaaagtagtacacacaatcaaattaatgaattaaacattatatgtaaacaggtgatcattgtatctccattttctaaagtttctatgttaaaggtgatcaaaaaacttggagagagggacttctcatttggaaaatgggatagtcacctttgggtatgtgatgtatcaatctctagaacttcagtttcttcattgaaagcatataaaaggcaatccaaaggatgtatggaatattaaaagattccactgtgaaactatctagcactttacctgaaacacttgttagatcccctcaccaaaatcatgccatgtgatttggcagtctattcctcttagcgtaagagtagcccgacagaaaatgttcattaagagttaatgttaaattcattgaatttagcaacacatgagtagcgcttcctttctgattatgcaaatctctcaccatcgtaatacgtgcttcctttaatttcattgggaacatttgtaatgtaaatggtaacagagccaatatttcaaacagaagccattctttctaaaaaaagctaaatgtctaaatgtattgaaatgcttctaaaagtaaaatatttagcacttatttgcagatgggtaatgttaaatatctcactcattattattactaccacttgtctgaataaatcctcccataagcattaagcaagtaggtaaacaaagaaataacacttcatgtgatgaatgccaatatgaagcacgtttaaactgttctgtcaagagacaagcctggaaatgctaactgtgtttctttgcttttctgcaatcatctgaatacataaattcaaattgcagcttttaaaacttcaaatcgaggcttttgaaatttcagaaaacacatgcgcttggaaaagcagattataacaaggtcccaacgggattttgtcaccatcttttttatatttcaaagtataaaaaaaatctagataagaaatgactaccaaatgttttcatatttaaaagatgctgtttttttaaaaaattaaatcactggaaaaaaagttttccacaaatatcgtgtaaaaagaaagacagcaaaaagcttagccaaagcttttactgtttaagtgatgatttattctgagagttcttaagagttttctaaattagtatatggttaatatccataaaatcatatgcaagatgctgtctttcaaattgatgctgaaggttaattataaaatgtacttaattatttatagtgtcccattgagtcccagatactctgtgtccaagaacactgtaaatacagaaagtttagcagaattatattggaaaggcagtaattcttcacaaattaacttattgatataatgcaatcccatttaaaaattttcagcgagaattgttttataatttgactgaatgatacattacataagttagaataactaaagtgggagagcgggttaacctaccagaaattaaacatattttaaagctgcaataattgacatagtgcattactgtcacaaaaatctacagtagatcaacaagcagaaacttaaaatatcatgaagaaagcaccataaatcaattcagaagagatggtgctgggggaaaaaatatcagtttctgaaaaactcttcaaggttagaaacaacactatataaatttaagatggattaaatatttggttgttcttttttaacaaatgaaagagtaaaggatcaagaataaatgagaatatctgaacaatggtaaaatggccacaattttaaggatactatcaatgaacataatatcaaagaaataaactgttaaattttatttagaaaaaactactaaaaggcaaaaaggaagctggaaacgtagtctcaattaatctatgtttcagataatgtgaaaagagctcttaaaaataggaaaacacaggaaaaatgggcaacagacattgccgataattgacagtggaaactaaataaatgacaaacatgtacacacatacaacattttcaactttcctattagtagaatacttaaaatatctatggcaagctttttatttgttttattggtatatcaattataatgctcaatagtggcaaaagtgtagtgagacaagtattttgtaactgttggtgggagtttacgagtgttctgagtaccaaccttgacagaaattcaacaatgtgtatctaaatccttaggattcccattgttaacttttcattctcattccagcagatacatgattcaaaatgtataaataaatgtgtttattgtagggttattcattataataaaaaatgaaagcaaacaaaattcctaataacacaataatggtgaaatatagggtacccctatatatcttattactaggatcttaaaaaatcaagtttttaaagcgtaattaatgacctacagagacacatagtagaataataaatgaagaaaataagcatacaatatagggtttgaacccagtaatacatataaatctcaactatgatgaataagcacaacatctctcctctgtactggatattcttgatagaaaaaaatatgctagtaaataatttgagacatatttgaaaagaggggagtgtttgatttagaattttctaaacttgagggttattattatttttttggtttgatattactttttcctgctccttaaatttttgtttgtttggggggtttggggttttcttttccttaaacgtgtctgcttctagatgaaagttgaaaatgtttaaaagccttgccaatgtgtctaggtttttcaaatgtaatcagattttagcaagattttacttaactaaaagtattcagaacactgtgcaaaatcatctggagtcaaatagtaatggaggcaatgatttgcagagtagaaacagagagagagaaaaagatgagatagaccctcaaaatctagacccaaggaattaaatctgcttggaacatttaaacaaataaaggatgcctgtactatactagacgttttcttcttccacaattgattctaaggtcagaatctgaggggaaatggtgctgttccacattctaaaacaaactgccagcaatcgagaccagccacttccccatagggtttactctaaagcaacagggattattatctctattccaagcaatttccaatctcctctgtactccgtgtcccaggcaagattaaaaagactcaggtaggaaggggtagtaagctttgtggggagtgcagtttgtggtaagggacagttccttctctttcatctctctgagtcagaagtagagacttcgagagaatcactgagagtaagtatgtagactccaagaaggaaaaagcatcctctcacttcaatgaatgtttggaatctgcagacctccttcccaggtctgtgtagcttttggagaggccagaagagcaccgtaggcattcctttggctttccatggccaagcacatagagtagaagaagaggaggaaccgtaaggttaaccatacataagaaatcaacaaaaggctttgaaattgacttttcctatttttcaatttaaataagagagaattgtcaatgattaaaattcataaaacgaagaaagaatggactcagaaaatagcaaacatgaaatgttaattattagttcaaaagttagtttaccgtgttttctctgccaactgattgctaatgactaaagtccttatttccagctttcctctctccccgagctccagatctcttgatttattaaactagtagtttccccaaaatatatgagacaacaaaatatactctcagctgaagtaaatagcattcatcttcccagtcagataaggcagaagtacttctagatcagatgttatattcgggataggttaaaaacagaccctgctcccagtgtcccaggaatgaacagtggatgtgcttatttctcattgcatgcgtgtatcaaaatatctcacgtaccctacaagtacatacacttactatgtccctacaaaaattaaaaacaataaatcataaacatttgtaaaaataagcgaataaatgtataaatgaatttaaaagagaatagacagaggggagaatgtaactttacgtgtcccagaacagactttgaacaggctcttatcatataggaaaactgaatgaatatatgcaagcataagtccaataaccagattctgatttacagaatgatcgcaactgtagttctctcaaggccctgtctttgaacaggctgtgtcttattcctgcaacatgctgatctatcttcatgcttcaagactcagatcattatcttctctgggatgtctcccaagcactgccccagaaataacttctcctcctataatacttaatcataatccttggcttacatgcttgtttcttctcattgactatgaaatcctcaagacaaggtatataacgtatatatctttaatcctaatgcccaattgagctcttagaaggtagtaagctcccaatacacatttgttaatttgaagcaaaaaaaaaaaaatagctaatcattcaaaaaactgaattatcacaaatgtccatctaaagtactatatttacacaattaaatgctatacagccaggttaatgaacagactaaaattatatgcaacatggattatcgtaaacataattttgaatgaaaaaggcgagacacaaaggagtataaagccatacaattccattttcataatattcagtaccggcaaaataatcaaagttgacagggtactggttatacttggaggcagtgactgcaaagggataagaggagatttctgagattctgataatattctatttccttctctggttgtacagtgtgttcaatttttaaaacactattgggctatacagttaaattgtgcagtgtcctgtacgtatattacacttcagttaaaagcttccatggaagctacacatagttcccaaaagacaacaaaacaaaaaattttcaattattttaagcacaaacaattttgttcagctgtcttacaatcgaatatgtaagaataaatttatggctaattagcatagagttatatgcattttcataattaaaacttccacgagtacaacatatgttaagtattttaaatcagtttttctctttcctcaaataaggttgtgagtcataattcggaaaacagtttagcatgtaataatttagtgttttattttaaaccaagctgaagccacataaagcagaactgctcaactgagccctatccaaatccttgacccacagaataagaagcagataaaatggctgctacttaaacaaaacaaaaaccttgtttatatttttgtcctctcattttccataagtatactttaattaaacattttaaaacttgtaactttaggttatatacttactttagttggttctcaaccagggacaattttgtccccacccccaaccccccagcatatttggcagtgccttgaaacatatttggttgtcacagctcaggggcgaggtgttactactggtatccagtgtgttcaacaggccagggatactgctaaataccctacaatgcagaggatagctgctcacagcaaagaattttccaaacctaaatgttagtaatgctaaagttgagaaaccttgctcagatataatgacataatgttgttagaatttttattttattcattttaatgtatgtatgtatgtatgtatgtacgtacgtatgtatgtatgtatttgagatggagtctttctctgttgcccggggtggagtgcagtggcacgatctcggcttactgcagcctctgccttccacgttcaagtgattctcctgcctcagcctccctagtagctgggattacaggcgcctgccaccaaacctggcaaatttttgtatttttagtgtagacggggtttcaccatatttgccaggctggtcgcaaactcctgacctcaagtgatccgcccacatcggcctccctaagcgctagggttacaggcatgagccactgcgcctggccaggaatttttgaatcagaatttttcttgttcgattttaatctcttatcatttagagattcttgaaatattgaaattactttgttcaaagtgaatgaattttcttaaattatgtatggttaacatcttttaaattgcttatttttaaattgccatgtttgtgtcccagtttgcattaacaaatagtttgagaactatgttggaaaaaaaaataacaattttattcttctttctccaggctagaagaacaaaagaatatcttgtcagaatttcaaagagatttaaatgaatttgttttatggttggaggaagcagataacattgctagtatcccacttgaacctggaaaagagcagcaactaaaagaaaagcttgagcaagtcaaggtaattttattttctcaaatcccccagggcctgcttgcataaagaagtatatgaatctattttttaattcaatcattggttttctgcccattaggttattcatagttccttgctaaagtgtttttctcacaactttatttcttcttaaccctgcagttctgaaccagtgcacataagaacatatgtatatatgtgtgtgtgtgtatttatatatacacacacacatattgcatctatacatctacacatatagatgtatagattcaatatgtctaaatgtatataattcacagtttttatctttgatttgaaattaattttagattttacttgagaacttcacaacttcatataattttaaaaactgaagaccagattgtggaatcataaaatctaaatctaaatgggaatcacttttttaatctgtcctggttacctacctggagatttgagaagagtctttaaaaagaagaatccattttcttagggaagatctggattgccagatcagtctcaccacttcagcctctacttaaaggcattatattcccccgaagcaatgttttgttttagctgatttgtctgggggtgtgggacgtggtgttggttcacattccatttggttgaatagacatccagcttattccagtggcttttcataccgtcctactgtgatgtctgcttattactgattacttcccttggctgactgacatgctctgattgtgcaattggattaactttcatggttttagttttaggaaagcagctcttttggatctatttcattttagttgtcaagcagaaggtgaaaggggaagagaaattaatatttaatcattccctgttatgtgccaagtattagatacatttacagccactattttatttaatcttcatatcagattttgacaatggttgctattatcctcattttacacggtcacataatcaaagggaaatgaaattggtcctttatcaatgattcaggtgctttacacatgtaaattagagtccaatgtcaaacgtttatttctgtgaaacaagaggtttacacctgaacaagaaataaagtataaaaataaaatatggcgtaattcaataaacaaatatggagcactgactatacatccgatgttttactaggtatttgggattcaaaaatagaaaagagtgggaatcatttgaagatggttataccctagaacaatgaactcagtcttttcttggaaatttatctttcccaaatgtattgagtgtcatatatagtaatataattgataattcattcgaaacatatttagtggcattttcttattaattaatatgcatgagtctattttctcctgaaagaatctagatcagtgctttcaaatagaactcccgtgatgatgaaaatattctgcatcatccatttttgtaacgactagctatttgtgccttttgaatacctggagagttggtcgtgtgactgaggaacttgagattttattttagtgaattttgattaacttgaatgttaatagcgttgtatggctaatgggtactgtagcagacacagtaactttagttgacaaaaatgaagtgttaacaccatggtgattttggaggtcttgggaaagggcatacactatgtggtggtgaatgagttcgagaaatttagggatatgaagtaaaaaatgaggactccagaatgaaactacccaaatttgaaccacacctttgttgcttgctagatttgtgtcctgggagctggtatttaacccctttgtctcagtttccttccatataaaatgaagataattggatctacctgatataattattataatatgaagataaactaagataataaatgtgaaaaggttagcacagtgcctggcactgtgtatattgagagtcaatactctcaatgtcagttacctcttaagatgataatgcaatttctcagcagcaagctacggtatgctatggcatgctatgatacccaagaggctgatgaatttgttcacattgttctatttctgatagagagataggttttcagacactaactttatttggagtgttgctttaccatctcacatttttctcttaaaaaatttatgagggataatataatcgtttattttctacagagatttatctactgagggggtgagtgtttcagtcaatcagctctgtgctcagatagaaaactgttggtatttgaggtaccactgggccctcggtcaagtcgcttcattttgatagactaatcaatagaagcaaagacaaggtagttggaattgtgctgtaattcattttaaacgttgttgcatttgtctgtttcagttactggtggaagagttgcccctgcgccagggaattctcaaacaattaaatgaaactggaggacccgtgcttgtaagtgctcccataagcccagaagagcaagataaacttgaaaataagctcaagcagacaaatctccagtggataaaggttagacattaaccatctcttccgtcacatgtgttaaatgttgcaagtatttgtatgtattttgtttcctgggtgcttcattggtcggggaggaggctggtatgtggattgttgttttgttttgtttttttaacctgaccgtttgctttggctatatgttttgttgtggctagaaaaaatgatgatggtgaatggctttacattaatgaccaaatgccaaaatttataccacaattttttgcataaattattctgaagaatcagactgaagaaatggcgaagtatttaattcagtggccaggcatgtactgacagtatttaagctgaaaggacgtggtctggttctagttaaacaagtgtcataaatcaaaattaattattcacacctgtggtatggacttaataattaatgtacactaacgttcgccacaagtttatttatttacttacctactgatttattaacttgtgagttttcatctttccaccttgcatactatataaatctaacagtaatactatttattaaattaatacatatttattttatataaagcaagtggtacatatgaatttatagtaaaaagcaacatcaattgatccagcactattcattcaaagacaatcatttccccactgtattttcatggcatctttgtcataaatcaagagaacttgtatgtatgaatctgcttctggattctgtatcctcttccatttgattaaatctgtactttaacaacagtacttcactggcttaattacaatcttttttttaaaacaatcctaccgagctataattcacataccattaaactcatttaaagtgaacaattcaatcgtatttcggtgttacttttttaaggtgtgataaaatatataacataaaaaattgtcattttagtcatttcgtgtgtccagctcagtggcatttattacaaccatcaccacagtttatgccccacccccaatttttttttttcttttttggagacagagtctcgctgtgtcgctcaggctggagtgcagtggcgcgatctcggctcactgcaacttccgcctcccaggttcaagtggttctcctgcctcagcctccctagtagctgggattacaggcacctgccagcatgcccagctaagtttttgtatttttagtagagatggggttttgccatgttggccaggctggtctcaaactcctgacctcaggtgatccgcccaccttggactcccaaagtcctgggattacagcgtgagccaccgcgcccagcctccaaaattttttattactccaaccagacagtctgtaaccattaagcaatagttcccctttctctctcttcccatccgctagtagcctctggactactttctgtttctatgaatttggctattctagatcttttatataattggaattatatatttgccactttgtgtctgccttacttccctcagcataatattttcaaggttcatctatgttgtagcatgtgtcagaacttcattcctttttatgactgaataatattccattgtatgtatatacgcaatcattttatttaaacattttggatctggttgtgtaaaccttccactttgttcttcctattcaagattgccttggctacttttggttctttgaataaattttagaactatattgtctatttttacataaagccttccaggatattgattgaaattttgtgaatctggagctcagtcaacatctttacgatactgagtcatctaatttgtgaacattttgaattgtgtcaggttatttattgtattttttaaattggtgatgctgacattctaataacagatcatttacacgactgataaaatatttaggaactaaaataagtaccaattttatgacattaaaaccataatgtgcgcttaagtgtctctatttcaagcaggtagttatttgaaaaaaaaaaatcccttcttggtttctacctttaatgattgcaaaacatctgtgtaaagatacagacttttatgtatggagggaaggtggtgtcccagcaattaaattttatagctacataacaatacaaatgaaatcatccctcataaaaagagaacaaggaggaaggatacccaaaatgttctacaatatctcagtacatcttatgacaaaaagaagaacaaaaattataattgtaggaaatgtgagagaactatctaaaatatacaatagcagctttgtgggttgtgaaagagtcaaggttttatgtgtcctgcaacagaataaaaagtcaaatttttatgatagaaaattaaaactgaggttacgaacaccatcatgtatagacttatattactacagcatccataatatctgtttcctatgccaaaattataattttaatgcaatgtctttgccattaaatgccacaggatttggaattttattcattagtcatattaaaattatttaatcatcttttctccatccatatgcctctgtatccctgttagtttagatttagggatagaaagcaaatgatcagtaccagatttaggtaaataacacaagtttttttaaaagtaaaagaaaatggcttataacactggcagacagtcttgatcttcattaaatctcaagctcttacttattacaggagggtagaaataaagcggaccccctccctgtgtcctccagccctacccttcatccaaaggttagagtgggtgatataattggaactagtgggtcatagttactgtgacatgaatatgtcaattccttagtacatagtatctccaaacatatcctaatatcataatcagttggcaggtgactttctccacagctaactctaatatgctgcattctgcgtattgagccaactgaccccttactcttgtacctttattttatttttttttttatttattttttgagacagagtctcgctttgtcatccaggctgcagtgcagtggcacgatctcagctcactgcaacctccacctcccgggttcaagtgattcttctgcctcagcctctcgagtagctgggactacaggcgcgcaccaccacacccaactaatttttgtatttttagtagagatggagggttcgccatgtcggccaggctggtctcgaactcctgacctcatgatctgctcacctcagcctccgaaagtgcggggattacaggtgtgagccaccgcgcccggcctgtacatttatatttcattactgaagagagaaaacagcaggtgaagataatatagctatttctttaagggagtggtggacagggttgctttaaactgaatatagccattagcgtaaatttatgggtagcttcatgcaatgaaggctcatgaaatgatatcctcattcttgtctaatacataacttgaccttttacagcctttaacaatgatacccgtaagagccacaaagtggggatgttattaaagctagcctctgtgttcctctctctgatcatctcattctatgatcttcacccacacttctgactcaggtgtttttaatatttatccctcttcatatttctttgtattttctctgaacatgcatgtgggtgtaggaggctctctcgccatcatcatcactctcttcctctgtgtttctcacttttaggctaattttcatctatgaattgacacgtatattataggaatttatttttatatatttattaggaatcttctttttgttttttttttttttttgagacagagttttgctctgtcgcccaggctggagtgcaatggcacgatctccactcactgcaacctctgtctcctgggttcaagcgattctcctgcctcagcttcccgagtagctgggattacaggcatgcaccaccacgcctggctaatttttgtattttaagtagagacggggtttcaccacgttgatcaggctggtcttaaactcccgacctcaggtgatctgcccacctcggcctcccaaattgctgatattacaggcgtgagccaccgcacctggccatgaatctacttttctatttgcatatttgccactctttttctgccccagttgtttatgtaacacattctcttctgctctccttccctgaccccgttaatcccagtttcatctctttcatgtctttttattttgtgtcccctttcctcattcttcattgctctttgtatatgttatatgtgggtatttttttaactacccatttatttaaaaccaaaatatgctttatcattctttatttttgaacaccgagtcctagaaaggttatgtgacttatttgagaccatgtagctttctatttaaatataaaagtgattccaaaataaacagtaggggttttaaccttttggtgaagctcaagtgatttttatgtggataatatcctaatattaaaatggggatttattttcttttaaaaaaactatatgagtttttgctttggtttttgccctttttgagaactagatgctgtgttttaaaattactttctagaaccttctctgctgtggaacatttacagttgtgtaatatagcaaaacatgtttatgttgtttcagaattagttaaaatcctactatttttaatgtcaagtaattttacaggtggtgtacgttatgcattcctattagttttaataaatatgttgtcattttgttaaataagtttaaatttttcatcgcattttacatgtaaacagtaatttactatctacacataaaataccatttacaaataagatatactgtttatatgtaaatggtaaattactatttgaatttgttactgcccagacagtataaaatggtgcacataaagaaaaaagcattttggaaaacaattaagaaatttggctggaaagtgaattttagttaagtgcatcttattcactttaccgaggaaaaaggtaggtttacaaatacaacatatataacaaacctttaatatgggaataatttttgtaatattgataataatacaggtattattttcaaaaaatcaccaaataaaaattatgaaagtaaaaatacagtgcaactcctagcacaaactatcttccacaatatacagttggctgtatctaaatttccagaaatctggttcattttgtattaatctctaatcatgttgcttctaaatatgtatctgaggagtaaacatttcagatttattttcatttgtataaggtaaatgaatgtttagtctttttccagacgtatttgctatgtaatgacagtcattattagtcgtcagtataaatgtgaatagcaaaaaggagaaaattaaataaagctagagcttggctttccgactccttgctcaaaaatggacactttgtccaatcaatttcctatcacaagatgacgattaatagattgttctaatagttaccattcagtcctgcccttaacgtgatgttttttcaaccaaataatagaatcttcactggcattgttaccatattgactggtatttatggaaccccggaaaaaaaaatgctgtaaaatatatagtaggaagtataataatcattataggaaatcatttctctagctggaagtcttagcagggaccagatagttccactggagcttttatgtgctcatgattttctcccttgaagtgtatttgtaacacagttcacacagtttttaattttataaatctgtgtgctaaaacgctattatataagaaaacgggccgggtgtggtggctcacgcctgtaatcccagcactttgggaggcccaggcgggcagatcacaaggtcaggagatcgagaccatcccagccaacatggcaaaactccgtctctattaaaaatacaaaaattagctgagcgtggtggcatgtgtctgtaatcccagctatttgggaggctgaggcaggagaatcacttgaaccagggagtaggaggttgcagtgagccaagatcatgccgctatactccagcctggcgacagagcaagactctatctcaaaaaaaaaaaaaaaaaaaaaagggtgttcacctatttattgggcatatagtctgatagttcccagaaacccattatcttgaatgttttctttatgtaagttcctggaaatccattatttggatgttttctttatgtagttaataattacagcaaagctgtaattaaattatttattcaagagctatctattaaaggactactatgtgccacattctgttctaagcatatcataatcacttcccacccttcccttatttaaaggacatgcataattttatagggcttggcattataaatattcatatctctaatttatagttgctaaacagtttgaagctgagggttgggggaagggagtagtaatttaaagtttataacataagcatccttgactttgcctcctataatttcacactgacatgaggtttattactaggttgtgtgtcatgagtacatctcaatttgctctgactgttctggtttttgcctgttatcctatcataatttttaatagctccctctttcattgtcataagtattccactttagaagataaaatatatagagagggtcactctagttatgagaacaaacatcaggcttttagagctaggcttggtccagtgctcaataactattattatcatgattgcttttgttcttagtagcatcatcgtccttgtcatcatcatctaccttcctaatactttagttcagctgagaatttcggcctatccaagaaatctgattgccattattaccgaattaatcactctttaatgacaatagtatataagaatacgtgacatttaactttccaaattattgaaatgttacgctgtgtatggaaaattctttctaaccgtgttttttctctactctcaaatcgtaacaatcgtcaacacagaagaagacttttatgaccaaatttgtggaatttttttccccatacaccaaacagcaggcaccagctgggtgtctctaattcagtcctgacactatccacccagagatagtgtcagatcccatagattgagggctcagtaccgaggtctgcctcctctgcacccccctagcgcacgcgcgcgcacacacacacacacacacacacacacacaccagtctcaagtccaggcctctggaacttctgacccatgggcttcaagttggggttcccatgaccctctctttgggttcaactaacttgctggagcagctcacagaactcaggaaaacactcgctttcacctgtttatgataaaggatattgcaaaggacacagatgaagagatgcatagggtgaggtatggttggggtggagggacggaaaggggcatggagcttccatgccctccctgagtgcaccaccctctaggaatccccacctgttcagctacccggaagctcactggactctgtcctctttgttttttatggaagcttcatgacatcagcattccttccccaagggtatatggtgggaccctctaacaggaggtttttaagacctataatctgaaaggcgagggaacattaaagtgaaaggagagcaggagaaggtcagaggcctgcccctgagacccaacgcaaccaacattataacaaaaaactgtaacaagggctatgggtgttatgagccaggaacctggatagaaaccagtatgtactataataccatataggcaatgccaagaatatggatcagacactttacaaacaaggaaaaagtaaacaggagtgatgaggaggtaatttactgcaggcattaatgatgagattatgaattatggattccacttgctaccagctatgtgatcttatacctactctgtccatacctaagttataacatccataaaattcaaatactaaaagaagacacttccccaggttgtggtgaaaattcaatgaggtagtaaatgggaaatgtgtaacacagtatctggcatattgtaattgctcaaaaaatgttagattaaaaacagtaggagtaatactaaaatagaaaaatgcaaagagcaagcacaaaatcatctctgattctcacctccaaattctccaaaagtctcaccttcttaatcaaagttgtaaatatggctcttggggagaaagctgaactatgtgctactattatgaatgcaacaggtgaaggagaggagagttagaggcagcaagacaaccaaatggctctcgtggaaggcacagaggattttcagccactgctctcctattccgctgatattactttcattttctatgaccaactagcatttcagctaaaatgtgttggaaaatgatagatttttctcctcctattgcctaagaagcccaacaaagccagcattgttttcaaacaccagcattctcacttttaaagtatgaacataattcagaggacttttaattctgaacatcgtttttatcaatctattggcctgattgtaacccagaaatccaagcagaaagcaagtaaactttcacactgcttccccatcccttccccctacctttatttttgacatcagtttccctcattttggcaaagtaaaggaaaagcatttgtagaaggttacactgaagctagataattttctattaggaaacctcaccaaatacaagataatttgttcattccaatataataatgttttaaaaaatataacaaaaatccagcataaattgtgaagcactgatacttgtgtaacaactaatttccatagtgaaacttcattgttgccactatctacatactgaaaatgtatatcaagcatgtaaatgtgtcacttaagtatgctgtgccctagattttatttaaaagttaagctaattttcaactaaaaacaaattcgactattcttagcaatctctcctccccgttcatgatggatttaaaatgatgaagagtataaatgatgatgaaaagagaaaggaggagaaaaatttcataactctgcatcttcagtgtagcatttttaagtaactcctttattagcacaaaggtgtttgcctgaagcaatgacttctagaaaggagaagaaatgacataataaaaggggattttgctaatataaaatgttttttctttccttttgtttctgcaatgcttttacttacatagcaccaaccctgagactagagggagtttccttcctttctaataatttaataatcgtgaaatgatattaaatggaagttttcatatgccaactccttaaactgaggttaaataaggaacaaagattaaaggccatatttaagaccacatattgtaaattctaacccagtttcatttattatatcacctgcaaagccaatatgccatacaaaagtaaaataacagggtgatttttattaaagatcagaatcataccaaaaatgaacttttctgtcaaatctttatactcatacatcaagatgtgagtttatttatgtagctaaaataacttaatactaaatgctgactactatattcatgtcagctgacccctagtgcttcaaaccatagaaaagggataccaaatgctgggttggttgtgtattccatttttgccgtataccacctgccaaggcttataacagatctgtaatgggtttcttaccttttattgtgtagaaaatggattgttggattaggcctggggccagtgaaccatggaaccccaggtttgcaagaaagagtttatcaccctttgatgttatttctgtctcgtgtcagctgagaaggatgagctagattatctgaaagtaagctggatgccaaaatcagcattcccctcatttatccaccttatggttcggggcaagaccactgtatgggtaacaaaagggctgataagggcctgatggagaaatttggtttttctcccttttgattggcttgctgatattagaaccaattacaagacattgacgagagcatttcattgtttgttgctagagaaaatccatcaattttgttgtggaaatgaaagcatttgagctgaatgttgcacttataatttgtgaacattttcagttatcaccgggacaagtatagtccatctttggcatggttggccaagtgtggtgggaaaagagatggaccagcaaatgggccggaaaccaaagtcatcaaaagggtatttcaagaaaactctatttgttctgatggttacattctgcaggcaacctgtgactgatgactgatgcttatacctcaaatgcagtctaaaaatatttttttgtgaaagtgacacattctgactgtgatgtgggtgacatcaacagttttgaataggacagtacttcttggacttattgaaacttttataaaagaatgaacattctgaactcaattgcaatgtaaatgactatcatgaagattgcttctgttggtgctatgacttttgtgacaaattttagaccattgcagttatctcctagaggttgctttattgttttattttcatcagtgatgtgtattttatcagtgatgttagaatcactgagctgctggttaaggaagagaaaaaaattaatattcaggtgctatataggcccttattcattgagaacaaataaaggccaacacacaaaacaggaaaattaatagaaaagacactctatgggtaagatttcatatagtttgggagcagacaaaaactattttaattactaaaataattaagaaagatgttgaggctgggcacggtggctcacgcctgtaatcccagcactttgggaggccaaggagggcaggccacttgaggtcagagttcaagaccagcctggccaacattgtcaaaccctgtctctactaaaaatacaaaaattagctgggcgtggtggcacatgacttgaatcacagctacttgggaggctgaggcaggagaatcatttgaacccaggaggcggaggttgcagtgaaaggagatcacgccactgcattccagcctgggcaaccgagtgagactctgtctcaaacaaacaaaaaaaaaaagattaaaaaaaaagatgttgacattaacatgttcaagtctttatgctgaaactagaatgcagtatgattaaataatcatttctacttcgggtgaaggattagttttcttaaagatacccctttccagcttctcagttcgcgtgtggttaattcccaacgtggcctcaaatattctaatggtttgtgtaatgagtgccaccgttccaccttcttattctccatgcctcatctcagtcctggaaagatcactaaacttgcagttcataactcagtctagacccaggttcaacactcactaactcataactgtgggccacttatttaaatctcttagtgcctctagttcctcatttgtccaacagtgatgcattatgaagcatgtttgcccatctcccagcgtctagtgaggaactaaaaacacaatatatactatcatactttattacgaggagttaaattgtggttactattacaaagtaggttaccataaaattctaatagcagtggtaaggggtaaagatccacgtgccatcacgtagagcagaacttctcaaactttaatgtacggcaggtccttgaataatgttgtttcattgagcatcactgtgttataatattggcaagggaaaaaactgtatctcagctaggggggcactgtctatgtggggttttcttttgtctctgtgggttttcttctagtactctggtttcctcacatgtcccaaactgtgcacgttaggggaattggtgtgtctacattgtccccatgtgagtgtttatgtgtctacgactgtgccctgcgatagaatggcatccctgccagtgttggctcctgtctggtgctctgagttgccaggatgggctctggcctcccaagtccctgaactggaatacgtggcttggaaaatgaatgactgaattaatataaattactgtgaaataaaaattcatatagtattcaataatcataaagatgcgtgacaataattgatgctctacagaagtgctcagtgagctgccatattgattattgtttgtttttgaactttgtggtgagagaaggcaatcctggcagtttatgctttgcaaacatttattccttgaatgaaccaccgccactgcaaacactgtcactcactgattcaccaaaaactgggtaaataattttcctcctggtttttattaatctttctaaagtggatgtatatctcacatttatttctgagtttaatattagaagtgcttggggtctttatttagatgttggatcatgttttgtgaacacaggtatgcagtaggaacttaattcttgtttatcaattagcctatggtaagattggtttcattatatgtcattttgcctaagtcacagtttcccagaatctatcaacaacattaattgatgacttactgaaacaggaatcaccttgagatcttgttaaaatcaggttactgattcaatggctcttgcataggacctgaggttctgcatttccccccctaatttcaagatgctggttccctggtccccttgctctacttcttaaatggtagggaggtagagagtggctatcaagagtctgtgtaggagttgaccaccaatcccattcaatggaatgcatacagtgtgttctgagatactggaaaggcctttgcaaaaagattttgtctcttgatatttatgaagcacattcatccgaccacagaagatacatatcaactttgacagaaaatatgaacacattcaaatgatttatacctttgaaacatagatcgttgtggggttcataacccaagtataactttcccacagattcactcaatttccttcctctttctgtgcaatatattgtatattgcaagaagctcacctccactcaccttattcctcaggctttcttctcaactatcttctgtatagatttaaccagtgggaggcgttggcaggagattggagagcaggagaaggggagatttcagggtatttctttccctctttcactgctttgggcaacagctgatacagagtaagtggccaaaaaatactagctattattaggtcttctaataatgatcttctaaaatcactttttcagtggttacccccattgatttgccatgaatgtctcttcagacatctttgcaaagaattgagcctgactttagatactcattcaaaatcaaaatcagtaattttaggattgaggactctggtattatttaagaactcttaactgtaccaagcctcactcccatttctggctttcccctatatatcagttaagtaataactccaatagtgtaaaatttgcaatagtgttatgtaacaaatcaccctaaaacttattgacttaaaattatcaccatttataattgcacacagtctgtggggtcccgtgagctgttgtgttgttctggctcactcatacattttcagtcagctaatgggtgggctaggggctggcttatctagcataagcgcagctaggatgattcacctctgctccatatggtctctcatccttcggcaagcgctcctgggcttattctcatgcaagaaacaggattctaatagagaaggaaacaagacttcttgaagcttaagcttggagctggctcactcatttctaacacatttttttaaccaaagcaaatcacaaggcaggcccatattcagggattagggaaataggttacaactcctgatggtagcaactttaaaagtcacattgcaaaaagatgtgcatacagagaggtcaccagtgcaatctaccacaccttgcaatctattaagtttctcaccccctcacaagtaaggtattcagttaagatgcattcctatgtattcagatttctaatcaactaatcctgattctcacgtaatattgacacagtatcaatattctcaaaagccaatagtctagagggtcacaaagatcctcaaagatactttatgcaaaatcctaggagtatagaaacagtaccttggtttatgtatacattcagtatttattaagtgtttccaatatggtataatgttaaggaatgaggatagagttatgaacagacagacacttgtctttatggatcttacatttggagggggacaaacattaaaatggattatataattacaaatgcagccgttctcattgtcttttcagatttctcagggtgtagactgagctactataataaaaataccccaagtttccatgtttcaaacaatatagatatgtgtatctttcccacataaagtccagcctaggtacgtagtctctgctctaaaaaggaacacaggctagcaaggcagctatactattctcaatataatactgcatttcaaaatctccatgctggtcccacaaatatccatgcactctctttcttatcatcaagagaacacacagtgccttcccaagagagaccagtcaaagtctcattcacttactgcatccagctaaaagtccattgtctgtggatgatgcactgtcttctccatcagatcaagatatggttcctcatggtccagtgacctataaagtgaaagttatgctatctgctcctaccacaaccaattctctctttttaaaatttttttaaatttttgtgggtacatagtaggtgtatgtatttatggggtacttgagatgttttgacacaagcatgcaatgcataataatcacatcatggagaacgggggatccaccccctccagcattaatcttttgtgttacaaacaatccaattatactcttatttatttttaaatgtgcagttacattattttgacgatagtcaccctgttgtgctatcgaatactgggtattattcatttttcctaagtattttttgtacccattaaccatcccgctgccccctccccgactcctccactatccttcccagcctctggcaactacctttctactctctatgtccatgagttccattgttttgatttttagattctgcaaataagtgagaacatgagatgtttttctgtgcttggcttattttgcttaagataatgacctccatttccatccatgttgttgcaaatgacaggatctcaatcttttctatggcagaatagtactccatttgtgtatatgtaccacgttttctttatccattcatttgttgatggacacttaaattttttccaaaccttggctattgtgaatagagctgcaataaacatgggaatgcagatatttcgtcaatatactgatttcctttctttgggtatatacccagcagtgggattgctggatcatagggaagctctatttttacttttttgaggaacctccaaactgttctctatagtggttgtactaatttatattcctaccaacagtgtgcaaggttttccttttctccacattctctccagcccaggcacaaagacagcagtaagtgctggacgaccacctatgcaagacctagactataaatccagtacttctctccctctccacacccccatacccaccactccattctgagttttcaaatgtaagctaagctaaatgattcaataaagctttttgaagtcaaggatgagaaaaatcgttgctttttatgtaatcccaccatcaaagtaataattgcttagttcaaattgtggtgatgcaaacaaggaaagcaagagagcataaaacgggtggatctgacgcagtccagaagtggaggcaatggttgtttttagataattattagagaagatactgtgatttggtttgaaggcaaagctcactgaagttctctagttctagatacacctatcgaaaaattcttacccaaataaatgtctcagtgataagagcagcctttccccaaatgcctaagtgtttttgttttgtttttgttttgttttgttttgttttgttttgtttttgtttttgttttttttcaaaatcttcctctggaatggatgctgaccttgtcattgacttattcttcaccacaactcagtcatattaatcttgaaagagacagagaggccactatctctgctaataatttacataattgtttttctacaatttggtgctaattaaaatgtgaaaggggtagtgatgatataggtaaatgtaataaggtcattctttgttcctgagagcaaagataatgtcaccagaaaggattgtctgtatattcacataagagcaggaaacaggaagagagacacagtaaggtaaaatagcatactagtatatcacgtagtctggtatagccaatgtagaatatttatttcaaaaaacaaataaagataaagttctgcttcactttgagaagctgttttttttaatcctgtatagttagttcgacatgttactactctgcctggttcaaattttgatttcactctgttccagttatatatgctatgcaacaaaccactctaaaagttactggcttaaaataagatagttttacgatttctcataattctgagagttgactatgatattcatctgcttcacctgatatcaaccaagacactgggaaagctggaaagtccaaaatggcctcactcacatgactggcagttggtgctgcctaccagctgagaactcagctaaagctattggccatgagcctcagtttgtttccattgtcttctccatgtgtctcctttggcttccccacagcttggtggttgagttctgtgaagaagccttccaaaagaacaagcaccaatcttcaaagacttatcaagcttctgtttgtatcacacttgctactatcccattggccaaagccaggcatatggccaagttcagaatcaaaatgagaagggactacacaaaggcatgaatccaagaggcgtgattaattgtggggctgccaaataatcgccttccacaaattccttactagctgtgtcatctctctgtggtctcagttttctcacctggaaacaggaacaaaaatggccctacaaaaatggactgagatatattaggttggtgcaaaagaaattgcagtttgggaccgtgaattttaaatcattataactaggctcaagcacatctttattaatcaaagtaggaaccgttacagtcaacacatttttgccaagaagaaataagtgtgtttattcctgtagcataaaaattcatgctttgggattcaatgaactcttggaaagcattttcttcatcctgctagttgtggaagcattttccctgtaaaaagttgtcgagatgcttgaagaagtggtagtcagttggttgagaggtcaggtaaatatggcagatgaggcaaaacttcctagcccgattcattcaacttgtgaagcgttggttgtgcgacgtgcggtcgggcgttgtcacagagaagaattgggccctttctgttgaccactgctggctgcaggcatggcagtttttgatgtatctcatcaatttactgagcatacttctcaaatgtagtggtttcgccgggattcagaaagcggtagtgggtcaggccagcaggagaccagtgaacagtgaccatgacttttggtacaagtttggctttggaaagtgctttggagcttcttctcagtccagccactgaactgggcatcgccagttgtcgtttaaaatccactttttgttgcacgttacaatccgatcaagaaatggtttgttgttgttggcgtagaataagagaagatggcacttcaaaatgacgatacttttattttcgctctgcttatgaggcacccacttatcgagttttttcgcctttccaatttgcttcaaatgctgaacaactgtgaaatggttgacattgagttcctcggcaacttctcgtgtagttgtaagaggatcagcttcgatgattggtctcaatcggtcattgtcaacttctgatggccagccactacgcccctcatcttcaagactcttatctcctttgaaaaacttcttgaaccaccactgcactgtgcgtttgttagcagtaacttggccaaatgtgtttttgacattgcgagttgcctctgcttctttacaatccattttgaactcgaataagaaaaacgctcgaatttgctttttgtctaacatcatttccatagtctaaaataaacataaaataaacagcaagtaataagtcattagcaaaaaaaaaaaaagtgagaaatgctcattaaaatgatgtataacataatcacatttatttaagaatgtatttcaatatcaaatggcaagttccatgaatgtgaaaacaacacttacttttgtagtcacctaatgacacatttaagaagctgaaacctgagctcagcacatggtaagacatcagtaagtattagttatcataatttttttagtaattttcctacagagctataaataaaatgaaatactttccaaacagtgataaaactataaagcagcaatacattataagcttctatcctaatctgccttcccctcagggccttaaaatgtgtcatttctgtaaatgttacctctgacatgaaagcaccaacacactgttcagcaattacaagttgattgtgacaagagcctcactctccctatttctttttctcttcctgtcttgctttcccttttccccatcctttcactcactttgataaggcaaactgccatgtagtcacaaaatcctagacaaacaagtctgtacctatgtgggcgatgctgtggatttagtaagggaaacagttccttgataaatttctcctttagccctgggtttccaacccctgtgtcattcagctatagaaatcttctgatattttctcccactggtcattttcactcaggctgccatcaaaatgagactacccaatgttctttccatttgttctgttttcttcctcgcctctgattccctgcctggtccacttagaaagtctaccttttttccttctctcttaataccaccaatctctaaatctgacttctcctttctaatcccatagagcctgccttgtcatctccaaacaagatccatcttggcctcctgttatcctcagcccacagcagtatttcacttacaacgttcgttagtttctacctcagatgtgtcaggcatttagtttgtaccaatattttatttctttttatatctacaccaagcctgcactagacggtccaaggagaaatttaactgattcctgttttgaagtcctccccactccttgggagagttaaagattcctcagtgtgttaggtaatgatagttaatatttattaataacttactgtgtatcgactgtattctaagtgctttgcactgttagaaggagaataacctaagactgtgccaaacagcagtctagaacaaagctgaattccttgcttgcctggcaagggagaatgtggtacatactaaaggattaatacatgttcactattaaattgattgattgtggtggtggtgacagtggtgatgacttttcaagtgtgggtaaagtaattttttccaacaaatccacatccacatatttaagaaaagagagacatttcattctatctttttgtgtgcctttgagaggacacccctggcacccaactcccaggcaaatgccaccatctgtgtgattttccttcatttgccaacgaaggcacagcaggtactactaggttaacctttgctttcgcaagtcttctctcaaaatagtaaacacttcagctgttggaaagctctaatctcaaactgcaaatttaaaaatctctctctggagttcaaaaaatagaaagaaaaaataaaaatctctctcttctggaacataatgtttgaactgttacatattattcacactatttcacattatgggattatgaaatatggttttaggtgttagaaaaacgaaagaaaactattatttgttaacactaaccgagagatttttatgatattcaagtaaaatgatagaatgaattattttaaaaatgcatgaatcttcaccttctgtgaagtgtcatggaggattagttctaactaatatgcctgtaagtaactgacttaatgcgtctattggttctcttaatgctgtaagtgacagaaaactggtctcaaactgatttaaacaataaatatgatcaaggttccggttttttgtttcttgttttttttttttttttttcacatttctctgggttctatttttctgtgttgacctagcagcttcacctgacttccctcttggtgacaaaaatggcctgaagccgtttcagaacccacatctgcaaacttacttttgatgaaaatcatctctttagggaccttctttcccaaagcatccaggaaagactgctctgaaactgactggcctgaattaggtcacatgctcattcctgtactaaatcacacctcacttctacagctaaaagtcattaaatctcaaccaaactctacagctgcaccacaacaaaggtagagaagtaggtgcaaagttcctcaaaggaacgtaagggtgaaagatgattgactgataaacagacaggtagacagaatagatagatgaattaggaaaagataaccaaccaatatctgtcacattgctttgacttgattttttagtcaattaatgaaactgaatggtaattttgacattacaacaatactttccaaatgtaggcaggttgtggagatcatttaaggaaaaaatgtatgaggtgttgtagcagatactgtcggtgccccaccgatatccctttagcacttaccatttttatacgtgcttcttaatttccaacttcctgtacttgcatctctttgcttggggctatctctgctcattcttgggagagagcagaaatgtagcagttatgcccctgtagagcagcagttgatagatcaataccctgtcccccttgcccttcagatctaataactccaagcttaattccctacatctttcatataagtatatatataagtatatatatatacttgaagttctagggtacatgtgcacaacgtgcaggtttgttacataggtatgcgtgggccatgctggtgtgctgcacccattaactcgtcatttacattagctatttctcctaatgctatccctccccagccccccaccccacgacaggccccagtgtgtgatgttgcctgcgctgtgtccaagtgttttcattgttcaattcccacctatgagtgaggacatgcggtgtttggttttctgtccttgtgatagtttgctcagaatgttggtttccagcttcatccatgtcccttcaaaggacataaacaactcatccttttttatggttgcgtagtattccatggtgtgtatgtgccacattttcttaatccagtctatcactgatggacatttgggttggttccaagtctttgctattgtgaatagtgccgcaataaacatacgtgtgcatgtgtctttatagcagcatgatttataatcctttgggtatatacccagtaatgggatggccgggtcaaatggtatttctagttctagatccttgaggaatcgccacactgtcttccacaatggttgaactagtttacagtcccaccaacggtgtgaaagtgttcctgtttctccacatcctctccagcatctgttgtttcctgactttttaatgatcaccattctaactggagtgagatggtatctcattgtggttttgatttgcatttctctgatgaccagtgatgatgagcattttttcatgtgtctgttagctgcataaatgtcttcttttgagaagtgtctgttcctatccttggccgacttttcgatgaggttggtttttttcttgtaaatttgtttaagttctttgtagattctcgatattagccctttgtcagatgggtagattgcaaaaattttctcccattatgtaggttgcttgttcactctgatggtactttcttttgctgtgcagaagctctttcgtttaattagatcccatttgtcaattttggcttctgttgccattgcttttggtgttttcatcatgaagtccttgcccatgcctttgtcctgaatggtattgcctaggttttcttctagggttttatggttttaggtctaacatgtaagtctttaatccatcttgaattaattaatttttgtataaggtgtaaggaagggatccagtttcagctttctacatatggctagccagttttcccagcaccatttattaaatagggaatcctttccccatttcttgttttttgtcaggtttgtcaaagatcagatagttgtagatgtgtggtattatttctgaggcttccgttctgttccattggtctatatctctgttttggtaccagtaccatgctgttttggttacagtagccttagtttcctacatcttcttttagggataacagggagtattaagattcagttgttcacattgatgacttgcatgataatataccctttattggctatcttccctatttcacttcttctcaccctgttgatgtgtcctggaatcacatcccaaaactacttgagctcaaatttttatttctgggtttgctactgggagacccaaatcaagacagttggcttcagtactcaggtacttacaaggagatcatggatatcaattgaatcagaattccatgtcatagcttttcaaatttatatcacaataagttgaaaagatgttgattcttccttccacagtattttctgtttctgtgtgtcttacattctggtgtctcaaaacatggctgcaaccagggaaggaattgaaatttggagtaaatgtcctattttagtaggtctacatttaagacatggacctgaaattgagatcataaacaaaagtagatgtgagcataaagtagaaggtgaggttggagggggaaattgtttggatttactgtaaccaatggagctgcttagtctagtcaaggaatttcaatcatttctgtggagactagatgacttatgttatacaaggatatctctggaaaattcactgtacagttttactaaatctggctgataatatgttcactcaatgttatgatgtcaataatagaatggatattgcctttaaagacaattttaaagtaaatatctcacatattcctactcatttatcaagggctgtgtcattcatggcaatataagataattcttttcactttcaaaatcttccagatgcagaaactttccaatatttgctgtagatgaaagtgtacaatttcacaattcaatgggacaaaaagaattaggaaaaatatgtttcagagagtttatttggtatcatctacaagacctggtatgagacctggttggtgttgtatggaatgaaatatatcagtctgttctcacactgctaataaagacatacctgagactgggtaatttataaaggaaagtgatttaattgactcacagttcagcatggctggggaggcctcaggaaacttacaatcatggcagatggggaagcaaacaccttcttcttcacatggcagcaggaaggaggagaatgagcaaaagagggaaaagccccttataaaaccatcagacctcgtgagaactcactgtcacaagaacagcatgagggtaaccgcccgccgtgattcaattatctccacctgatccctcccaggacgtgtgggggttatgggaacaacagcttaagatgagcttttggtacagacacagccaaaccatatcatagagtttcgaatctgaaaaacaaaagaagctaatttagtttcagaaagctgagatttcatgaaccatttaaaaattcactttataatttttcatgcattttgaagcctttatcctttaaatggaaatggaatagaactattattcgtcatttctaaactgtgcattcatcaacaattttcagaagttaattccaacatgtcttcatcaactctatattacatgttagtacactacatctctattttcatgctataattttttactttttcctcacactttcatctcaccctctcaagatgtgttaatcccctttgctcttttccccatctcgtctctgttgcctttctccccccttcctttttttttaatttctgttctcttttacctgaaatctccctcttcatcttttgctaccaattatgttcttaattggttgaagtgagcaaggtaggaaattctccattttgattccattctctcacatggtttatctttaatatgttttaataaacagtttaacataaatcttacttccaatttaacatgtaaaatttagaaaattggtgaaaaatatgcctgctttttcacccccaaagaaccaagtttaaaaagttttgtgactttgaggcatccttttccctaaaagcaagcttaacagattcttagcattcgtctctgtgtgaaattgtggaaactttaaaaaaactatttgaagtaccaacaactcaaagataaattgtctgttttaaatgcaaggtgctaaaataaaactagaagattgacaatattattcatctttatcactgttctacttaaaatttgaaaattaatgttagaaatgtgagagggtgcatgaaaccttaatggttttatcatttcatctgagtatatatttgatttcttctttctgacattgaaactttaaaattcgccactatttttcagtaactcgttaaaatatggtccgttcttatatttgcaatactcctatactgaaaaccctacaacttcaccattatttaatttttatgttactatatttgtttcttaaaaagattataatattatgtattagttgtctattgctgcataacaattactacaaagataggggcttaaaactgtatctttagagtatcaggatacatatgggtcagaagtctaggcatagattatccatattctttgcttcggggtctctcacaaaggctgcacactaggtgttggccagggctagggtctcatttgaaagcttgccttggaaggacctgcttccaaactcacctgttgttggtaagtttcagttccatgtgggttattggactgtagtcttccttttcttgttggctgatggccacgtttagttccttcggtctctaacatggcaatttgcctcatcaaaatcagtgagagaaagtgggggaggggggaaagagacagagaaagagtgaaattgctagcaagacaaaagtcccaatcttatgtagcctaattggagaagtgatatccttttgtctttgacatattctgcttgtcagaagcaagtcaaaagtcttgaccactctcaaggggaggaaattattaaaggactcaaatactaggagacagagatcactgagtgccattttagagtcttcccaccacggattatttcccttcacctgctggcatttgaaaatgcagctaatactctgggattctccaaacctaatttttttgtataattagagaagtatttgtcataatctgttaagtgtagtaatatattaagaaattgaatttattccttcatatttcaaaaagtacatggggttgggggacagctatgttgtcataaactttaatacatacatgattggaatggattatgaaatatttttctctaagagatagtataaggctgcaaccactgaggctcccaaatacagatgattcatatgtatttagttttaatgcaaagcttctcatgctgatttaaactctcatattttcatatatggtgttttattttttatataatgaatgtctataaaattcctattattttttcaaaagtattgtggcaaatatttcctagtaaaatctaaagatatctttgacgtaatttttatgctctcatttatgttaagaactcaatattgaagtaatgttctttcttatttcctagtaactaaaatccttactatattcatgaagagctgtgcctctattaaaaagcttttattgcaaacagaaatgtcaaaatacagcaaaggtagagctatgtatgattcttcatctgtaatgtaattttaagtatacattttattgcataagcagagatttatacccacatttgctttcagtattcacagaagaattttcatatgtatttcttaaaataacaaaatggctgctttggtgtggggatagtatggtacagcatttattgtgaaaatgattcttatcttccatctttttcaaatggtgagttcagtatgtttaacattgctggttttataatattgcgaatatttttgagaggaagaaacaataagagactgataagaataattcatatttgctcaaagtttaatcagttttttatttgaacaaaaacttggacgaaatgtccaactttcctttgagatcagtgctctccaatgtggtaacaacagcctaccatatgagcatttgaaatatggctagtccccactgaaatgtgctgtaagtataaaacactcaccaaattacaaaacctaagtatgaaaaaaataaaatatctcattggtactttttatattgagtacaggttgaagtgacaacaatttggctatttaagttaaagaaaatataacattaaaattaatttgacctgttttttacttttgtaatgtgtagaaaattttaaattacatgtatcgctctcattataattttattggatgtcattgttctagataaacaatggcaatgttgagaggtgtcataatagggacaattgtctctgtgaagaagaaattatatgaaccctacaacatgtattagccgcagagttgcttagaattgacttactctgtcttgttgaaaataggttttcccttaaaatctctgcctgatgtagccaaccacgattcaatgagcaaacaaaaatcttaaaggggaaaaaatcattttttgagtctattttacacacccagtatcaaaaagaaaaatataaatccacaactaggattatacgggatgtaattcttggatttcttttggtcttataatgctttatacctaggagatgttcaacaaattattattgaatgattgtagtttaaccgtcagttacattttgcagcaatacatttattagtagcaaaatctgagtgtttactaattttcatcacctaatcagcaaattagtactgctcttatatcgctttgcctacgctctactcactggttcaatcagctaattttttcagaattttatggtttataaaccactatatgttgcacagtatttcctatacattagctcatttgagtcacagaagttataggaggtggatcttgtctttctttgttcagaaagagaaatccaggttcagcgaggttaactggccttgtttaagatcagcacgttgctaggtgacagaaggtgttcacttctcactgaactttgcatatcaaaagagatttaaagaattcactttggagagcgggagttatggggtgaatattttatcatgttgtccgtcttaataatcaccaatttgatactaaggctgctagtcatctctaacgaagagaagttactttgaagttggttgattgattgttgttgattgacagaagtattagttttcagaatgaactaattcattaaagaaataaaacattgggtttgttcattccataaataattgaacatttattatgtgtatgataccagcctaagcagatacctaaaaggaatggagattactatagttaataacaatgcattgtattcttgaaaattgccaagagattacattttaaacattctcaccataaaaaaatgataagaatgtggggtaatgcatatgttaattatctcaatttagccattccacagtgtatgcatatttcaaaacatgttgtacacaataaatacatacaatgttatgtgttaatttaaaaataaatacattagaaacggtaaaagtcactaggatcatggaaataaaaatgtttacatttatgtaaatattagtaatataatagagggcatatccaaaatatagtgtcatattaataagatgttgtatgattattatagactacaaaataataaaggaatagacagaatgtttctaaataaagaatagaaattacagtgaagcggaagagagagtaaccctaaacccttcataatcctccctttgcctcgtagtatagcttggaaagtaattatgtggaaagttgagattgcaacaaaggacggtagtacaggagttgcccaaggacagacaattattttctcaaataaactatagcagaagcaaaatggccttggaccacaaaagaaggccctcatgtagacattgttctattctgaagtagaatttgcagtactcaagagaagaggaaagattattataggtggagagactgtaaacaaaatattatggtaggattcctcctgaatagagcaaggtgattgtgtttgacattgaaaaggtatgtttgggcaagagtttgaaaacctttagccaccatgctaagagatcttaaatctttatctctgagtaagggcggtggttgtggttaatgatccttgagcacaactctgtcccattaaagacagtagattcaactgcttctagcattagtccatatcagggagtaaagtgatccgatacattattttcccccagtaaatggttcataaaggaaggccttggctctgccttgtatgtctacatgggagaatataccagaatgtctagaggagcatgggtagcgtaacctttccccatatgcacatacaacaaatactgataatccactcacaggggagggactcatttttaagaattaagttttattttagaagactcagtctgatggcaatgcaggggttgaattacagcaggtagagactggaggtctacaaactggtttgagatatatattttttccggtggcccagataataaggacttgaacagacttcttgctctgggaatgtaaaaggccaggctggatgtaagaggttaggaagttccaaactgtcccacattttcctttcttctgagccctccaaactgtaccagactctgcatgttacgcacttccaaagtcgcttccacattttcgggtgtcttttcagcagtgccccactctactggtaccaaattactgtattagtccattttcacactgcggataaagacatacccgagactgggcaatttacaaaagaaagaggtttaatggacttacggttccacttggctggggagacctcacaactatggcaccaggcaaggaggaacgagtcacatcttacgtggatgggcagcagtcaaagagagagcttttggagggaaactccgcttttcaaaaccatcagatctcatgagacttattcacaatcactagaacagcacaggaaagacctgcccccatgattaaattacctcccactgggtccctcccataacacatgggaattcaacatgagatttgggtggagacacagccaaaccgtatcagtgatgcaaaataaaagaagactgtggagtaaattacacatggagaaaaggaagaggaactaggaagtatagatactgtgagaattaactctctgttctacaaaagaagaaatgggcttaaagtggttccccccaaaactaaaatccaaaggcacataagtcataatgcacactgttacaccgagtccttccagctcttaacttacttgttttactgcactacacttgacttgagttttagacttagtaaatctgaggtaaatgcagattgagaatgagaacaaaatgttaaaaagagaagcagtctcattttcttactactaataggcattgcagtttgtgtgggctctagcagggatgtttgtaccactgggatctaagcatctatttctatattataaatagaaaaattaggttgagctatcgcgactccattacaaacttatggaattagattctctggtatggagcttggatatacatattaaaacaaaataaaacaaaaactcctacccaattgattctgctgtgtgctctagttaagactgttatggttaagaaaataaataatcgctgtatggaatgtatatcgtcctattttaaattaataaaaaaaattttgcaggccttcccaccttccaactcctagagacaacaaatccagatttgaaaatcagtcatattaaatagttgtatcgatatttaccctttgtttctacgttattattttcttcaattttcacacgtatttgttcatcagttggttatgatggacttcactttttttcagtcttacgaatgagatttctccctccaaaaatcaataggcacctgctgattttatttattccaacatgaagttgcagaaaatgaatatggccaaaaatggttaaaaaaaaaaaagcctgttcttcaaaagactagatcgtcagttgaagcagaaaattatattcagtgcactggatttatgcattgttttagccttctccaaccaatttagaaatgcattttcttataaaattgagattattacaaatcctgtgctaagcagctgaaataatgtgcctatgccaaggtcatatcttaaaagtttggaggagcacactgcaattgaatataagtttataaatgtattccacatacttttctgatatattttaataatttaatttttacattttacctatattgtcttcattttcactttacctttggtggtgtttcatacatattcattgtttggaagaaattaagcagacagtattctaaagtcaatactgagtctgctaatgaaaatggttaagttaattaactaaatggcaaccttcactgaacttattcaaagctatttcccctcatgatgtgttttcctgaagaaatgatgcataaaaactaaacccctgttattcgctattcttctgtatcagcctctaaattgtcactttacatgttacaacctgttgcatgatgattaattatgacaatttaatggcatgtaaagggtaaaaccctaaaggattactcaaaccatcattccttaagaaaagaaattgtaatgcctaggttatcttctagggtttttatggttttaggtctaacgtttaagtctttaatccatcttgaattgatttttgtataaggtgtaaggaagggatccagtttcagctttctacgtatggctagccaattttcccagcaccgtttattaaatagggaatcctttccccattgcttgtttttctcaggtttgtcaaagatcagatagttgtagatatgcggcgttacttctgagggctctgttctgttccattgatctatatctctgttttggtaccagtaccatgctgttttggttactgtagccttgtagtatagtttgaagtcaggtagtgtgatgcctccagctttgttcttttggctcaggattgacttggcgatgcgggctcttttttggttccatatgaactttaaagtagttttttccaattctgtgaagaaaggcattggtagcttgatggggatggcattgaatctgtaaattaccttgggcagtatgaccattttcacgatattgattcttcctacccatgagcatggaatgttcttccatttgtttgtatcctcttttatttccttgagcagtggtttgtagttctccttgaagaggtccttcacatcccttgtaagttggattcctaggcattttattctcttgaggcattaccattcaggacataggcatgggcaaggacttcatgtctaaaacaccaaaaccaatggcaacaaaagccaaaattgacaaatgggatctaattaaactaaggagcttctgcacagcaaaagaaactaccatcagagtgaacaggcaacctacaaaatgggagaaaattttcgcaacctactcatctgataaagggctaatatccagaatctacaatgaactccaacaaatttacaagaaaaaaacaaacaaccccatcaaaaagtgggcgaaggacatgaacagacacttctcaaaagaagacatttatgcagccaaaaaacacatgaaaaaatgctcaccatcactggccatcagagaaatgcaaatcaaaaccacaatgagataccatctcacaccagttagaatggcaatcattaaaaagtcaggaaacaacaggtgctggagaggatgtggagaaataggaacacttttacactgttggtgggactgtaaactagttcaaccattgtggaagtcggtgtggcgattcctcagggatctagaactagaaataccatttgacccagccatcccattactgggtatatacccaaaggactataaatcatgctgctataaagacacatgcacacgtatgtttattgcggcgctattcacaatagcaaagacttggaaccaacccaaatgtccaacaatgatagactggattaagaaaatgtggcacatatacaccatgcaatactatgcagccataaaaaaggatgagttcatgtcctttgtaggcacatgggtgaaattggaaatcatcgttctcagtaaactgtcgcaagaacaaaaaaccaaacaccgcatgttctcactcataggtgggaattgaacaatgagaacacatggacacaggaaggggaacatcacactctggggactgttgtggggtgggggaaggggggagggatagcattgggagatatacccaatgctagatgacaagttagtgggtgcagcgcgccagcatggcacatgtatacatatgtaactaacctgcacaatgtgcacatgtaccctaaaacttaaagtacaataataaaagaaaaaaaaaagaaaaaagcaaagaaattgtaaaatgttgttctatcagaaactcggctaattatttttaaattttagatcaaaaactcaactagttttaatgtactacttataagtcagataaaatcattttttatttttgttttctttttgtttttacatctgttagaaacgatggggtcttcaaagtaaaagaagagatttgcaatgcctataccaaattagttattttaggatactgaatgaaatggttttctatactcaataaaggtaaaagaataagcagaggtagatctggttttctgaaacttgaagcacattctaatttggcagttttctttaagtcaaagaatataacaggacaaatataaaattaggtatgaacatgattatagaaagaaaggaaatcataacaaattatacgtttttaaaaagatgacagataaccacatacatcacaaaaattgaaaaaaataagcagaatgttttcttaataatgaaccatctctgcaatactagaatatacagtgtctgaaataattttttctatctttctggatgcatcctctttcagcacctcttcatgtgagagcatcagaaaataatttactctttcccccagcattgttgattaaaatttgacttctatcattgatagtttagaaaagtttattttacattttcaacttattattggtgatgtcacataaattattacaatttattgtccaatttaggaagaccctgccaagtttctttcacatatgaactgtaaaatttaaaagatcattcaagttatcttgtacaataactaatacatatttttcttttagtcatactaaaccctgatgctaaggatcacccaaactttttcagggaaagaagtagcttgcaaataaatcaaggaccatttatccttactttttggaagaaatggaaaaggataaagtgttagtttaaatacactcaagaacagaatgtaagacaagaaattggaagcagagaagttcatcctcaaatgtaagagtgaaagaatagggttaatgaaacaggaaaggggaaatccaagaaaaattatgccgcgctttagagaatctcctaagcacagagatattggcaatgtgcagatgaaatagctgtcacaggtcagccatgtcagaggtgattccagccactaagtatctactgcagattagatatttggaaagcagaatgagctctgttcatgccattactggggcttgacttcttaatggtttcaagtccccctttgactctaatccttctaaagtcaactttgtataaactcttttcaaaagtgtttatccctgtagaataagttcaaaactccatgtcatggcacacaaaactcttcaaatcatattcagctggtattgttttcttccacattccagtcataactaggatcccaagaattagcaaataaaaatatgaaacatccagaattctaagcataactatgtcccaaatactacaacaaaaaatactgaaaagtatcgattgcttatacaaaatgtaaatggtatcctgtattttataaggcaaccctagtcataagatctctttcttcttcctcacacactgtcaagcttgagccaacagagtaccttttaatgggctgcgcagaatagctttcgatagtttacccattaattaacagaaaattcaaatgagatatcctctgtgaaatcatccttctctcctgcctcctgtctctccattctttctccaggagacagaggccctccagactccatgactttgtagtgtattgtgtctgtctttattagagtattcatcacttggtaattgaattctgtgtttaaatacattttttttcttccagaataagtgttcatagaagggagggatgatttacctagcatactgcctggcatataaaaggccctaaataatttttcttttaaccagtaaccaactaaccaattcaacagttttttaaatgagtgaaaccactttttaaatttttttttaaattcatgcttcacctgtaaaaatatatagatgaattgcaatctggaactctgagtaatttatataaaagtgatgaaaaagaccatggcttcagatttgttgttttaattccagcttcagttcatacaaacattacaaagtcgcagtatctactgtgtaaaaagtttcatcccaatgaagaaattaaaatgtctgtctaatagagatgctctaatggacagcgatgtgtagacttcagaagaatctcctcacacagccttggaggcataagttgggaacagagcaagttctgtgtttgcctttcaaaggaatgttcctttccctttcattgacaaatattataaagatgccccaaaacttctgtgagtttcccccgggacgtaaggtcctctgcattttcctaacttgtttctcaaagcggtggttcccaaggcctgagaatagctgtgtctcagctctctcctggaaaccagagcctaaaatgttgccacatcatcgggaatgtagctgcatacttagccagagccaagagatgagccccactcgcaaagcccatgggctggacaaaattgttagccatttggtgtaggtcattgcactaggtccattacacaggttatctggcaggagtcccggctttggaggaaagacgtttaaatcctgtaaataaatggctggaacaccatggcagttgattgtgttaagccctcatccaaaattgctttgttaggttctattctattgctcattatcttgctgtgaagaaaattaagcttacatctgcttagggtgacagggtatcctgttgtcacaggattttccacattttaggcctatgtcacaagctcccaataaaccctcagagaagatcttttgtgttcacaggcatccaggtgtcaggcagacacagtctttgtcttcttgaagctcagtgacacgttcagggctgtgtatactcctccattccctgccagagacaaaatgtttgtggaacagtcaagctagaagggacctcagaattaatctgatcaaatgtctgcatttttcagttccaaggatactcagggaaggccctcggattctataagtagcggtagaggtggtattagaagtcaggttgcctgacttccaaacctctgttagttactgtcccttcccctgcatgcagcactagtgtaatccctcaactctcacttccctttttcgccacatgcctctctctctttccttcccttgattaccctgcctatccctcctacaagggaaactaccaccaggcatcctcatctgagacccgggaatggaggccaggtcttttccctccctccctccctttcccctttttttgtgtgacagtaacattattcaagtacagctcttccttttttcagtaccttccccctcagaccagaagttaatgaaaaatagggttgcgtgatatgcagcctgggggccaaaaatgtaggacaagcagtgtgcttcagacaaaactgtagggttctggtttcatgcacaaccttggaggacggtggctagaggccctagtatgagagatcaattaaacatggaggccagaaattaaccacatgggattaacatacgtaaggttgcttcttttcaatgagtctaggaaacacactggggacaccttgttcaagacaagctactatttgatgctccttcatacgcttgcttaaaatatttgttcagcatttatttagtgggggcaagaaaaattgatgttatgttaataagaaaacctctttacctcttaccttttattaaaataatcaacttagaagatatactaaaactcacatgacttttgacatctatggatgatctttcatttaatatttttctgctattcctactatagaataaaagctgctattgcattattacagagcgtaatgtgagccacatatgttattttaatcttaatggccacattaaaatagtaaaaataaacaggtgaaatttatttggattatatgttttatttaacccagtgtatctaaaattgtatcattttgacgttgcaatcagtgcaaaaatacagtcatgctatgtgtaatgaggttttggtccatgataaactatatatacactggtgatctaataggattataatacagtaggtttaccatacctttttctatgtttaggtatgtttagatgcacgagtacttgccactatgttagaatttcctgtagtattcagtacagtcacgtgctgcacaaatttgcagcccaggagcattaggctatatcatgtagcctaggtgtgtagtaggctatatgtaccacctaggtttgtgtaggtacacactatgatgtttgcataaggataaaatcacctaatgacacatctctcagaatgtattcctgtcattaagtgatgcatggatgaattaaaatattttggattctttttttttttcagtactatgccttcggaatccaatatgtattttacagcatatgtctattccaaataggcatattctgggctgggtgctcaatagctacatgtggttagtggctaccatattaaccggtgaagttctatgcccatcaaggctacacgtaatttacagggtataatagtattttaaaaattaatttttttctggcttttatgttgacatatcgtttccattttttaaatttttgttttattttctttcactgctttggaaacgcacaacttcttggaatgcaaattaaaagatatcaaataatgatgtagataatttgttattgctaaatgtctaccacttgaaatattcaagtttcaaatttcagctaactgcgattgcaagcttcagctagctggtcccagatggatggcccagctaaatcagacatttgtacatactggctacaaagtgtcccaaaaacagaccaggagggtcgtggatttaaaaaaatttccaccaaaggatgctgtcttgtccattttccaatttgggtaaattaatggatactgcatttaaaagtttttttatttctcgtacattgaagccctgtactgcactcaccaactcacccgttaaagcggctctgaaatacaggcaggaccaagacttagatggactggaggttgggccacaactccttgaacacctagagcagaggtcagcaaactttctataacggtccagatggtaaatgttttaggctttgcaggccaataggtctctgccacgactacttaacaccgctattgtggatcaaaagcagccctaatacgtaactacacataaacgaatgggcatggctgtgtcccgtgacaatttacttggggacacaaatttgaatttcatataatattcatgtctcacccatttattaattattttcagtttcttcaaatgttaaaacaattgttagttctcaaactgtacaaagacatatggtggctgaatgtgacccataagccatagtttgctgccctctgcccaagtctcctgttgaaatggggttatggcaacaatcctcgcagaatataaaactattttggcacctgacttttgccctgatttttttattgtttccagagaaatcaagtatttttctttttcaaatttatatccatattctctttttttctttgctctcttctcttctggccagcaggaagagaccaacccatctttgaattgtattcactttcctcataccgtcacacagctagtaaagctacaacttcacatatgccaatgccaactcttcccgatgttgtgttcaaaacctttctaagcatcaccattcccaggagtagcaattctatatgatattattattttacttgttggtaaggttaaaagttccagggatactgattttcttctttgttagccatgtttcattgagtggataagcaatatgcatttgcttcatagtataaataacaataatgcatcaaattgcaacaatatgaatattacacatagaaaagataaatgtgagttatgtaggtcatgccatttgatagaaaattttttttatatttatatgtttaaacatgacaataaaatgattccattcagatgaaggcaaaggaataggatttcttttcagtgtggtggttttctatttttgttttgttttgttttgttttttagagaatgagttttggagaaaaacaagctttctagacagaaaatattgaaattaaaaccagcaattcatggtcatattattgaaactatcaaattggtatatatatttgaacactactgattattttctaaaatgttacgctttcaaaaaatcatgaagattggcaagttttttagatgcataagcaaatagtgtagtacggcttgtaacactgttcaagataacttttttataatgagtatggtctttctctgccctgtctaatacaatgtgggttttgagcattggaaatgtggtaagtgcaactaaggaactgatatttaaattgtatttaagtttaatacatttaaatttaaagttacattttgataaattgctttgtttttcttttttctttctttctttcttcttctttttttttttgttttgttttttttgaaacaacaatctcactatgttgcctcccaggctggtatccaactcctgggctcaagcagtcctccttcctcggcctcccaaagtgctaggattataggcaggcaccaccatccccagctaaattgtttcttaaatgaaacttctgaatttgaggatacgtgattatgtggtgtagttttccctttctttccccccctgaaatccatattctgaagtacagtgatttatataaaagtaaaaagaaggagactgttttttttttttaaattctattaagaaaccaaattttaacagacacctcagggcctaaataaatatcaagttattgttatttgttatggttcttgttgcttgggtaaaactgtacagatcatgacttagttttccttgaatttttatcaaacaaatgaacaaaatgagcaaacaaaaatattaaaaatgatatttcctacgaatccaagggacatttttctgtatcagccaggctgatgctaaggtccttcaagcaaataagatcaaagatttctgattggagagtgtgggaataaagtagcccttgtttagtgctactttgtagagcctttgtttagagtacggctgggagggagggagagagggagaaaaatacggggttaatttgtaacaacacattctgtggtgtgcgtgtgtgtgtgtgtgtgtgtgtgtgtgtgtgtgtgagagagagagagagagagagagagagacagagagagagattaaattacatttaacttctttaaattttattgtcctcagggtttaaacagtatgtgaccaaaatcacattatttagtgaagagtttgtgggtaggtggatagttagatgggtataaatccctataaaatccattttagaactattgaggtttgagcaaatcaatgtcacctattcacttcatttgtctaatgcctccaggagccattaaagggcttgttacctaactttagggtaggtttagatcaaggtgaacagtcagaaaatattatccatgtactcacgtatattattaagtattctttgaccatggagttagatgcttatactgcaaacaaataaattaatgaataacagtgctgctcatgaacaccaaagtttactgaaaagtcaatatggttttagtgtggtaataagggcagagttctccaaggactgccaacctatttattgtacatcaaattttactgactttgaaatcttgctagaaatgttcatttacctcgtaatgtattatatgtttgaggtcttgagaaaaataacaaaatccatgtgtggtaatgaagtggttatgcaataaaactaacatacactgtgatttgacacaggggacttcactgttatcagatacttaaaactggaaacaatgtaggaaatatagatgtataagcatcgtaagtaaaatccacatgctttaaaaaggaaatccacttacttttaaagtaatattccgagagctatgccactgggggctgaatgtcataaaaatgatttgtaattagtcacttttacattgtatatggatttatagttttaaaatatctggtggcatataaccacaatgtatttttcagtcatatattcatcattattttattaaatttccagagggaaagaaaataaatgacctcctagtgagggatattttaccacgagaccagttgtaaaaataatcgagttttgtgcctgggaagatatctttgctaagtctagttctccagtgacattaatttattgttgttaagaaatgtgtgaggcaaaatgaactctccaaatatttcatactacgtgcattttatccaaaagaagataatggtttacatgaattatttaattggtattactaatttgggggaggtgatttttggttgggggcaacagaatatttgcctaaaatgcattcagagtgcgctgttatttagctattttcaaggtagagggatattggcattggagacttacacgtagccatacaatggccaacttcagtcaactacagaagcaatacagggcagcggctggaacaaaatagctactaggtaaatattgattgaattaattacacggatattaccactagtcctgcaattaattaatacctagccctgtctccagccccagaatccatgacatcaagctaactaacagaaaacatatcaagaattttattccttagtcctcttgactgaccctcaagagggtctaccctcttctactctgtattcctcacatcaaatttcactagtccagccgccaagtaacacctgttctgactgtgctagtgaacttggatattcacacatagcctaaaatgggaaacagagttggaaatgtcatgtataaggacataagcgttttcaaagtgtacaagaacataagcgtttttaggagatttaccttctcttttctgttttattagcgaatgattgattgttttgtatgattgttcatttaacaaatgctatatcatgtaagaaaagttactaacggtatataaagatgtaaaattcaattgtggctgtgtgtatgtgtgagtattctagcttttggggagagacaagagaagaaagaagacataagttggaagagaacagtaaaataaagaaaaaagtaataactgacggtgtctaatgaagtagcccaggtaattaatgctagagtttattagatagaatcattatttccttccagagggattaagcaatcttctctgaggaggtggaacttttattacccaaaacatgaaggattgggaagagttttatatgtgtcgataaggaaaagagatattttattgagggaaaagaagacattttaatggcagagtacacaatgtcagaggaacagaccaaaagaagtgctttgttattaggaagatttgaagaatggaagatagcgtcagattgttaagaaccattttttagataaaggcaggctaaagaagttggaggctattggaaatcagtcacacaattttaagcaagagaatcaatgagtggcagttttgaaaactgaatttgatagtggcaaggaaaatagggctctatcatcccacttactttcaaagttatgaagaaattgtagtaagctccagtcagtacctaaaggaatttattttgtgaaattgtgtaaacaaaaagcaaaccttcttttgcactcatatagtatattttctcaaagtcatatagctaaagggaatgagaggtaaaatagtacagtggttaacaggataggcttcaaagcctaacttcttgggttcaaatcctagcttggttaccatttcacagctatctgaccttgtacaagtcacatgcgtacactgggaacaataatactacctgtattatagagttgttattagatgttgttgatagatatgttgggcacattttaggcactacatacataaacctctttctatagaagtatacatgtgtacctatatttaaaataatgattttcttttttaaaagaagcacatattcattgcagaaaatttttttgaaattttaaaagtaaaatctctggtctaagtgcactaaaatgttttagactttagatatgaactacaaaaacctacctcatcgacacccaaccccactcccagagatatttcattttatttgcttgctatcagtaatgagaagacccaattcaccacacaatttctgttgtatgagactattgtattgcagtgcaagatagtgttttaaatctttgttaaatcaataggtgcaatattacacctccctgtttgaattttcctagtgaagtcaaacaattttaataggcctatacataggtcagttatagttctttcctaaatggtctattcctcattatcctttttaattgagtatttgtctttttttctactgatttgtgagaatgtttttatcttaagagtgtcaaaaagatgaattgtttttgcctttttctttggcttgtttgattttttatgtaaagaaattttatactgctatgaatgtaagtcattactttatggcttttaaattaaaattataagaatagcctcccatattttcattacttttatagttcaatttttttacatgtaacatttcattcatctggtatttagttaggaattgtgtgagataggattttaaaattaagttaaaattcaatcaagtctttattttttaagtacagaagtttccgaattcagcatttacattaaattttttgaaaataatgctaaaatatcatgtaaattattacttattggaattgaaaattccctattattatttttaatctttataacaacttatgttatctatgcttctattataaaataaatgacaagccaaccaaaatagagaagatgcttatcacaattatatcatgataatttaaacatgattttggattaatcataatccaaaaatgcatttgataagcattctaactgttcttctagtccccataaaattaacaaatggcaaacagtaatgttttaattttcaaaatattcatattaatattcattttcaaaatatgtttacttgcatgcatttcatttatattatttcttattgaagttgacttctcaatgtatattgctttaatgatactaagtattaagggtatagattgtactcacacaaataactattgaaaagcataagtttaaatagatccatttatcaaatgatgtctttttttttcttttttttttttttttttttttttttgtgagacggagtctcgctctgtcgcccaggcaggagtgcagtggcgcgatctcggctcactgcaaactccacctcctaagttcacaccattctcctgcctcagcctccagagtagctgggactacaggtgcccaccaccatgcccggctaattttttgtatttttagtagagacggggtttcaccgtgttagccaggatggtctcgatctcctgaccttatgatccgcccgcctcggcctccccaaagtgctgggattacaggcgtgagccaccgcgcccggcccagatgatgtcaattttgaaagatactggaaagtatgttttgggagggaagagggaaggaaagagtagaatatgaagtcagtaaaacctggatatttagtgccatctttgttacttactagtaaccttatgaatattatttatattgttgatccttaatatcctcacttgataattttagaaaatgttatgtacttcataggatcatgggtagaataagaaagtgaatataagtaaaatccatcatgaagtacctgaaatatgttgtaaacctaagttataatagtaattttattgttgctaatatttcagaggaatagccaccaaaccagtactacttattatttatttctatttaacatataaaacatataatattctttctgagtggtaactttgaaaagggacaaaaatattaaaaattacattaaaatcatgtataatttataatactcctttcaaggttactaaagtgtgcatgtatttctaatcattcacaaatatgaaaatctatgtgtaaatttttaaattttctaaaaaattgacaaataaaaattgtattattgtcatggtgtacaatgtgatattgtgaaatatcacatattgtgaaataaacattgcggaatgactaaatcaagctatagaacatattcattaccttacatacttattattttttgtggtaagaacacttaaaatctacttttagtaatttccaagtatacgttattgttactaacagtagtcaccctgagttacaacagataactaggatttattcctcctgtcaaactgaaattgtgtatcttttcatcaatatctcccaaatcaccccacccccaggatctaataaccaccatttttctctgtttctctgagtttgacatttttagatttcacatataagtgaaatcatacagtatttgcctttctttgcctagcttatttcacttgacatcatgtcttccagttcaatccgtgttgttgcaaatgacaggatttctttctttcctaaggctgaatagagttccattgtgtttatataccgcaatttctttaaccgttcatttattgatggacatttaggttgattccatatcttggctattgcaaatagtgccgcagtaaacatgagagggcagatatctcttcaaaatactgatttcagttcttttggatatatgcccagagataagattgctaaatcatatggtagttctatttttaatgttttgtggatcttccatactgttttccacaataattatactaatttacattcccatcaacattgtacaagggttctcttttctccacattctggccaacacttttcttttgtctttttgataatagtcattctaacaggtataagatgatatcttattttggctttgatttgcatttccctgctgattagtgaggttgatcatttttttttttcatatgcttgttagccatttgtatgtttgctttagagaaatatctattcatgtcctttgctgtgtgtcgatactgatatgtaaaatatgcatacaaaatcaaaaccataatttatttttaatatatttttaatatgtcattaatatttttcagtgtaataggatgtttttcataatatttactttaatggacgcaacatatttcattatgtaaaagcagtttattctatttggggagatttcgtttcactttttcgccagagtgacataattgaacattcttgtcataggtctctgtgtttatctctgatattcccctaggaaaattcatagaagtagcattttggagttgaagggaatgagtaatcttaaggcttttaaagtagttttatcaaattttctaaactgaagtataaagacacatagaaaagtacacaaatcataagaatagaaattcagggatttttaaaaaaaacttagtgtatccatgctactaccaccaagttcaagaattagaacattacctcaggagcccctctcatgttccctcccagttatgagcctctcccctgccaccaccctctcccaaagataagcactcttttgacttctaacacctagattagttttgactttgaaattactataaacagaatcatccagtatatgcccttgtatttgacatgtcctgctcaacattatttttgtgatattattctatgctattgcctgtgccatagttagtttagtttttctatgtatggtattctattgtgtgaatatgccacagtttatccattctgctaatcaatggacattgggctgtgtctattatggggctattaggaaaaatgctggtgtgatgttcctgtcctttgctgcatatatgtatatatttatttttaatatacgtggaagtacaatggctaggtcataagatgtgtacatttggctttggaatcaccaaaaaacagtttttcagtgtggtcatttcagttcattttcaccagcagtatataagacttctagttgatccacatattcatcaagagtatgtattttcaacctttatccttttaaccatttaggtgaatgtgaaatggtatttcattgtgttttaatttgcaatcacctgacgattagtgccatttttatatcctcttatgtgaagtcattatgcaaatcttttgcccattaaaaataatagttgtctttttcttactgatgtagaagttatttggatacaagtcctttgtcagatctatgcattgcgaatatctttttccaacctaaactttgctttatttttttctcttaacaatctttcctgataaatggagtttgatttatcagtcttttcctttatggctaatgctttttatgtcttgtttaaaaaataatacattaacctaaaattgttgagatttttttctatattttcttttgaaaactttatttttttgccttttacattgaggtctgcaaacaatctagaatttatgttttgtgtatgatgtggagagtcaaggttcatgtttttcaaatgactaatcagttaacttggtgctatttactgaaaagatcatccttttccaacttaagtgacaccatcgtataaattaggaaacgctatatagatgatttgttctcacttcaatcccacacaggcttaattataataaatattcatgtctggtggcaaacattcttaaacttcgtcgttcttcaaagttgccttggatattcttagccctttgcacttacatataaatcttaggattggcatgtcaatttctactaagaaatggttgctgcaattttgattgagattgcattgaatttatagattatttgaagagagggcagatatctttacagtattggactttctaattcatgaagaaggtagtcctctatttgtttacattttcttcactgtctcagtagtgtttgtagtttccagggtagaagcttaacttttcggtctgaattaccaaattactagcaacatatatagtcatgcatttcttaacaaatgagatatgttctgaaaaatgtgtcattaggtgattttgttgttgtataatcatagagtgtacttacacaaagatagatggtatagcctactgcacatccaggctatatggtacagcatattgctcctaggctacaaacctgtactgcatgtgactttactgaatactgtagtcaattgtcacacaacaatatttgtgtatctagacacagaaaatgtaccgtaaaaatacagtatacaaatgataaaaaatagtacagctgcatacggtatttaccatgaatggagcttgcaggactcaaagttgctctgggtgagtcggtgagtgagtggtagtggtgagcaaatgtgaaatctaagacattattgtacggtaccatacagtttacaaacactgtatagttaggctgcactaaatttatgaggacacatttttatcttttttttttttttttgtatttttagtagagatggggtttcaccgtgttagccaggatggtcccgatctcctgaccttgtgatccacccgcctcggcctcccaaagtgctgggattacaggcgtgagccaccgcgcctggcccatttattttcattaatgataagttaaccttagcttatagtaacttttttactttataaactttttttttaagtttttgactctgtaataacacttagcttaaaacatgaacacgttgaacacccgtacaaaaatattttatatccttattgtagcagctttcttatttttaatatttttgctgtttaagcttttctgttaaaaagtaaaacacaaacacgcacatgagcctaggcctacatgggtcaggatcatcaatatcactgtcttccacttccacatgctgtcccccactggaaggtcttcatgggcaatgaaacattcatgaaactatcatctcataggataacaatgccttcttttgaactaattaagaatatagtaaatacataaaccaataacagttgtttattatcattatcaagtattgcatactgtacatacttgtctgtgctgtatttttatataactggcagtgcagtaggtttgcttacaccagcatcaccacaaacgtgagagtaattcattgcactgtgacatcactaggtaataggaatttttcagctccattgtaatctcataggatcacagtcagtctgttgactgaaatgtggtgaatgactgtataatagggctccaaggaagatcataaaattgcttgttttccagaactttgacaaagaccttttacagaaactaatataatagataaataatagtataacattgctgttttcctttgcatttcattgattactaactgtctggattttttcttgtttattggctgtttacatttttgtcaatttctttttatgttctttatccagttttccagtagatttttcctttttttactcattaaaagatttttttatatgctaaaattattaccctgtgtctgatatatgctgcaaatattcccagttgtcatttgttttaattttgattagtggctttaatttataagtgaatacgcatattatattcaatctttttatattctttttttgcttctaaaaggcttccccacgccaatattttattccagttcttcttactatttttatgcttaacactttaatttttctaaaatgttttgtgttatgaaatccatcttaatatgtttatttctaaaacagacacttttgcttatcttaatattaaaacatatacatttgaaattaacattcagagattgaaagaataaggaaagtaatcttgtgtgaaattaggtcaagatgtgcttagatactaaattaacacataagggaattgaatgtgtttgttttctttcaccacagggaacatgttatatgaagagcatggttttataatacataaaaggattattagaaaaatgatgtattttaccggtcaggtgtttgtgtctatactttgatgtgaatgcaaaatagtaaatataaatgtaaattaatttaaaacacatagaatctgatacaaaccttaatctttttccacgttatacattactcacacctgttatatttttccgtgaagtatttggaatactctcgattcctggaaactgttttaaagtgcagaagagcacaaaaaaaatatgtgttaaaagttcttgatttccacccaaccattaagtgatattgccaaagaaaactcttcagagcatttttcactgatggctttagatatgttataccagaataataatgattcattattaaaatatgcaaagtgtaatttctcaacaacattttgtggtaggaagatgagctggtacagtagttttccttattaaataattttttacaaaagtaattgacatggtttggctgtgtccccacccaaatctcaccttgaattatggtaatccccacatgtcaagggtggagccaggtgcagataattgaatcatggaagaggatcccccatactgttctcctgataatcagtaagtttcacaagatctgatagttttataaatgtgagttcccctgagcaagctctcttccctgctgccatgtagaatgtgtttttgcttctcctttgccttctgccatgattgtgaggcccccccccgccatgtagaatggtgagtccattaaacctctttcctttataaatcacccagtctcagatatgtctttgttaacagtgtgagagcagactaatacagtaatgcatttacattgttcaaaatataaaaggtacagtaaaaaatatctcaccctacccatcatctgctctaccctcactgcacattaaccttaattctagaaacaaatctacaaaataaattcctgggaataaaatttccaggtcaaagtttacatgctttttatagatatggccaaactgccttccacaagaggtacacaaatgtatacttcccaccagccacgtagaagagtctgcattttcccacagccttggcagcatagtgtacctgcagacttgaatttttgccagtgcaatagatgaagctctaattttcatttctctcattattaccaaggctaagcttctgttcatgcttttaaaatcctttgtattttcttttctgtgaactgtccttatcttttgtccaattttcttttgggttgttggcctttttcttattactttgcagaaggtctttcatgtgttaggaaaattagtcccttagacatgagtcacaagcatttatttttcataattgttcatttgtttttgattttgcctatggctcttttggtcgtgcagaagcttttgattttttatatagtccagtttactgatatttttgtctgttaattaaagttatttaacttgaggatacaatttacatttttttgtggttgactactatagacatatactgcttcttacattgaaaaaataataatcctgaatttggaaattgtttttaacaaacttttggtgaaggtccatcatatttaggaacagagcttgtttgacccagaaatcaaaggtcagtgagaaggagcaatgtaaatagaaagttaaatagcatgaggtaaatgttatgatggtgggaaagacaagatctgagaggataaacctaaagcaacatcataattaagctgaaaatttcgtctcatgataagctatcatttcattattccagatattagtcaaatctgacccattacactgttttctgtcaggaattgttttacctctattacaaggaagggatagtatgggaggatgataaggaaaccagcagtcttagttaaatgttatacagatttctgtgcttatatatgaagcctaaatgaaacgtgaacaatttcatgatcagataaaaaggagttcatcgctcagttttagagattttaggaaaatatgatggctattatctcagtagcttcagagtctagaggcatttagatgttgttagttgaagctgtaaaacgctttttacatctacttgtgagtagaaaatgatccaataaaaataaaatgtttagttacctcctttaaaatgcttgaaaaataagttgaggacatcattagatcatgtattacagacgtaggagtatatttgtaacatcacctacatcacacatacctgtgtgcgcgcgtgcgtgcacacacacacacacacacacacacacaagagttcagcaccacaggtgtagttatggatgtgaactcacaaaacacaaatcaagcaaagagaacaatatctcaattcatgattcatggacattctgtgctatctgaaacacaatgcttcttttgcccaactctcacccacacagggaaaggctgccaggaatgagaggcaagaagtgtgcaggtcaccttcaacaggagccaccacctgtatttcccatcagtcttttacaccattgtagtcacgtggatccaaggactgtattccaactgacagctcctgcgatgaggtgcagttccacacgacaaagccaggcccaacatttcccattcatcttaaagttagtgtttccaaggaaacagtgctgtgggagcctagggtcagtcccagactgacctgcaacagcccaggctggatgttaatcctttgcttatacagtctcatgaatttttcacaacatatatacatgcatttacaagacgtttcactgtacatattgtttacgtatacaatcttgtttaaaattcatttttctgtacattaattgatttttttctcgacaactttctctttttcatctcctaactcttgcatccaattaaacaatgtactgttcattagtgacttattttaaaagtatctaaaacaattgttccaaagcatgtgacattgtttatgtgacacactggtatattatctagtttatttttaaaatcttctctattattattcataatatattattatggaacagatgtatattataaaattttattcatattgcagtgtaatattttgtattacagtggtattgttaatagtctcgtaaagagctatcattacaagtttaaattctttattctgggatgccagttttaactcttgatattctgaagaaaatagctttactcttgtttattctggctctgtttttttgttttgttttgttttgttttttgttttttttgttttttttttgtagagatgggagtgttgctatgttgtccaggctggcctcgaactcctgggctcaagcaatcctcctgcctcagcctcccaaagtgctgggattacaggcaagagctacagtgctcagcctatcctggctctttatttacatgtaagcttgagcaataatcactgctacttaataactttattgtcattcattatcatgcagagtattgctctaaggtatgttcagggatgacgttactgagtcctaacagtaatcctatgaagcaggtgctatcattgtccccaatctacagaggaggcattgagagttagagaaaacttggctaaaatgttaggcaagaactagaaccagaattgaaatccaagtggcctaactctagacctcacaatgcttaataccatgtcatgctgcttcctaacctatttaatgtttttttcaaccccaacgtcatcacccatgtgtgatagtgggatcataataatatctatgtcgtagcattgttggatggattaaggaagtctacaaatgtgaaacttccaaggatgatggttggcatatactgatctcttaataaaaataacctataatcattctgttacagtctactctaatccaaatgttctttttacttctcatctcaaccacctgcttctgtttactaggactcacaaactatagctcacaaaaacgcataacttaccaattttccttgtacatgaagggacttccttttacaatcttccatgacataaaagaaagctagaagcaagtatagtagaagaaatgattgctatacaaacaaaattatagttggtttggttttaattttaggatgcgcattgaataaaaatcactcatttgggatttagaagacctgtgttatatatctggtgctaatgctgaataacttggcttattcatttttataactgcaaaggaagcgcgtatggcatataatacacaacacaccagtatatttagtaactgagtgaataaatgaaagatgtatttctttactttatcagttgcagttggctatgcctttgtgtaaggtgtgtgttttgaaattccaaaaaggtattagtttctttaaagcaaagaatttttgtagcaggttaatgaataattttgaatacattggttaaatcccaacatgtaatatatgtaaataatcaatattatgctgctaaaataacacaaatcagtaagattctgtaatatttcatgataaataacttttgaaaatatatttttaaacattttggcttatgccttgagaattatttacctttttaaaatgtattttcctttcaggtttccagagctttacctgagaaacaaggagaaattgaagctcaaataaaagaccttgggcagcttgaaaaaaagcttgaagaccttgaagagcagttaaatcatctgctgctgtggttatctcctattaggaatcagttggaaatttataaccaaccaaaccaagaaggaccatttgacgttaaggtagggaactttttgctttaaatatttttgtcttttttaagaaaaatggcaatatcactgaattttctcatttggtatcattattaaagacaaaatattacttgttaaagtgtggtaaggaagactttattcaggataaccacaataggcacagggaccactgcaatggagtattacaggaggttggatagagagagattgggctcaactctaaatacagcacagtggaagtaggaatttatagccaaggagcagtgtaggagtcagtagatggaaaattattaagaggaaacatcaggggtaagtgggattctggctaaaccaacctcacaggattcttgctgaagataggccagggttatcttatcagacaacccttggggaatggtggagaatactgagggtgatcaggtaccaaggataaagggttcttgtaaaactgacaggcttctttgctgaacctggattttacaggggagtgcaaagatgagcccaggcgaaggttcagaagcctgactaaagtttagtcaagcagggaatctttgtcatcatcatcattgttgtcataatgataataattattattattttactagaatatgttgctttttcctcagcatttactagaaataaggtcttcattaaacttatgttactagaatgcctgcatcatatttgttactgtgattcattttctatccctgttttaattgtgcttaatacatattcatagattccttatccaaaattgaagttgtttatgagattaggttcctaaaatataatgtctgggctcttttgtagacattgtaaagccctctcagactgactacactttacctttctatcttctcattctgccagcaatctccccgtatagtctggccacatcaaattacctggtacctttccatccatgtaatttcatgtcatacctgtgatcttggttttctctcttctttaaatgacttctttcagtttattttgatataatgaattttcttccattctttaagaatgaattcaaagtcattgcgtcttccaagttttcttccgtaccccaagtagagttagaatccctgttaggatttcttataaacctttttattcatctcccattgttcatatgttgatttacacttaaattttatacacctgagtatttcattacacatctgcactgttctttgagtgcagagggcattctcttatttatctctgcttctccactcatatcatacacactcagcctaggatccagtaaatgatgcttacttgtgagtgtttttaagtcaatgaataaagacagtaccaagacacccagaatacgaatgagatactgcaggtaagcgtaaggcttcagacaatcctgccaattgaacaccactatctccttcttctagtgtccttgtaaatgctgattgatcttcttttctccctttcaaggaatctattccaaagattctttcaatatgctgccccgttttgcgtctccttatttgccaaaatctttaagtagccaatcaaataaaccgaatcgttgaaattacaatctattaatgaatgtattgttgggcaacttcagagtaaaaaggataagtaacatttttgagtagttttttcttttatttaattgactttaattgttaaatttatttactgtccagtattgtaaaaacctaacattttaatctccatttagctgttgttttgctggaactgagagcaaagggaaaaggaagtttgagaatattctagtgaagaggaagtaaaagtttcgggaagatgggcatgagtaacaaggagatagagggaagtttgctacaactaaaatgagttagattagcaaaatgttctcgactatgtttaccttacttcctcctgacacttatgtctaccattctgatagctactcctcaagagcagatggcactgtggaagtcacaagtagacatcatttcactagcacaaaactcagcctgctcagccagtggcacagtcttgggttcagtctgatgattaaatttacgagacataataggctttacccagtaacaaatttagttagctttaagaaattatacaggatgggtaacaacagcctgcacattaaaggcacagtggaagtcttgataccaagacgtggcttctgatgtcccatcaccctgaattttagtcatacatgatcacaaggggcaagactgggtgcgtacaaaacacatcatcgtctcagggaagccatcagttctaggatcctgaccatttctccacttagctagtacatattgtactcagaggtgtttgactagctcctattcaccagtacaattacatctcatgaatactgatttttcactgctcaataaacaaccccaacaagaaagtacagttacttggcccaatacacaataaccttagccaaattctcaattatcttatatccagtatattcttaaaaagtaactggcgtaatattgcgaagaggaaaggtcataaagtctttcctcccaaccagaaatagctttttgtagctcacggtaaaagcacattctactcttttaaatgcaatctttggttaaaatgtgcctctttattataatagtttaaaaaatactcaatgctagctatctctcttcctggaacacatttaagaaaagatttttttttgaatcccttggtacaaatagatcctgtttactcaatcaaaatgacttttgtcccagtctgtgccccccggaatggttttcaaataatgaaaacctgcattgtgtcttcgattgtctatggcccatagggctctgccaaatgggtccctgcagtttgaagtgaaagccatactcggctgtgttaatcacttttctttatcaaagctacaagtcaccactcactgctgtgtgtagtttctgagagtcatgatatttgcctcctgcagcttgttttaaatcactgaggggagagggagctgcttttttcctggcagaaaactccttggcttcagtcctctgagcacattccgagtttcttatctctggagtgcagacttcaaaaatactcttttagcctttttcttctgcttgtggctgtgttcaaggtggggggaggggaaacataaaatcatagatttgatgacttgagagtttctcccaaaaattctcaaacccccagcttataattaggaaatggtgacctgtgtgaataataatttaccttgttttttatccctctttgtctagcttccattcctttcactaataaatgatttattaagattgcacagtttttctgatttaagatataggatattagtccttacagcctgctgtattcctctgcttaaaggaattaaactatttttccattaaagaaagatgggacactagactttgctttacttagtttcaaactactgaacaccaaaaataaaatttttaaggagttttgagcacatgcccttttttttaacacaaggtaaaaaaaaaaaaacacctttactaaaatcttaagaaagagttaatgcaaaggaagtagatatacgaacagccacgcccctagctccaaatcctaaatgtaaagaaacttgccttgtctggccatggtggccatagctgcctcggaaacaaagggtctgaggccttgccattcgggtagtttgttttctctagtcaaactctgagcacacctgttagaaaaatatgtaataccctctctctgtgagcctcagttttgtctgcttggtacttcactcttattgatgaaatgcagctagctgtgtagtgaaacccagataaaaaaaagctttaagggctgtgttctaatacattgtttatgctggagtgaaaattgactgcacattgcttggtttgtgcaatttactcccgaaatattcctattcaggaaatcctgcaaatagcaatattcatcttgaaaatcacctcacagaacccttagcaagctgagaaacataatcaatgagatcgtgatgtagagggtgaaaattaggcgtaatcacagccctttcccatcagtcagcccactagaaggcatgcctttgaattttgattttcaaatatactctcaatttagacataaaatatgttgatttcagatttcagaaatgataattgaatgctaagatcccgggaccagtttagaatttctataaagggtcttatgtttttaacctttaatgaatgctttcaataatgagctagaggtatactatttatctgacataagactgactactgctttccaaactttttattaaaatatgaggtgtggcgggacacataattttatgttaaggcttagtgactgaaatactttcatcttaatcacagggagggggttttttcctcccctcaagaatcactttccttctgtggtttataaataaacatgacatgtggctctgctggctcttccttgcagtataaggagcataattgcccataatgtcaaatccacactaaaaactaccaaaggactcaattgtagtgactgaccattaaagtcactgaacactgtgtgtgttcacattgctgtgagtgttgtcaaagaaaaatagcactagacaacagacaagaaagactgtgttcaaaacttttgcaatagaggagacagattgaactcaattctgctgaaataaaaggcaggagagcctctaagtgctgagatgagttagtgagaaagtactagatatcaggagggaggttagtcaatgtgcttatttaggccatctgtgtttgctgattggcacttatcaaagttagattcctatcctcccaacagaagactagcagattggggcactatcttttttgatgattctatatcaaagtgctagctcccaagtccttgagaaagtttattcctgaggtataaaagtggcaagaggctaggagaatatttttgtctcaaaaaagtagagaaataatatataaagttttctagagtaaatgctctaagaaaaggaaggtcaggtctaaagtcaggaagaaatctgtctcaaatgtagtcaaactcagggtatttttaaagctttctttgtcaaccctccattttgttcaagggaaaccagttttcccattgaaaaacttaggaacgccagttcatctagttcatttcagcaggtttctgttgttgaaggactagctgaacgaactctgacacttggtagtaatcagacatttcatgaaggagatttccatgaaagttagaaggaagacgaagattaatggttgaagcagactgcaaactcagtttttgagtccagagggcagcaagtcaaaaagattcctagaagctgggctgtaggcattctcagatggtagagtgaggatggcagtagcaatccgatggatttcttggagcatggcacggaagaggttggagtttactgaactttttgcatggcctacaaagcagcagctccaggcatgaaagttgtctatacataatttgctgtggtggtgagtcctttgtagtttatagcaagtcatccagcttctgcttgcagggcttctttagatattgtggggaaatggcagctataagacaacctagagaagagagtccttatctcagtaataatatgggcagtcacgttttagttctcagtgtcaccaagtcaggatggtgggagaaaaatttgaaatgttaatttggagaatcgcagccagattgtaaaggaaataaactgaaaattggtaaggacggacaaaatgtgtaagacagcaggatccagatcaatttacaggtaggtaaaaaaaaaaaaaaaaaaatcatgtcgtttacaaagaaatgcaaaatagatcaaagacaatgaacaggactagaatctgataaccccaagggttactgaaactctatctctaccatcacccttttgatcagtgttaatcaaagtaagactttccttgtttataaaataagactggcctatttatttatataggggtagcaaaaatggtaatttaccaaataggctattttaagtgtgattagctggaagttttcatgaagaatcacaagctgaataagtttcagagatatactgtacagcatagtgcctatagttaacgatactgtactgtacaattagaaatttgctgagggcagagtttaagtgttcttaccacaaaatactactactctcttttaggagcagtggtacataaggtgagaggaaacttttggaggtaacgcataggtttatggcatagattgtggtattggttttgtatatatactttatctccaaactcatcaagttctatgcattaaatatgtacagctttctgtttgtcaatcatacctcaataaagtagtttaaaaaatatgaaacctcagatttgattttttaaaagtctccaaagtttaggaaggcaagtcaagaacttgacatcagattttacctgaagtaaaatacctatagattcagctgaagtgttctgttttccaggttcctaaaatacccttggtttcctgggtctcctaagaatagaccttccttactcagttgtaagattgggaattctgtaagccaggtaccgggacagttttcccaaaaggggcttatattagctccatatagtcaagagtagctccttaaaactggtcacatctgactctatgcacttaattctcaaatatgacattccagtcaaagccttggttatatatttttttcaattatgtcttgttacctaaatatatttattgagcctatgcaaataattatattgccatgaaaataagaatactcggtaagaatttctgaattttacagggatcaggcagggataaaaagattaatgtttcattctgtttacaaaagcatactctaaattctcatgagttatagataacttaagagaaaaaggaaaggcgtttcttgtatttagcaaacagaacattaaaacatgaggaatattttaaacaaaagccataatcaaatcttttatcagttcattcaggcccatgtagttaattcttgtcttgcttgatcttgagttagtagtttcatgaactcatcagcttcttcacagagtttcataaatcctgactttgtccaatggtataatctcgaagttatttaagcaatggcatcagaagtctgtgtcccagagtacctgtcgtagtacttcctatgggtctcaaagatggtcctgttttactgaagatgatgcattctgacctctaactgattgtaagagcactcagggaagcatcagcataaaccaaaaactatctgtgaacgacaaaagacttaaaatggccataattaaagatctgattcattcgacaagaaattttttttttccctggtgccatgccacattttaaaataacaactggagttaggactgatgacataatattattatcggataaagtagcaccaggatgtgtcatggacacctagagcacctagagcactaacaaagttctaaggatttattataatttttcaagtatttatactaataatagttgacccatacaactataacctagtcaaggttcagcatctcttcttgtcaaagctttttatgcaactcaacataccaaatgaacctagttatttttaacatccttcattttacaagggtgcaggaacaaatcctttgaaatttttcaaaccaatctgagattaaaaaaaattttatttaagaattgacctgggaaaagcaaaatatcaaaggttgtaaaatgacaaaaggtttgaatacttggctgaataggatcattgctcactatgaaagaatgcatggctacctatgtaaccaagatgacaataaaagatttcaaaaataaatgtagaaggccacatgacggtaaaagtttttagttctttccaaagagaaaacactactttctaaaaaaattcaaggacatacaaaatcaacacaggtacttattctgataagaaacaatatttgtttcctatacagattacccaaaatataaaaaaaaaaacaaattttgcaatctcttattaagagaagaccaatagaaaagatgaaaatgttaattagtttgaccgaaataattgttttgcaattttgtgtgtgcgtatatatatatatatatatcaaaatatgttgcatacttaagtatattcaattttatttcaaaagagcagaccaataatccaagaatattttatcattttttaacaaaaagaaactacaactcatttttgatcaatacactgttgatactaagggtcatttgtaagagtttacatacacataaatccattccgttttagccagcattggctattaacataagactctccttccacaaatcttctgccatttccaatgttcattcagattttgtcctataccttcctcttcctcattttcacagtcattttaatttaggacaaagttattctctttttccttaacaaaaacacatccaacataccttgtatattttgcatacaaagttgtttccctttacccctaatgtttctggaagttttatttacatatattgattatatttttaaccattagtaagtcttattttatagagaaaactaggaattagctaagtgtgaactgtttgtcatataccagtatttcatagccaactagcaaagcttatgaatacaagttaaattcacctactcaatatgagggctaaaagtttacatcaatatttgtggaggagccttttaagattttcttttgccctgatatgtaatttatggaggctgtgttctaaaatttgagtaaatgactgaggagatacctagtggccatctgggtatctccaaatcccatctgaacgtacacggtatccagtctgtttccaattagctttttcaacctcaggtggttgcttctggggtttgagttttccagagcccccagtagtggcagggagcataacgctttagagaccatagagagttgagagactggagtaggaagagaaaggtctgtcatggatggacaaagagatggagcaggtacgggtttgaagaggaatatgctgaaggatttaagggagctaaagggaagatcaaaagtagtcaaaggaagaaggaggaatggtggtgatgggaagggagaggtcttagatgagccagcttagggagtgcttatgttttcggaagaggccattgaagttcatctttagtaaaaatcaaactaacaagaagagaagcctagtttgtgccatagaggtgaagcatctaatcagcagtagtcttcagaggaggagaaacagaatagtgagaatgtctcctggaggaaagaggcaccgaaggaacagcaacaacaaaaaaaggaaacatgaatgaggtctctacaaacgtgatctgtacagaaaatgatttctctaaatactgaaaatctgaagttgaaccaaatgagatttcaataagaattttccatgttctaaaccaatgatgcttttcaaacaaagaagcctgggactctagactcaagaatatactcagattactgagaatcaaaatctgatgttaccatgcttccacgctttcgtgggtaaggagtcagacttaccaatggattcccaattaatcagtcaggagtgtactcaacattcacaaaattagctttgcagaggttaatgtcattaaattcactttagaatggataattcaaattcaaatagtaactcccttagatagatgtgtactagctcaagttcacctgttatctgatttcatttttaaaaaaaattttttaaaagtggtgttcgggaggtaaggaacaaggaagagacctttagaaaaaagtttcagtgttttatattggatatgaaaatatcagtggaatgtgtcctgaaaaacactggatgacagttactggacaaaaagacaaattattcccttttaccatgcaactgaacacagatttattgaatgtttttctcctgagtttaggttgcctctgggcaagagtataattctggcttgataacaccttgaagcgtgtttgtttaagtttgtggatagtttcatctattagtggaattaggcatctgcttctctttatgaacactgggtaccataatcttcctcttactttttgttttttctactcaactccaaaaaccattgctgagttgaagtagaataataaggggaaagaaacaaaagactaagtttgaatcccagtgctgacacttactggctttacgatattgtttaactcacttaccctttttaacctgaccttcttcttcactaaaaatgaaaaattgagtgaatttccctgggactctgttagataaggcaaaactaagatgggaacacatttcctaaggcgtagaaaaagacagtgaatgggacctttcttgttgtatcaggagttatggtaagaggtactaacaataaaaattaggctttcagccaggcatggtagctcacgtctgtaaccctaggactttgggaggccaaagcaggtggattgcctgagcttgggagtttgagatcagcctgggcaatatagcaaaaccccatctctactaaaaatagaaaaaattagccaggcatggtggcacgcacctgtagtcccagctacctgggaggctgaggcatgagaattgcttgaacccaggaggcggaggttgcagtgagccaagatcacaccactgcactccggcatggggaatagagcaagacttctttaaaaaaaaaaaaaaaaaaaaaaaaggccttcaaaatacccctacagcagcaagttggtaccagaaaaacactccaaaaaagggagtagatggtcatgagattttcatcgttcaccaacctaacttgcccatataaggaaaaggataaacttgagaacagtttcttgaatgagaattcctggaacagatcattcaaataggactaacaatttgttggacatgagaaaacttctatgacttttactgttccctttcttatgagggaggggagaagagtgcttttcctctttgccaagccaaggaagagggcttcaaagaacctctattatagtggcattcagaccattgtatttataaaaaataaaaatattttagaaaattgaatatctgcttgcacattttaaagatgacatctattttctgcccttgggatacagtaaatattgacattttaaaagggtttatagtacagtttagaatgtatcccgtggaatccaaataccattgcaatataatgtctaccatcatatacttaaaaatacatgaaaaagctcatatttaataaatagaagttttatattattcctttttatttaaatcatatttttcaacttccccaatgaattgtattctaatgtgataaatatgtgatacatatttatgctataaagttttattagccactctatcataattctttataaaattatatttatgtggacttaaattcaatttttaaaaacaatttcctgtgactacaaggctctaagtatttttaaaattctctagattgagtagtatttaaagtattaataataaatacacttagtaataaccaaataacctaaatatatgtaccttttgataaataattattaaacatactcagtggatagttattgaaaatgaatctattatgagatggatgggtatttgatggtaccttgagtaaagaaggatttcagtcgctaatattttgaattgtacttttatttggcataaatgtatcttgactacaatgcaccagtgggataggtcagagaggtgtgcttttattttgtaaagcggaagaaagtctgtcattaaccaaaaagtgggcaagaaaattggaatgaagtgcctaccacaggaacaaatccagtcaaatcttttttttgtttgtttgtttgagacggagtcttgctcagtcgcccaggctggagtgcagtggcgtgatctcagctcactgcaagctccgcctcctgggttcacgccattctcctgcgtcatcctcccgagcagctgggactacaggcgcccgccaccacgcccggctaattttgtgtatttttagtagaggcggggtttcaccatgttagccaggatggtctcgatctcctgacctcatgatctgcccgcctcggcctcccagagtgctgggattacaggcgtgagccacctcacccggccgcaacatgctgttttaatgagcgcctgggtgcgggcagcctcaggcctaaaatggcgttagccccaagtgaggactggacaaaggttttatagtctcctgtaaacaggaagtctcctggcctgacgtaactgctgcattgtacccggatggcctctttctcgatcttcagaggtacttgtcttctggccggctctcttcctgcttctgctatttcgccggtgcatgctgctcaggcaagtagccttgtgccttaggaatgggcctgagaaaggaggagttactcatctccttaagctttcaggcccgggagagaatcttacaacccactgatgagttatgaaatccatttaatgggtaaaataaaatagaataagatagcatagggtaccaaagaatataacgcaggttattacattgtgttacgtgtggtatgcttaagtgttgttttctggaactgttgttatcatttgtattgtacttcatttttgtttcgaattttaagataatctgcacagttttatagaaaatgagttaattagtactgtatcagtgatgtcatactgggttaattattacaaagttgggggtaaatttatccctgtataacagactttaaagataatataaataggccaggcgcaatggctcacacctgtactcccagcactttgggaggctgaggcaggtggatcacgaggtcaggagttccagaccagcctggccaaggtgatgaaaccccgtctccactaaaaatacaaaaattagctgggcatggtggtgagtgcctctaatcccagctactcgggaggctgaggcaggagaatcccttgaacctggaggcggaggttgcagtgagccgagattgcaccactgcactctagcctgggtgacagagcaagactccatctttaataataataataataattttgtttatttattgaatagatactttcttccagtacaaaattcaaaagcattgaaatcctctgttgcattgttgtctttcagccacacagtttctctccccatgtgctgccaaggttttcagtttcctgggtagccttccaagaataggatgtaggtgtgtgtgtgtgtgtgtgtgtgtgtgtgtatattattttctactcttgtcctcttaaaataaagccagctgttagaatactataaatactgtttctgcatccttcaaaagatggttcttttgaagcccttttccttggcttggcgagggcagaaggaaaagcactcttcttcctccttcataagaaaggaaagactaaaatgcctgtgtgtgtgtgtgtgtgtgtgtgtgtgtgtgtgtatagcactcttctccctcccttataagaaagggaagagtaaaatgctgtgtgtgtgtgtgtatatatatacacacacacacacacacacacacacacaggtgattattttctgtattagtagttaaagaactgtctctttttttttttttttacagttgcatactattctgttctaaggatataccataattcacttaagcagcactccaattagtgagcctttagtttgtttcgacttttggctaagataagaaaatgtataactttgtgcacatcattttacacgttgcaaatatatctatgtgataaattcctagccgtcgaatggctgcgtcaaactggcatttgtcttgttagtacattttgccaaattgctcttcatagaacatctcgtcagtattaggaaaggtttcttttccccatacccgtgcccactcagtgtgttatcaacctttttgatcttctaaacaagaaaaatggtgatatctgtcattttaatttgaattctttattcattttgtgagtgaatttgaattttttcatgtgttgcagaatcatttttatttccttttctatgcactgtttgctacttttttgttttttgccaatgttctcttttgggttattggtctctttcttactaaggcaaatatagtttacaacttgaagtaaaaacatggttttctatgataaaggttttaatgaatgttttctacaacagacagattctagtcttaaggttataacctgaaaacatcaaaactaacctttgaattgcataggaatggtctttgctcttcttagccatcaatcctggacagaagttcaacatgatgacaaattgtagcacaagtagagatttaaaaaatttttaactaatatgtaaatatttgctttcattttcttatttatctaacaatacattgatggctagaacagggtttgtctttgcaaagagcctgtgtcaactgactcccattctttcaaaatacattacctaaagaaggtttgtggcttctctttgcattgcattttctagccaaatctgaaataactatctggaagcttaacattttattcccacacttatttttccttgtgaaaatcaaaactgcactttcccagtcttcatgagtaaccacaatggtttgccatttgacttgccagttgtattagcatactgagatgtaatttatctgcatcaagagagttaattctgagcagctgggggctttctaatctctttacccatcttggacaccagttccctctcactgctatttgttttattctttgcagttagaataccattcctcttgacatacaagaaacaaacccaatagaaattaaaaggttccaatttctattttccattcaccaatattataccattttctcctaaagcagttctactctctcctagatcattctcttgcttttgaaataaaccttaaaaagtcattttgtcaccctaaatatgtttatactttcttgaaataatgcttttactgcatattagaattttagtttttacttagcagtccttcactactcctttagaaggaaatttagataatactttgaaggaagttatgagagaacgtcagaagccatgctatcagttttttttttttatgtactctaaagaaaactctgctctgcccatgggtgtcatctctttctgattctgtgtggaggagaaaaatgggaacacttccaatcattttcaaacaatttctgcttaagtggatgaatggaccacctggtttactaactataatgcccaggggatggctttgattggcagacagaacgcggtgcagaaacaatggaagttaaatgaggaaggttttaaacttgcaagttacctcccttggtggcattgactgttggtagaaaataacacgttgggatttcagatacattcagacatgctctgcacttgcaatttgcaatacttaaaacaacacaattcttctaatcataactttttaaaaaatttggccacctttctccattgtctcataaagctatattcatgaagctgtttattcacaaagtcgtatcatttaaagataagtgttatatccataagtatgtaaatgaattaaaatctgggaggctaacacttatccattccttattctactatatcctatctagagccatgcttcttaaaatttaatgtgaaactgttatttctggtctgtggaaccacagtttgaaaagcactgtcatagattcttaagtagatacattttcatgcatacaataaatatgcaggagaagttaaatgggtatgtccgggagtcaaatattgattctcagaatgaaaacttcttcatttatttctcagtgatcttcataaccctttcccatactgggcagtgagaaaaaattatcatctcactctgaaatagtgatttcaccagtctctttttatgggttgggacctcatggataatgaccagtcttttagatttccttgctctcctcctgctcctctccaaaatggcagctgggttgacagatgaggaagcattatacatgacctgagatctctatgcaggtacttgcagtctcctctgaccctctgctctctggaacagtgcctcttgtctgcctgataagtctctaccctgctgaccttgtggctctgagcttgtattttcatcaggaaatacggttctctgctgactatatcagttactaaagggattcttaaatctctgagttactgctgaagaacacttagaattctaaatttgtaattatgatacctctaaaaacaagcgtgattatccattatgtataaggatgccttccaaaaagttggagcaacttgaagccacttgttacattgtcatttagtggaggagggagtgaacttggtgtttacaggtagaactctctatcaggtgctgtgaggaaaaacaaaagcaagataaactgtggccataatctttgttactttatttcccaatggggagaaaaagacaaatatatatatttgtcaaaactgaacagatgttatttgaacattatactgtatatgccattataactataatgtatataatacatatatataaattattgaacactaaaaagaacactttaagaattatctattttattttttttattatactttaagttttagcattaggagaagtatctattttaaataaagctatttcactcttcagtttccatctcaagaactcataccaatttaaacttccactcatatttgagagttgagaaaaattaccaaatgataataatatattatctaaaaaataatttaaagatgcatgtctctaacaaaactatgtaacattctgaagggttttaagtaatacttcatatatcctaattcagaataaacttagatgttatcagtatgaaaatatatcataaagtaacatgattctctccaatgaagatgtaatcatccaaactttatgcgttgaatttacggcttagaaatgccatagcaatatgtcctcttgaatatacaattctatatactgagatttcacttagtatattaagttctgtatcactgaagagtatattatgattctaattaacaaatacaattctattttatataagtacccctatcatctactaggcaaagttagctgatgttactatgcatttttttgtcagctgtactcaacttataataactttgtattccaaatacttcaaaattgccatatgcttactgttttcctattcacatcattttcccccctattcttcctgaccctcctttgagcaatagtgtcagtgggattagactcatgcattcacatactgaatgaatgaatcagtatgtgattcatgatatagaaaatttaaattccttatatatttcatatatcatatatatgatatatgtatctgtgcatataggggatattaaacacttctctgtatatatctgacatatattttgaaaaggaaacaccgtagggccaagttaactgcttcaattattacttagtgtaaatgcattcagtttgttctgtaatttcaaaatgatacatataaaaaagtagagtttgcatgtttaatacatctgaagctacagtttccaaattctgaacactttggtgacccccttgacacaatgaatatttggcagttaccgaacataacagggcacaaataatatagttaatgaaaacatccataattatttaaattaggctattttaagaaaagttttaatttgaacattaaacagcttaaaatcatttataataattgattatgtaacatgctggtcattaaaatgagattggtattctctttttttttttttttttttttttttttttccgaggtggagtcttgctccatcacccaggctggagtgcagtgctgcgatctcagctcactgcagcctccgcctcctgggttcaagggattctcctgcctcagactgccaagtagctaggattactggtgcccaccaccacacccggctaatttttgtatttttagtagagacagggtttcaccatgttgaccaggctggtctcaaactcctgacctcaagtgatccgtcagcctcagcatccgaaagtgctgggattacaggcgtgagccaccatgcctggccaagattggtattcttgacattaataattttggtaagcattaagaaggcaaaacatggaagcactcacaataatgtataggatccaagtaaaattctccttactgaaacatgaaactacaaagccatgtgcgcatacttttaatttttaagatttgtttgaaggaacttttgtgaatgacaagtagagaaagtgtggatagatagcatctctgtctttaaaattatttgatgaaataggtgataagaaacacaaaaattaataattcatgtgacctttattacaatacgtcttctggtattagcatagtaataagtattagtgatttacataattggagagataacacaaatacaaattatgcacacacacatacatacatacacgttcctgtgcttcactcaaaactgaacagatgttatttggacattgtactgtgtatgccattgtaactaaagtccaatttgttagagatagtattgttattttattatctttagtatcttcaatgagtccattatgaatagtagcattaactttgcttatgactagcttaaatagaactttggactccataaaaatacgaacaaagatttttaatggctttagaatacagaagtaatctggtaaaagtattcttgattttaatagaaaccaaacaatcaatgtgcccgttagattaacagtgaataatcagattgttccagctcttcactaatgaacaatgctgaaacaacattctctgtaggtctcctcagatagacatatgagaacacctagaagtggaattgttacctcattagagtattcacatttttaattttatcatatattgcaaattgcttttccaccagcagcaagaagtggcaggaatttattattttaatttgcatatccctggttgaacaagttttcaagtttgttggacagatttttccttctgtgagttgactcttcatatatttaccccaattttccgttggattgtttactttctcttaccgattaatatgagttgtctgtatattctagattctagtagagttctggattatatgcacctaatatataagtctacaattccttatccaaaatcttatcgttgacttttcaggagactagtgaaaatggctacttagtggaacatatggaaatcatgagttataagtgtataaaggctaagtgcaacagtctaaagacctggtatcacagatgaagactgacatattgagtaaaccaggaattggctttattacataatgtgtcctttttcttgatttcagaaacccatatatttgctgtttcctgtacatgtttaggaagagtattcagaagagagaatgcagatatattgttgctgtttttttttaaaaaaatacgagtttaattcaattacccatttgattgcttgagtttattagttatggtagcacttagaaagagttgttttagataatgactatgattttggtacagaacctaatagtaaaaacaaaacatctttaattttatttaaagtgcatgtcagtcatgaagtcagaattgaattgctcttttctttgcttttaatgaaaattagcctaatggctgttttatctttaaaaagcaacttctagtgtttaataataacagatttaagtaaatattctgttaagacttaaagaaccatgtccaattactatatggataataacttagagatgctctatattggtttaaaataatgcaaatatcactggccactattcagagatatgtcaaaatcacttttgtttaatatgtgcctttctagtccttagatctactgtattccctaatccttttggggtatataatccagagatattaggacccattcagccagaaactgaaacatgccatgatggttagaattcatcagaaccacactcaaatgaatgttaagagacatagcgtgataaaagtgcatctgaaagagtatatgaacagatgacattacatacaatgttgtatataagagaaaggaaggaaagacattcatatcatgtcatattaattcatgtacactgaaaatacagaccgtgaacagacattctttcatttgttccttcatgtattcaataatagaatgcttctctaccacagatgattccaggggaatttggcaattgctggagatatttgtggttgtcacacatgggggaggagaaagtgctactggcatcttgtgcatagtgaccaggcatgctgcaaaacaccctgcagtacacagggtagctcccgacaagaaataattatccagtcccaaatggcaatagggctgaagctgagaaaccctgattgaaactcacattacatcctaatcgaaactactttgttccgttctgagccgtaggattcatcaaataaaacctactttttattggtacaatatttaaatccagagaccctgtagcatagtaattatgtatgcaggatttgcctcagaaagactagggttcaaatctcagattcaccatatgttaggttgtgccctaggcaagtttctgacctttcgtgactctagttttttaatctgaaaaaatggtaatagtattgctgagaggctctgcaatggagattgagattaattaagatgatttatgttaagtgcatagcagagtgtttgcacttagtcagtttccaacaaatggtagcagtattacctttacatgtactaaatcatttcatcctgacctactatgaaaagcctgatcactttccatattttactgtttttaagataccattgattagagtatgcattgttattttatttttcaccaagaaaaatgtgctgccgttttagactatgacacgctatcatttataaaacgtgtcccaatttcagagcagctaacctgttgaaataaaatgtgagtcttataattgattattgtaaaacacaacagtaagtcttctttgattaggtgcaactgaacaatactatgaccacattcagtagcaaaggcacttagaaggatataggaatatagcttagcaggaaggtagcatcgggtatctctctttagtaggatgagtatgcgtagcaatctctgaagcacccagggagccatccaagagctattcactttgcagcacctgtccactctctcatgacatctcaggtgcacaggaaggaaacaaatcgagatgctgggtcaaccctggcctagaagccttatgcatcccagaggccaatgccttgtaacatagtttccaaggtcctcaaaaaggacatgcttagttacaagaattgttgtacttggggacgccccacaattatggttttccattaggtatttatagttcatatgtagaacacctaaccaaggtgtaatttaccagtccccatcatttttttttttaatctgaagcaatgttgcctgctcacacatttgacattccaactttatcagttttctagggagaagggagctagaaagttgatcaaagtacaaattctcatacagatggacaaagggtgtttttaaccctttactcacagtaatatctgttagtttcatttattttatatttaaagatactgaaacctgaaacttagagcagttaaatgacttgccccaactcatgggctaataagcctagaacccagatgttcttatttctagactgattatttccaacaacactgtaatatcctaaagcaagagtcagcaaactatggtccaagggccacatttagtcctccacctattttcagaaataaagagttattggaacacagccacatttatttgttcatgtattagacctgactactttcatgccacattggcagaatttgagtttggcccacaaagtctaaaatatttactatatggtgttttatagaaaatgtttgctaacctctgctctaaagtataattacaaattggccaggtgcagtggctcacacctgtaatcccagcactttgagaggccgaaatgggtggatcacttgaggccaggagttcgagacgagcctggccaacatggcaaaaccccgtctgtactaaaaacacaaaaattagccaggcttggtggtgcatgcctgtaatctcagctactctggaggctgaggcacaagaaccgcttgagctggggaggcagaggttgcagtgagccgagatcatgccactgcactccagcctgggcgacagagcgagactgtgtcaaaatagtaaataaataaacaaataaattctaattataaattgtttaactctttctatgagtctatataaggagtttatagaaaagcatttgtttctaatgtttgattattaaaaatacccctgtattttttattttattttaattgacaaataataagtacatatatttatgaggtacaatgtgatgttttgatatatgtttacattgtggaataattatgcatacttgaaggattttagagccacagagcctgaacctaaccgtttctctacatcagtgttggccaacttttttctttaaaaggccaaatagaaaaatttcagtcagtttttgaggcttcatgggccatttggtctctgttggaaatagtcaattcatgctaggattggaacctagataaccagactcaagagcccatactcttcaccagtaaggacttaggaaggcagcaagacctgggagtaccagtttaaatgaatgttcttctaagcagtgtcctgtgctgctattaaaccagaccagagctttggcccttagttaagaactgtatgtataaagttttccaaaataatggcttcaggttttcacaaagtccttccatccaaacaatgcagattgtacccccttaagaatctgttcttaactgccatctgttctctgcattcttaaagtctaatcttaatacagcagccagaatgatctgtttaaaaataagtcagatcacatcactcctctgctgaaaactctcctatgcttcctaatctcactcaggataacagccaagatccttccaaagatgcaggacctatcctcctccatccccaactctatgactatcattcctactactctccccttgctcactagattccactcaccctggtgtccttttttttttaattgaacatacacatacactcctgccccagggcctttgcacttgctgtctctgcacagattgttctttcctgagatagctacttgaatcgttccctcacttccttcagatctttatttaaataccacctactcagtgaggctttccctgcaggcactttctaaactctccacatgccacctccctttgccccatacctaagtctcttattcctatccagtgctttacattttgttctttagcacttttcactctccaaagcaccttaatttctcttttactacacattatcaccattagaatgtaagttttatgaggacacaaaaagtttgtctgttttattcgctgttacatatctagtacctcaaacaatgtttagcagacaataagtaatctgtcaatatttatggaatgactcaagtgattttttggaagagttttggtaatatttcatttgccaaaagaattctgccaaaaagactttgaaacccccactttaaggtggagagcttccatagaggcttctggatgttacttgatggtcacacctatgcccactctttcactggccttgaacatttcaagtatgcagcttagtagattatatcttcacagtttcacaacactttccagtttaaaaatcaatgctgcattatgctttgtatatttggacagattatttttgaaatccataaatctctaagttttttttttttaagtctccctttggtgagctgcccttgattagttcaaaatgggaagagagaacctgtcattctttgtcaatcaggttggcacgtacttgacagcatgcagttatagtgaaagagagctgtgttgcagtggtctagcaaacctaattgtagttaagtaaaagaacagtcacccaacatgagaggaaagacaaagaaactcaactgaacaatgttgtgtttttccatccatcagccttcatttgtcagagtctgactgacaatctggactgcagaaatcaggctctaacacaatattgattccatttcatattttgtttcttgctacactttttagcaaacagtttctgtatggaatgagagatagtgcagtcaatatatgcgaccagggcacatttatattaaaggcttactttggtttttttgtcccagaaatcacatattgtttgtttgttttactataatattgtaattgtcagctcttgctgcagtaacaaacaatgacaaaattccagtgacatataacaacaaacatttattactcactcatgtgtctgcagatcagctgcagctttactccacactatgaatcaagttaaggtcttttcattctagaatatggatctgctctaaatgtcttctcatcccaggaccctagcggaaagagcagcttttatatggcatattattctctcatgatggaagataagaacaaggggaaccagcaaatcttgaactgcctttaaagttccagctaagagctgccacacagtcccttctgtctgtccatggtctattggtcaaaggtacacagtcaagcccaaagtcaatgggaagggaagtatattcactgcagggcagccatattaagagaggaaatgaataataatgaactgacaaatcaaccatagtatccacaaatgtcttaggatttcattgattcccaaatgcattttttagtatttcaacacctctgaacttgagatatatcgtacaatagataatgtttacaaagtgtaggtttttttgttttttggctttcttagtttacataacaatagtggcccttatcatcaatgatagattagatagaaaaactgttaattgtggggttgacaaaatagccaaatggtagaaggcactccttataagtaagtaagttatgagtgggagctaagtgatgagaacacatggacacatacaggggaacaacacacaatggggcctatcagagggtggaggttgggcggagggagagaaccagaaaaaataactaatgggtactaggcttaatatctgggtgacaacataatctgtacaacaggccctcatgacacaagtttacctatgtaacaaacttgcacgtgtacttaaaataaaagttaaaaaaaattaagtgaatggacacttaatgtttacaaaaaagttgtcatttttatcttgaatttcttttttctgtagcaatatttatatctcattcagatcagcttatttgattagaaaaccaagcattaatagtagatcttatgtctatttattcacatattcatataccttcatttataaatatatattcatatatatttagaagatcaattggaaaacataagtgccattcccttatttaaaactcttgtagcttctccactacagttctgagggtggtatacaagatccttcttttctctggcttttgctttctatttctactccattacttcccattcccctacgtgatagctccgtacttcttctgcttcctgtctttgcatgttccatgttccctcttggaatacattctctctgccgtccatccccttataatgaggtgcatgagctgtttctgctcccagcctttctgtcctgaccttcttgtctatcaaacacaaaagtgatcagttcctgctctgtgctccattatacattgcactttactagttgttatacctgacctgctctaaatgtagtatatatttgtgtgtctgcactccccattcctaccccagtgaaacatagtaagcactgaataaatgtttgtcgaatgagcaaataaataaataaataaataaataaatgtttgaacatacatggaaaggttgtttatgtcctccttataatgtgctttgagatatatattcttaatatatatataatcatatattctaaggttattagtaggtaaaatgaaaatttaaagaaattgagtacaagaaaggaaaacaaggaagaattttttcctttttgtactatttctaagaacaccaaatttctagttaaacacacgcacacacaatcggcatgatgtagaattagaaatatgttgaataaatcaattattagaaaatgtaaatatatattaatttgcctctgacttgctacttttaccctcaagggttttttttttctacctcttttcatcactaatctttgcttcactgcttgtcagatcagcaactgcccattattagtaatgccatttaataagagataaataaaagtaaaggtgcttagagttactccatttcaaaaacctatcagggctggatttcagaagagaccatgaaattctcctactgttattgaaccattactccctattacctaattaatacaagttattttcttaaaattatacctgacattgtagtgaactatcaatactatgaagaaaatcaaactctcctcgtatcataaggatcttaacacctggtacacaatcttgcattggaggggacattaagaataaggcatggaggaaaaaaaaaccttaatggaaatgttctgttattagaaatgagactttttggtggaaatcccatgacgactttcttgtctgaatgttctttgaagttgaacactttctccttacacaagccggccactataattagctatgtttccattttagtggtggccttcttcaccttatctgaaatcatataaagatgtgaggccatttgcgagataaaaggtttgctcaaaccagttctctgacctggatatcagaggtttggcaatcataaacccactaagagaaaccctcagagctattacaaggctatgtaaaactttatttcattttttgtgagaagggacaggattttctctcatttatattctggaagaatattgtagaatgtatttgagttcaagaggaggagaaataattaacataatattaagaaacgtcaattttggaaagaaataataagcatatatgcacatgtgcgtgtatgcacacacacacacagtatacacaacagattcagaaagaaggaaatagagatttggtgacacatacttcctggatataatctcaactctgccatttgcaagccacatggtcttggataattgacctaatctctctcaattgcagcatctgtgaaattagataaaactttctttgtaggagtgtatgtgtgtatgaaaagcacagtgtttgacatataataaatgttttagcaactgtagcttgttaatattatcacagcagttaatatcactatagcagttagttgccattttcagcacagctaataattttagtagcattttctgatctttccatctcatgtggtttctttggagttgtttcttgctttgttttttagcttttctatgtcacattttatttgcatggagaaataacaaattttacaatttatttcacatattctttaatttttaggataattgtcagtttcttacagtttattttccttatactcactgaagaaaatatgtacgaaagaatattttcagtgaagttaattggatttactacagttgacccttcaagcaatagtatcttgcccttaataactgacctatctttgaactaataaattcaacctgcaaataaatgtagtgaggtaaattgtagaaatttatcttcaaaatggtctttctaaagtgatctatcaaaggtgcatttaattagaggtccagttctccaaaaatgtgccaaggaaaagtagccacaaagaatttagagctgaaatgaattctttcacccattgctctgtttctatagaactgagaataaatctcatatgggtacttaaaatctgtactatgtcattgaaggatgaaaagatgacaatagtgatgatagaaggacacggtaataggaaacatttcaatagagggaaatgatgtgagtatgcaatgttcattcaccagaggactaaatctagggctattttggtgacttgaacagggaatattctacttcctgcaagtgaaaaatatggacatttcatttggcatgccacctgctcttcagtccatcatgtagcaagcacccacttagtactttggagctctaagtaatacttggactactcaaatgccagccttgttgccatttctgtttattcgccaataacaattttattaattaaaatttgtatgtggatgtcttaaggaaattccttgtagttgtcaaagcagactcctgatcctatctatctgccagtgccttctgagtagtggtatctattcttcatgatttttggaactatttatgggtgattgaagaatatggagtggatagagaaggatgctagtcatttggctgcacacaagaaacacagatgaaatttttgactatttctgttcattttctaaaggtacagaattttcactggattgtacttgtaagcaattttaaaggaagaaatatccagccttttgaatttgttacagtgttgcaagacttttttaaaatgttaagaatttttatcatataggatgaattaatactctcataattttaggtttgtttcttccataattaataactatccttaaagattgtgtgtgtgtgtgtgtgtgtgtgtgtgtgtgtgtgtatttcttgattttccagagcaaacgttcccattcatttgttttactcaccttgttatagttgctcccattgtaagatatatctagtaagtttactgttgttacctaaatctgtttgctgaattttaaaaatgggaacatgtagtaaatttgggggaccacgagctagtatttacaaagtaaaccgagaacattggatataaaaccttatttcatttaacctccaatgaaggatatattcagtattattatttgtattatttcttgagcttccttgcttatctgtaatatgtaacatggtggcaccccttttcatataattctctcctcacttctattttgggtttttacatgttcttgtttcagtctcttctgctctttctatcttttcttggttcaactttcttctcttatcctgtggaggcgaatacctaattctggctctatcctcttcagtcactctacaagtatcactgggacaatattgtccaactactatttttacctccaaacctgtattcttagccttacccctaatctgcacactacgcttctttttgcaattactttctgtacatttgcatcagtgttaatcacaggcatcttgactcatgtctccaacctgaaaacattattccttccatatagggacaggctcctctgtcttccctgtacccctagacagtttctcccaagttataaaatcttggtgattctgaaaattttctttttccccatcaagtcctgccagtcctttatccacaacataggaataatacttcctgaacatccgtgctgctcctgtttgttcaataagtactcggacctctaaaggcatttcctatgtttcttccaccagccccttatccttaaaatcttgcctccaatctgccgctagagttatcatcttaaaagagtcaaatcagggttggtatccaagaaatattacaaagtactaagctcttggtatatacaatcaacttgagagaaagagagggacgggaggagagggagagagagagagagagagagagagagagagagagagagagagagagagactttattctgtcctctataacacctgaatgattctgtacatatttatgttaacagagcattgtactacttcaaatccttatacaagcaaaactcctcaccgccttttggcaatggaacttgcttttccctctgcctgaaatagtcttcagtatgttgacatgactcatttcttcacttcattccatttcctgaagagaggagcagtcttctgtgctcacattgcctaaaatagagcccactgtcactctctacttactctttttaatctttcttcatagcatacatatacatatatatacacacatatacatatatatacacacatatacatatatatatatatatgtatacacatatacaggcatacctctgagacactgaaggttcagttccagaccaccataataaagtgagtcacatgaactttttggtttcctggtacatatagaagtcaggtgtacactacactgtaatctattaagtatacaatagtgtatgcctaaaaactaatgtacatgccttaatttaaaaatatgttattgcagtgttcaagctgagagccaaatcaagaatgcaaactatttacaataaccacaaaaaataaaatatctaggaatacatctaaccaaagaagtgaaagatctctacagggctaactacaaaacactgctgaaagaaaccatagataacacaaacaaatggagaaacattccatgttaatggaaaggaagaatcaatatcattaaaatggacatactgcttaaagcaatctacagattcaatgctattcctatcaaactagcaatgtcatttttcacagaattataaaaaactatcctaaaattcatatgaatctaaaaaacagtctgaagagtaaaaacaatgctaagtgaaaagaataaagcatgatattaaccaacttcaaactatactataaggctacagttacccaaagagaatgggacttctacaaaaacagaaacttggaccagtagaacagaatagagaactcagaaataaagccgcatacctacagccatctgatctttaacaaagtaaacaaaaaaaaaaaaaatggggaaaggactccctactcaataaacggtgctgggatagctggctaaccgtatccagaggaatgaaactggactcctacctttcactatatacaaaaattaactcaagatggattaaagatttaaaaaaataaaatctcagccaggtgcggtggctcacgcctgtaatcccagcactttgggaggctgaagcaggtggatcacgaggtcaggagattgacaccatcctggccaacatggtgaaaccccgtctctactaaaaatacaaaaaaattagctgggcatgctggcgcatccctgtaatcccagctacttgggaggctgaggcaggagaaccgcttgagccagggagtcggaggttgcagtgagcccagattgcactgcgccactgcacttcagcctgacaacagagcgagactccgtccctaaataaatacaatacaatacaataaaatctcaaactagaagaatcgcagaagaaaacctaggaaatactattctggacatcagccttcagaaagaattcatgactaagtccttaaaagcaaatgtaacaaaaccaaaaattaacaagtgggatctaattaaactaaagagcttctacacagcaaaagaaactatcaacagagtaaacagacaacccacaagatgagagaaaatatacacaaactatccatcagacaaagatctaatatccataatctatagggaacttaacaagcaaaacgcagataaccccatgtaaaaagtgggcaaaagacatgaatatatagatacttctcaaaagaagacaaacgggtggctaacagatatgaaaaaatgctccacatcactcatcattagagaaatgcaaatcaaaaccacaatgagataccatctcacaccagtcagaatgcctattatcaaaaactcaaaacacaatagatgttggtgaggctgcagagaaaagggaacattatacgctgttggtgggagtgtacattagttcacccactgtggaaagcagtttggggatttctcaacttaaaatgcactgtcattcaacccagcaatcccattactgagtatatatccaaaagtaaataaatcattctaccaaaaagacacatgcacttgtatgttcactgcagcactattcacaatagaaaagccaaggaatcaacctagatgaccatcaatggtggactggatgaagaaaatgtggtacacatacaatatgaaatactacacaaccattaaaaagaatgaaattatgtcctttgtagcaacatgcatgcaactggaggccattatcgtaaatgaattagtaggaacagaaaaccaaataccactttgttctcacttataagtgggcctaaacattgggcactcatggacataaagatggcaacagtacatactggaaactagtaggggaagagataaggaaggggcaagagttgaaaaactaactattagatacggtgcgcactatctcagtgacaggatccatcatactccaaacctcagtatcacccaataaatatataaatgtaacaaacctgcacatgtaccccttaaatctaaaacaatagttgaaattatttaaaaaaatactttgttgctaaagcttgctagcagtcatctgagccttcaatgagtcttaatctttttgctgatggagggtcttgccttgacggagatagctgctgaccgatcagagtagtaactgttgaaaggttggagtgactatgccaatttcttagaataaaacaaccatgaggtttgctatgttggttgatttttttcacaaaagatttttatgtagtgtgtgatgttatttgataacattttacccacagtagatctttcaaaaatgaggtcaaggctctcataccctgctgctgctttaccaactaagtttacagaatattctaaaccctttgttgtcatttcaacattgtttacagcgtcttcaccaggagtagattctgtctcatgaaaacactttgttttgctcatctataagtagcaactcttcatccattgaagtttcattatgagatgacggccattcagttacaccttcaggctccactttattctagttctcttgcaattttctccacatccagtgacttcccctactaaagtcttggaccctcataggcattcatgagggttggaataaacttcttccaaacaccttgtaatgttgatatttacctctttctatgaatcacaaattttcttaatggcatctggaatggtgagtcctttccagaagattttcagtttacccagatccatcagaggaatcgctacctagggcagctatagccttacaaaatgtactttttaaagaataagacttgagagctgaaatgactcctttgtccaaggactgcagaatggatgttgtgttagcaggcataaaaacaaaatctcttggtacatcttcatcagacctcttggctgaccaggtgcattatcaacaagcagtaatatattgaaagagattttttcttctgtgcaataggtatggccagtgggcctaaaatattcagtaagtaaaccatgctgtaaagagatgtgctatcatccaggctttgttgttccctttatagagcataggcagagtctattagcataatcttaagggccctaggatttttggaatagtaaatgagcattgtcttcaattgaaagtcatcaattgcattagcccctcaaaagagagtcagcctgtcctttgaactttcgaagccaggcattgacttctctctagctatgaaagtcctagatggcatctttttccaatagaagactgcttcatctacactgaaaatctgttgtttagtgtagctaccttcatcatcttagatattagcttgatcttctggatagtttgctgcagcttctccatcagcacttgttgctccacctttcacttttatgttacggagagggcttcgtcctaaagcctcatgaacaaacctctgctggcttccaacttttcttctacaatttcctcacctctctcagcattcatacaactgaacagaattgggccttgctctggattaggctttggcttaggagaatgttgtggctgttttgatcttctgtccagaccactaagacattctccatattaacaataaggctgttctgctttgttatcatttgcatgttcactagactggcacttttaattttcttcaagaatttttcctttgcattcacaacttagctaacgggcacaagaggcctagcttccagcctctcttggctttcgacatgccttcctaaccaagcttaatcatttctagcttttgatttaaagtgagagacatgcaactcttgttttcccttgaacatttagaggccatagtacggttattaactggcataatttcaatattgttgtgtctcagaatagggaggcccaaggagaggaagagaggtagggggatgactggtcagtggagcgttcagaatacatacattaatggattaagtttgccatcctatatgggcactgtttgtggcaccctgaaactattaaaatagtaacatcaaagattactgattacccatcaccataacagttataaaaatattgaaaaagcttgaaatattgtgagaattatcaaattgtgacacagagacatgaagtaagcacatggtgttggaaatgttgctgatagacttgcttgatgcagggttgctacaaaccttcagtttgtaaaaaaaaaaaaaaaaaaaaagcagtatctgcagagccaataaggcaaaactcagtaaaatgaggtatacctgtacatatacatacatgtgtctatatatccactcacacatatgtgtatgtgtattatatgtgcatattatacatatatgttgatatgtgtatttatcatatctaatacacatatatgtatatacatgtatatcacacacatatattcatattgtaaattgaaaattttctagtgctgtatcccaatctctagcttataaatatattgaatagatgatgcagcaggtatcttttgaatacgcactccaattttagaaatataaatcttttttaaaggttggaataatataagtagtttggtgttcagtgcaaaaggttttaatgtataaatactatgaaaacaaaagttagatcaaatgtatcaaatacaaatgatctgtattgggggacagagggacacattaaatttaagggaatatgaggagaatattgacttcctatgctcgatgagtgaaaaagaaaagtgaagtgggagtgtttgaaaggaaagatgagcttttccatgctagtacatcacaggttttaatactcatagaagtttttagatttgtataggaaatatgatcctccagcctttccaagtttactcttctactggaattacaaatcaaaactaataaatgtttactatgcttcaagtgcaatagttataaagtacctgattagaggtcccacattcagatgttggttatataaaatattcatgctaaatcatataaatgctaaaacatttgtatttgtgatgttctcttggattgctagatggagattaaattatacaaattcagctaagaagaaaaatgtgggataaatggaattttagtttaaaggaagtcaatgaaaggattaattaagtataaaataatcccattttaatttgtcatagaaatgagttttctgagacattgttgtaatcaataacgtgaagatgtaaaattttgcaaaaaaaatcattacgggaaatccaaaagcagaagagtagactctgtatttaactctagcagattatttagaaagaaaatagtctatgccatgaacctttcgactgtctgcgtgaacaaatgtctctagtaatacacactcttaactcaattcccataggctcaaagttgcaacagtatttatttgcccgttcaacggttttttgtttagcacttactatgtgttaggcacttccagggatatgagtgaacaaggtagttatgggtcttactctcatagaggataattctttaggaatggtcaaaactatacatatacacataatgtgattaattgtgatgtgttttgaaggaggaagcaaaggagttggaacagtttaaataagactgtaggttggcagtgggaacaatggtctttgctatcatttttcaaaaattccaatgaatgggaatgacgactgttgcattaagttgcctgtctccctctgacccatagtgattctctattatcagagaggtagggcatgtttttcagcatatgtgataatatcaaacagattcagatggtgaaagtaaaatttcttaatgcttagaaataacataatttgatcaaatcatttggatatgttattaagttgttgtaagatatgaagacgtagctgttactactgccaatagtataaactttggattcagacctagctgtgtttgaatattaactctcccacatcccacgaggttgtgggcaagctattcacatcattgtcactaccgtcactactatcccacccacccttgcttcattttcttatctgtaaagtggcaatctgttggaatcagggttggggaaggcaaatagtagtcattatacgaatggtaactatgctatcatcaataatatagtctacagctatgatgaagctaatcagaaaacattgtctattaccagtaattagctatatcaataactatcacaagaaaagtcccagctgtcagtgaataaatagaaaatagtgctttgtcttagagaaacacatacaaaatgaatggtggtgacagtgctttaagttaacttgtcagtttatatgtgtaatgcatatataatttcaaatgtataatttagacattgtacatgtatatttggcctggtaatttatggtatacataaatgataaatgtataggttgaaaattcagttactttttttccttttcttaaatcatttttaccttgctgaagatatgctcttttctctacttccttagaataatatattttattttctcttaaagtattttgagaccatatcaccatttactacaccaaaatgtttttttgcaaatgcggtattcaagggtgaatttatagtggctggggacctatttggaattcagtaagtaaaactagattttccttattcctcatctgagatcagagctatttctacctctagcaaagacatacagtcattccgggtgctgcattttcagggaacaatgtgttttcttggcaaggggcagtaagaccatcaattaatagttcttcatgtaaagtagctaaactactgttataaaggaagtgaaatttgcatacataaccattaacacatgaggttagttatgtacaattttgaccaaagtgcctgtttgctgctggtatttattataataagaactggaaaaaaatagtctatctcaagagcatgtgctgagcacccgtaaattgcaagagactgtactgggcagtatgagattatagtaatttgggatttcctactaatgaactgagagggaacaggtacaaacacagtatacgaaggaaacagtggcacggagacacttaaacacagcagtgctgggaggctccggggtaggggagggaggaagagagatacgggttaatcaggagctgctctctggggaagattgcccaggccctgactgatgcctgacattgattaattgatactctatcctagtgtttaacaagtgttccatccaaaaagtcttctgtaatatttaacttcacttccttcagcttcaatttctgcacaattcttttgtcgtctcatcaagagagctagtcagcagacagtaacaaaatgcttatattcatatacctgaaggatttttttttgtcatgcttcagccttctccagactgaagaaaagcaaataataaacaaaattaatcgttcttcagaaggcctgtttgactcattaataaataataagctttgatactgtgctttaagtgtttaccctttggaaagaaaataattttgacagtgatgtagaaataattatttgatatttatttcaaaacaaaatttatatccaatactaaacacagaattttgtaaaacaataagtgtataaagtaaaatgaacattaggattattgagattattgtagctaaaactagtgtttattcatataaattatgttaataaattgtattgtcattattgcattttacttttttgaaaagtagttaatgcctgtgtttctatatgagtattatataattcaagaagatattggatgaattttttttaagtttaatgtgtttcacatctctgtttcttttctctgcaccaaaagctacatttttgtgcccttatgtaccaggcagaaattgatctgcaatacatgtggagtctccaagggtatatttaaatttagtaattttattgctaactgtgaagttaatctgcactatatgggttcttttccccaggaaactgaaatagcagttcaagctaaacaaccggatgtggaagagattttgtctaaagggcagcatttgtacaaggaaaaaccagccactcagccagtgaaggtaatgaagcaacctctagcaatatccattacctcataatgggttatgcttcccctgttgtacatttgccattgacgtggactatttataatcagtgaaataacttgtaaggaaatactggccatactgtaatagcagaggcaaagctgtctttttgatcagcatatcctatttatatattgtgatcttaaggctattaacgagtcattgctttaaaggactcatttctgtcctggtgtgctgccatcaatacaaaagtagtcccaccttcaaggtagattaaattctttggggctttattgctttgcttgccagccttgatgcttttcatattgtttggtttaattcaaatcaagctactgcatcatagtgtctgtctccaacagctgtaaagaatcacaatatggtccgtgacctttcttttctttgttgctctttcttataaaagagtaaaatcggcattgaggcttcagtattttattgggtcaagaatttttagtgaaatgtcatgtaattgcttatttctttggcaaaaagctggcctgggataaacctttctacttttttttcttctccatatccatgttgaagtctaggtcacatttattcacaggctattacataaggagggagatggaaagccaggtcagttttcaaaaaatagctaatcaatggcttccatttgcaaatgagagtccagtgctaaatatacgttagcagtaggttacctgattctctgtacctgaccagaattataatggctcccattatgatgaaggttcctgagatcctgtaatcatggctgtttattgatcagtcttggtttctcagttaatgttgcaggcttggatacaatgaacctcgtcctcatgtttaaaactgcttgaaaacagttcaggtcaataacctcattatacagaaccagtttgtccttgcaaacaacattaccatgacttagattctgtctctaaggtcgctgcttagtttcccttgcgcttggcccaagcttcatttctagaagattgtttgttttccttacagcttacaagagacttttccttaggtagagttgaagtttgcacctgagcttaatgtccaaacaccagacactgaaaatcacaggtttctctgtagatatcaacatacttttattcagaaatatattgcaaccactccaaaaatctagaaaagtagtttgtatccagttcaagcccagtataatcatttttcataagctaacaatgtgctcagtatttagttggaagagctaggcaaagtcctgaaagcagcaaatttcagagtttccgttgatgttctgaagaaagccagccctcagagcagttaatatggtgactttcattgtagcaagccatgcagtgcacaaatggacaattgcatacgtttctatctactctttgttgatcctcaaagactttatgccttatggtgtatgactatgaattaaggtttgtcactaattgttagagatcacaaaggtacatgtaatttggcttttacttttgtgcctttgtaaaagagagagagagagatcttaattaaaagccactgagaaaatttttgctttcattatgtataaaacaatccaaatgcttgatgctaacttatcgcacctccacccacacactcaactactgggccacttggagatcagaactgggatctgccatgcctgagcatatctgcttcctgctgatgcattagtgatgtaaaaggagaattacttttctgaaataaaaagaaagaaccaggagctgttgctttccttctctttcacaacccttaaaaccatttttgtagcagacagcactgtttttttccttcctttttttttttctccttccctgtttccctattttctctcaatttgacacattgggagaagctgaacttaagggaaaatttattcctgtcttcccatttctcccttggatttggagaaaaatcaacatatcaagttggctgggcatggtggctcatgcctataatcccagcactttgcgaggccgaggcaggcggatcacctgaggtcaggagttcgagacctgcctggccaacatggtgaaaccctgtctctactaaaaatatgaaaatgagccagctgtggtggcaggcgcctgtaatcccagctacttgggaggctgaggcaggagaatcacttgaacccgagaggcagaagttgcagtgagccgagatcgcgctgttgcactccagcctgggcgacacgagcgaaactccgtctcaaaatatatatatatcaagttgataggggcaaaaatgcaagaatgatttgagaattatggggtttaaaaaaatagttgactcacgcacaacttttgctgtggaccatgaccttggaaacatctgaagattagctggggtttgcggtagcctgaaacacctagaggctcaaaaaatgacctcacagttttgaacatgacacccagcaatacaaggcagaaagctgtgagggctgtttaaatctctgcatggatcaaaaatttatttttaaaggttagagatgatttttctgaaggacactccattgctctgatagaacgtgaacaaagcctttttaaactttgagtccatatatcaaaatttaaaatttgtcctatttataatgcctcttcttcactctgggtcttgttacctcttaatagaagaggaaatgagtctgagtagcctgcagcacattttcatgagagaattgtgtttctgtttttgttttttgggggaggtgcatttggaaactgtaataattatgaagaaaatgatattctttaaaaagaaaatgaaaatctctcacgatgtatatgcaagatctagtatttaaatgcataattagtgtgtccaccgcttacaaacattctaattaaagacacatcagggagcaattctgtttcttaggaaattgacttgtctattggcacctccgcattctgcatcagacagcctgtctgtccagctcctacgctcacctcccaagctgagttctgattggaagctgggttcatccctgctcagtttctttcctctttcttctttccttcacttcgtcaacttctttaagatttcttttattttcaaagatggtatatttctggtttcttttttaaaatctctgactaaccaacttctttattttctttgaggacttcctgtaaaaggtcaaatacatattatgaaatgataatactaatgacgtataggtagtactaatctctgctgcaaaataactggaaaaatcttaggatcgtatgatcaaatacctctccatctttgtttagcacttcaactctctttctctctctctgtctctctctctctctctctctctttccctccctccctctccactctctccctctctccctctctccctctctccctctctccctctctccctctctctctctctctctcccccttcctcccccatctacacacatacttttatttatttgtatgttatttcttcatcttaacttcagaaattactgaagactgactatatgagttatataaattgtttaaaattttgctaaagttatagttttggtataatatattacattaatgccatagatgaaatagtctttaatgtgttccatttttccacacagtaataactaggtcctcaatagcaccccatttagcagtttaaaagcagcaaaaacaactgctatcagtaacaacaatataaactacaaaagaagccatttgttatttgatttttattataaaattgtatttttaactgtcttgagcttaagcatttaggtgccattttcttgtattcatactcatttttaacttaagttggaaaactacactttcagttaacttttaaaaatatgtttatgtactttcaatgcttacatcacctgccatgtattagaactgagagcattaatggaattttaaatgtcttggttactttctaaagtgataaaatgaagccagctggtttgctttgctaactttttatattatcaaaaaatgttacttacacaaacctagtaatatgttttacttactgctcttgaattatttttcaatgtaacagaaaaaggtgtgaggaactttctgtatttggccaaagcgttccatcccaacctttaacacaaaataattgctgtagacaaatggtcaagagggcaattataatcttccaggcatcatttcctcagatatgaactgcaaaatgacagcatcattagtcattttcaattacagtcagtcacaaccagggatgattcattttcccagctgttttgttgttaattaactagatgaagctgtttttttttctcccaatgagtttgttctactgccaacatcaacatcttaacatttttaaaaacttccttagggtttattttttgcctaacaatctttaatatattactcacaaaagatgtgcatctcaagatttatccacggtatagcaggtcaaatggtatttcattggtcgaaatgttgccgaaataaatataattacacttaaaacaatacttggatttcataaatcatctgccatgcgtacaatctcatttacctggtgtaacttcacttgtagcaacagaaatcaatagagagataacagacaaaaattgtcccctgaaatgaacaagtctattttgactgactcatttattgagcacaatttccatgccaataacaccagaataagttgggagaggacttctagaaagaagataacaatattagaggcatttaataatttataagtaaatgcatagcaacattttatttttttaaattacaagtttgcgactgggcgcggtggctcgcgcctgtaataccagcactttgggaggccaaggtgggcggatcacaaagtcaggagatcgagaccatcctggctaacatggtgaaaccccatctctactaaaaatacaaaaacaaaattagccgggcttggtggcaggcatctgtagtcccagctactcgggaggctgaggcaggagaatggcatgaacccgggaggcagagcttgcagtgagctgagatcacgccactgcactccagcctgggtgacagagtgagactccatctcataaataaataaataaatacaagtttgctttacaactgaaaaaaaagtcttggagtataagaggttgaataaatgctaatcccaatgcataaacttgaggagagcttcactttcccaatgagaagagaaaaaatttataatagatttttgggcaacttgtaaacataaacatttagaaatatggatgagattgtcaaatgtctaattatattcaatttcttaattgagtagcatttccatatttgcagtcttacattttataaaataacacactcatttagaaatacctggcacatttatattttatgaaacaatttcattcaaacccttcgtatgtatattctagaattgtagagctcatcaccttgctaagttatttgtaatatggcattgtttgaatccctacataatactctgaaagccctctggccaagattacaagcaacatatctgtaatcaaaaaattaagaatatttaccttattgcagcaagagcgtaaaacacttcagagtgtgggcatctcagtaagagggcattggaaaaagcttcttacagagttcagctggctgcatgattctaaggaggaattcagaaagtagaagccatttctggattagatgctttcaagaaacagagtcaatgtagtgattaggtatcttagtgtttatctagaagatgagattaaagtagggctagacacgtcgttggtaaaggagcagcaatgcctcatattagtcatttctgtgatagcagaaaggccttgtctctgtcttgtttcaaacacggccatggggtggccttgtgtctgcctagtttatttctatgagtgttttttaacatccagctgggaccatcatggcctagctagctgccagctgccagctatcagcagagctatttttcacgttctcaatgctgtcgctgaaatttttatcccaaacttcaatacccattcacaaaatattaggaaaactgtttttttcatttttcttagatatgattttggttgtttgtttgtttttgagacggagtttcgctcttgttgcccaggctggagtgcggtggcgcgatctcggctcaccgcaacctacacctcccaggttcaagcgattctcctgcctcagccttccaagtagctgggattacaggcgcccaccaccatgcccagctaattttgtatttttagtagagatggggtttctccacgttggtcaagctggtctcgaactcccgacctcaggtgatcaggctgcctcggcctcccaaagtcctgggattacaggcgtgagccactgcacccagccagatgtgatcttttaaaaattcccaatagactaacatattctttctgctttttaagttgtttggctttttaacaaattctttgaaagactcgtttacaatgatctctgccacgagtgattgtgaagctatacattaggaatgattgctaaagatttatcaactttctttgcctccctttttaattaagcaaattctgtcagaatacttatgtaagcatcacatctcttgaggttatttcaggctaatatacaacattgtggttccgaataaaataattgagacataagagatagtataaagtcttgaatatgagccaactttcttttctgagagaatatttgagtgaaaagtctcatgtactcagtagctcatgctgaaattagggaagcattttagagatttgaatttcacctcttgtcctcagttgtattagttacacttaaagagagagacaaagagacatagatgtttcagttacaatattcgaatgtatgcctgtatatatacagccgtaggtagagtcctttatttattcagtagatattaattgcatgccaaccattgacacaagatatatttttaaattttgaaaatctcaaactcaaatagagtttaaaactatattctagtttacttttttaaacaaatgattttttatgattgtattaaacaaatacattatttttccttacttattctacatcaaataatatctatttctagaaggcttttttccttgtcttaatgatagaaaacataaaaatcatttaatattttttaaatatccaaaaaatatgaggcaagaaagcagccacaattgtagctaccttaggaaacttaattaaaaaatttttttttatttttaattttatatgtgtataattgtacatatttatttgtgcggtacaagttatattttgcttattttttataatttcagtagttttgggggtataggtggtttttggttacatggatgagttctatagtggcgaattctgaaattttttatgtatccatttcctgagtactatatactgtacccaataaatagtcttttatcccttacctcactcccaagctccccacttagagtccccaaagtccattgtatcactccgtatgtctttgtatcctcatagcttagctcccacttacgagtgagaacatatggtatttagttttccgttcctgagttactttacttggaatagtggctgccagctccattcaagttgctgcaaaagagattcttttttatggctgagtaatattccatggtatatagataccacattttctttatccattcattggtcgatggacacttgggttggttccatatcttgcaattgcaaattgtgctgctatttttgtgctgctgctttcttttttgttatttccttttctggttttggtattagggtgatactgacttcatagaatgatttagggaggattccctctttatcttttgaaatagtttcattataattggtaccaattcttctttgaatgtctggtagaattcagctgtgaatccatctggtcctggacttttttttggcaatttttaaattactgatattcaaccttgctgctcgttactggtatgttcagggtttctttcttttttttttttttttttgagatggagttttgctctttcacctaggctttagtgctgtggcatgatcttggctcactgcaacctccaccttccagtttcaagtaattctcctgcctcagcctcccaagtagctgagattacaggtgcccaccaccacgcccagctaatttttgtatttttagtagagtcggagtttcactgtgttggccaggcaggtctcgaactcctgacctagtgatccacctgcctcagcctcccaaagtgctaaaatcacagacgtgagccaccgcgcccagccaaagcgttcagggtttctatttcttcttgatttaaactaggagggttgtgtgtttccaggaatgtatccatttcctctagattttctagtttgtgtgcataaaggtgttcatagtagtagtgaatgatcttttgtatttttgtgatgtaggttgtagtgtttccagtttcatttctacttgagcttatttgaatcttctctcttctttccttggttaatcttgctaatggtctatcaattttgtttatcttttcaaagaactatttgtttcatttatattttgtatttttttgtttcaacttcatttagttctgctttgatctttgttatttcttttcttctgctggatttgagtttagtttgttcttgtttctctagttccttgaaatgtgacattaggttgtcaatttgtgctctttcagaatttttgatgtagtatttaacactatgaactttcctcttagcactgtttttgctgtatctcagaggttttgataaattgtgtcactattaatcatttcaaaaaatattttaatttccatctcaatttcattgttaaccccaaaatcattcaagagcagatttcttaatttccatgtgtttgtatagttttgagggttccttttggagttgatttttagttttattccactgtggtctgagaagatacttgatatgattttgattttcctaaatttattaagactttgtggtctcttgtatgacctgtcttggagaatggtccatctgctgataagaatgtatattctataattgttaggaagaatgttctgtaaatatctgttaagtccatttgttctagggtgtaatttaagtccattgtttctttgttaagtttttgtttcagtgacctgtctagtgctgtaaatggagtattgaagtcccccactattattgcattgctgtctatctcatttcttaggtctagtactattgttttataaagctaggagcaccagtgttaggtgcatataaattgagtactgtagtaaatatcttcttgttggactaatccttttatcattatacaatgtctttctttatcttttatttacggttattgctttaaagcccattttgtctgatataagaatagctactcctgcttgcttttggttcccatttgcatggagtatctttttccgtccttttaccacaagtgatattttgatacaagcatataatatataatgatcaaatcagagtgattgcagtatctatcaccttaaatatttatccattttaaattttaaaaggaaagctatattcagaaatcactttttcttgtaactaattcctgttcttcataaagcagaaatttcatagtttgatatagttgtcttaacatttaatgaatattttcaagcaaagtatatacaatggagaataatgctcagctgcaaaagtcacctataataaatctgatttttccatttacaaacaaaagaattcccaaagtttatccattttggtagaacacgaattcactctgttgagtttggagctcttgtgcggaaaaccttggacctgcaatttagttagcatattcaaagttttaaaattatggagatgtagtcaagaataggacttgataactattatcccactgatacgctatttaaataagttgggatttaagtacttatttgatttccttaaatttgcttatagatgattaacatgtattgcaaattgttaccttttacagatttctattgagcactgcttaaattttattatatgatgaacacctgactagttgctacagccaaacattttttgttatgcaaatgaattttacagcttaattggaatgatgagagaattgaaaatatgggcaaatgccagagaagtgaaaagcaaaatgaagcaaaacaaaaaagaacttgtataatatataaataatccatttcaactctacagtacaccaaactcttgaaaaagtagcaagattgtttttgtgaacagccaaatcaaaaactgtagtcatttcataagtatttgctaataattataaaagattggaaattatacagttctgagcttattgaacctttgacccattgcagtgtcctcagacatttgtgatacattggtagtgccatttaattttaaaaatccacctctacattagagattatagtaacccctcatttacctatctggaaataagagtgggaaagataatattagagtaaatggacagactatttagagtttatgtattaataaaagagaaattgcatgtacaaacatgttattttctaggtaactaaaacctagtcctttaataaagcactgaaaaaaattttatcgtaactattttaatgagaacttttcttgaatatcttctgttttgcttcattgagcagcgcataatatctaaccaacaaatttatagtgctttgtagttcacagcatttttaccatataaaatatctcgtttagtttctccaacaaagctatgagttaggtggtattattatatccatgtttcaaggatgataaatcttagtgacccatctcattttccaaggatcacacaaccagtagtagtgaattaggaacgaaacctaagacttctgattctaaatcacaatgtaaattaacttttcttaattttcaggggtgtcgttatcacatcaatttttgctctgtttagtgatacagtgttatatgaggaacatgaaattcaaagcaccctttcttcagttgagacccagttgaagtggttaatttgcttttagaagctagactgtaagataaatacatacctttaagtattaaagctaactcaaatcactgagatacttacaccatgagaagagagtggaacctaagtcaactggtagaaacatagaaacagcaaactttgatctctctttatcctcattctgaggggcaatatgcttactgagtggaaagatgggcatacccccagcagtatttaaatcaatccctaatctatcactatctctccttttctctctatctcagcacatataggtgatttcctataaattaaatggtgtaggatgagatttcatcccatgttgaaaggtcatttcattgataaatgactaagattaccacatttctcagttttaagtttttcatgttcattgtctcctattgctactttctgttatcagaatgattacttctcattgcttttagtattctgtctttgtagggttacagaaacttcacagggaaaccagaagatcaaatatattactcactagtctcttagaatatttaatttttagtgtttaggttctgatgtcaggacaggaaaatatcttccgtgagtgatgacttccaagggtggttttcctgactaatcagaggcattattttttgtttgcttttgggttcaagactgatttttaataaataaaaaagttacatttattgatatgctagtaaatatttacatcatgcattctggataaaaacattgaaagccttgatttgacttgatgtcagacacaatagacatagtctcaagagcactgatgatagttaaattaggaagtgatgaattcttactatatattatcttttgttcttagcacagtttattttatatttataaaatttaatttatattaatggttatgtttaataaccgattagcaaaattactgaaatgtgacaataatatctctattcctgtttctttcctgctttatccttttaaaatatattatttataagtatattttaaatttataaaagctacattgtgctataaatcttgtttcttagcttttctaacattcataattgtgttttaaagatccacccatggccgggcgcagtggctcatgcctgcaatcccagcacattgggaggccaagatgggcagatcatctgaggtcaggagttcaaggcagcctggccaacatggtgaaatacaaaatacaaaaattacccgggtgtggtggtgcgagcctgtaatcccagctaccgggaggctgaggcaggagaatcacttgaacccaggaggcaaaggttgcagtgagccaagatctcaccactgcattccagccagggcaacaacagtgaaactccatctaaaaaaaaaaaagaaaaaaatccatccacattgctctacatatacccttatccatttctttcacatacatacccatgttggcctcaattccccacaatgcagcaacaaactttcttgtacttccttatgaccttaagaatgtgagagaaacttctccggtatacactggtgagggaatatgatcagcagggttttttgtttgtttttctgtgttttgctttttaacttatgcccacctttctgttggcagtcagcagccacatctgaagttatagctctctgatttagacaaggcttattcttccctttgttacaacctagtccctatagggacctgaatttgtgaccctagtctatgagattactttttaaatacagtttggttcaggatttataaaagcctaataaggctgggtgtggtggctcacacctgtaattccagcgctttgggaggctgggatgggcagatcactggagtccaggagtttgagaccagcctgggcaacatggcaaaaccccgtctctacataaaaatgtatgtactcagtagtactactcagtagtagtactgagtagctactcaggaggctgaggtgggaggattgcctaggaagtcgaggctgcagtgagccgagatcttgccactgctctcccgcctgggtgacagagtgagaccctgtctcaaaagaaaaaataagcctaataaaatgattgcacgcctggaaaacctacataggctccttcaagtcccatatatatataaagtcatccatggtatgtagttcacattgaagtcaagttgggggaaaagaaacttatttatctctttctcttttcctttattcaagtagcaattttcatttaattttattcaattcagaaatatttactgaactcctcttattaggaagcactagactggatataaagaaaacatcgtacaaggcatagaggactcagtcctgccttgcgaagggcacatagtctgactggaaagacacatgctgacagggtagactgtgttaggaataatgctcaaaatcctgaggacattgaacactcgaacaaaggattcttagcaaagcaattttacttctgcacagaggggtgcctccttggccagttgccatgagagcacacctgaacaaaggggcatgagagcctttattcctgacgcaagtcctgcccctgtaccctttccccccattggctggggttgggtcgtacaatctaaactaatcccagttggctaaacatttgatttttttagatagggtgggcacgtaaaatcaagtggagaggaaggggaaggggcgtctgtaatgagctagaaagttagtcctctttccaaataaggaaatgaatgtgagctggtactgaggtgtgcctgggcatctaacaaaggtaaaaaggaaaaaggagaaaaatcagggggtactatgaattaaagaataaaagattgatcagattatttgaagagaaacctcatcatatcccacaactggaagaaacaatttgatggcaagtttctcttcgtcgtttaccagctcaaaatctcaactatcaaaggcaagaaaaatacacacacacacacacacacacacacacacacacacacacacacacacccctctgcctttttctgtatggccaaagccttcagtccagctgaccacttcccactccagttaccatgttagcctcccaacttgtatctctgcacccttctgataaagcctccacaatgcaaaacacgaatcgtatcatatggctcttcttctctaaacacttccatctactctgtggttttagaagagaatgtaatagtcccacattacaaggtcttaataaattgcattcttgcagctctgtatcattacttgtaaacactgtagtctagatagccaggacacactgcatttcttttttaaggctcgatacctcttgccattttgcacgtagttttccttctgtctgaaatgccctttttccacctggcgcttgaatggccccttctgaaaacttcctagtcgtctttcaaaataaattcaaatgttagcttttgtgggtaacctattgacctctccaggctgagttaagctgttcccccgaggtgtcttgttgaaatcattattttttcctaaaatctctgttctaatttacttacatgtctgtgaatgcttagaggttacgaacttcagttttgtaagcttagtaactggcacaaagtctggcacagagtagcacctgaacaattatttttctggaataaataaagtaatggtttcattgaaatgattcgcattaaattaatgattagcattaaactacaacgtgtatatgaaacattccagttaggttgggttcattccattcctatttaaagagtttgtagtttctggctcttttccaactctgattcttcagactagaaatgcaatttctgctaatgtatttattttaaccaaacccgacatcaatcaagttatttgtattcctcataaggtaagcataggaatttacagtgatacaaaaacgcagctattatctcttataggcactggtaaagcttttgtgactagtgctactatactggtaaggtattgctgcttgtaatgaactaaatatttcagtggcttaacacaataggagttcttttcttgctcacatgacaacccagcgtatgttttcctagtcaagcagctttcttacatatgttattgcagaaacctaggtcctgttcatcttcttcctctgcctgccattcccttggtagcttttctctgctcgggtttcgcaagaggatgaaatcctattgaaaatgatctgagggtctattatgttctcaagaatggtacatatctagtctatgataaatgctcaggtaactgattaggtgtaatagatatcttaggattttgtcatgaacaatcagcatcaacaccacctggaaaattgttaaaaatgcaaattattgggctccacccagtatctactaaatccagaactccggggctaccatgcagcaattagcaaggtctccaggtgattctgttgatcctaaagtatgagaacaactgccctagggcgttaggacttaattctctcctcagtaagttgtaaagatttgccgtaggacctaagagtcttctgcttccagcaatagaaaggaaaaaaaatgtggaaacctcactaaatttttcaaagcctcagccccaaactgacaaacaacacttctgctcacattctgctggctataaattatcgtatagctagctgcccagtgaagtggaaccagctcaggacggcctactgttatattgccaggcattttttgagccacttgatgttatcttcttggtaatttaaatttaaccgtggtaggaatatttacaccacagaaattggcaaacactaaaaacaaggtgtttttaaacaccctgagatcagagatccagttgatatacatctaccagcacaccactggccatatacaggcttgccttatgccacggggagctctgcagctgaagtagcccttcaaacttgtcctgctttgagccaaattaggcctctatactttcaccttcatcagtcactgaatgagggctgcctggggaaaggcatgaacttggacaaggcagctctctgcagctcaggcagtccctgaagggactgacagttgaagaatgtctactgacatcatttccatcatctagaacaagagtctttctttgaagggggctctgagtagcatattcccgtgtccactgcagcccctccctttaagagactctgatataattgactgggggtgagccagtacattaggattttcctaaagttatctggataattttagtatgcaaccacaatagatactcttcaagaattaagctagttgctgagagggaactgttttttgttggtttgttttcactaatgtttgcactctacttcctttaaataaaattatgcctggagaaagggtttttgtatggagcaattgataaatatttgtagggtggttggctaaaataattataattcctttaaaagaaattctacccactaaagttaatttagaagtaaaatataatagaaatccaataatatattcaccaaatggattaagatgttcatgaattatcttcaaagtgttaatcgaataagtaatgtgtatgcttttctgttaaagaggaagttagaagatctgagctctgagtggaaggcggtaaaccgtttacttcaagagctgagggcaaagcagcctgacctagctcctggactgaccactattggagcctgtaagtatactggatcccattctctttggctctagctatttgttcaaaagtgcaactatgaagtgatgactgggtgagagagaaaatttgtttcaattctaaagatagagataaacctttgtgttattgactgtgcaaaaagtcttagagtacattccttggaaattgactctgattcaaagtgttgcatgacaacgggatatggggagtgttctctggagatacacccacaaggaagagaagagcacaagggagattgtgggagagtctgaaatgtgatttgtctgcagcagaggcctaagccagtctcgcaggagccctacatctgggctggctgtgcagagctgtcctgaattgcaggcagtgggcctggcccttgtattcctgatccagccagccattggccaggggctggctgctgcctgagagtggaaggacaacttggacaagttttctgaggccgaaggcaattcttagtaaggaacaccattaacaaccaatattcctagcatccagggatgtgtgcattgttcctgaagagggacaagtatgtctacaaaaatcacagaaaccacagaaacacacacagtcctactagcacctctccctgtcccatttgcaaacaatttaagagctctcccatttttagttcaagaaaaagaaaaatggattgggaggaccacaagctgacttgggggaggaatatttcctcatttagctgtagttttaacttttgttttcactgcatattttcagtctattttattttctttcctcttcagttgttgatagaaggtattcataaattctcatggcaatgttaatgctggctttgactctcaggggaaagaggccagaaaacttctttgctgtaccattccataattaggcagaactaaaaacatctttgggtgttgttttttgtttttgtttttttttttgccttgtctgcttttcaaagatcaaatgattgaagcattaaagcatggtgactggttcttcaggtaaagttgatttttattttatgtcaagtagaaaaatactgaactggaagaatcacagctggggtagcacaatcataattcattagaaggcataaatagtgcttggattaaaagaagccctacaatctggggacagtgcatctcatgtgccctctgggattactcggcagtcatcagagttagatttaacgactttggagacttaagcattatggttttttttttttgtcaatctgggacactgaaattgctgtatcagggttatactcaactgtgtcaggtttatttgtttttatgagctgtaatttttggttccctcagcgcatatgcatagtttgttcctatgttatcatttattggtgtctgttttctggctgtctctggtaggttcagcctcagactctgtaactccatgaagagattatgttccaatgatgttttataagtttgttaaactctgaactcatgagtttatgtcccatataagccacgttacacatggtaggaaggctccaaaaccagggcgccgaaatccatttaacgtgtaacttacctaaatgtaacaatgtttataagaaaaatacattggaagttccagttttgacttccagcaacatatataattcatccactttatttattaacttccatgtgttgagcatcatactggtgctgcgagtacagcatagaataaaagtctctcctttcataaaacatatattgtaattgaaagagaaagacaataaactaatgaagaaaatatatactgtctcaataattataagtgctgtagagtgtagtctacagattgatgtcaatgggtatttgttagacacacagaatctgaggcccctatcctagacccactgaatcacaatctgcattttaatagaatccccaggtgaatcctgtgcacactgacatttgagaaacaccattacagagaacaactaagcagggagatgggatgagggtattattgtctatagtgtggtcagggaagcttgtctgttaagagaacatcagaaaactgatgtaagtgaggaagtgagcctggtgtatttctgggaaaattattccaggcagggagagaaaagactgagcaacgatactgaagtaggaacaagatgacggaatattaaggagatcagtgagactagaggagtgggtcaggggaagtgtgatggaagccatgagagatactcatctttcatagcactgccctacttccttctccccaacatgagggtctcatcaccccccaccactcttgtcttctcctatgtcctccacattgctgccagtatggagagtctgggaatgccctcagctcaaagctgtttggtgatagctggcagagttgtggtagtagctaaaaaagaattaagggaaagaggaattttctcaaaagcaggtgcttttcatcctctttagcaaaccgaaacagatctgagcattaagtcaagatgttaaatacacaaatgttgaatgaaaaaaaaaacaaaaggtagtcatttaaattcagagctgcttttattaaaataagattttcttttttctttactgtggtagttcaaatatcagaataaagaattgtttctattcccgacttcctgacttgcaggaagttaatcagaaataaatgcaatataaaaaaagaaaatctaatttgtattatgcttcttgtatatgtttattatttcatgtactgtattacaatgtaatagaatttataattcattatagcagattgtttccattgcattcctactattaaatatgtagaagctacacatatacttgtagctttaacatatatgtctttatcctcaaaataactgcaaagaacatatagataatttttaaagattaaggagcctgaggtttagaggggagatagctagattaaggccacacagctagaaagcaagcaagcaagggtttcagtccacatgtcaagctccacagcctgtgttttgttttgtggctgtgctttacactatctctctgtccaagaacctaatggaaaattacagatacagatgcagctggccagcagttaatataatttaactcaatcttaaatttatctggagtaaaagtgatacaagtttccgtgttttttcttttctttctttcttttttctttgtgtgtgtgtgtgtgtgtgtgtgtgtgacagaatcttgctctgttgcccaggctggagtgcagtggtgcgatctcggtttactacaacctctgcctttcaggttcaagcgattctcctgcctcagcctcccaagtagctgggatacaggtgcgcaccaccatgcccagctaatttttgtagttttagtaaagacggggttgctccatgttgatcaggctggtcttaaactcctgacctcaagtgatccgcctgcctcagcctctcaaagtgctgggattacaggcatgagccaccttgactggcctgtttctgtgttttttctacttaagaagtagaaaaaattggttcactctatttgaatttcttagaaccatagaaatccaaacttggaataattattgcaattattatctagttgagtattcttcttttatagatgtagaagctgaggcctaaagttgcttgttttgttttatgaacactaaaccaaactaccttgtggctgcttacttaaattataaattataatggggtggccttgcctgagctgtataaattgttttaattatcaggacaaatcaacatactggaaaaaaaaagcaaaacttgcaattgttgttgcttagacacctgtccatatcagtttctattgttgcatagaagcaccccaaaacttaacagttcaaaacgagtgatttattgctcataattctgtgtgtctgaagtttgctctgtgattagctggatagttattctgatggtcttgcttggtgttacttatgtggatgcagttatctagcaagtgaacaggagctagatggtctaaaatgcactctctcagatatctgacagctggctgttggttgcagaaccttgattcttcataaggccactcatcatcctgtaggctagattaggcttcattacatggtattctcagggcagttttccaagagagggcgggtggaagctacaagaccttctgatgcctaggctttgaaacgtgtaggttacttctgctaagttatattggtcaaagcacctcaaaagatcagcccagattcaagagatgaggaaattacttcatctcgtgaaaggaggagatgccacatcgcatatcaaaggggtatgcatattggggatagaaggttttattgtcaccgtatttatacacaaatcactacattggggaaaaggagggaaactggagatcaaaagtgttggtcttaatccaacttaattctcaaaaattaccatgcgttagaaccacccagttcttcgcaaagtatagattactgggcttcaaccccagagtttctgatttactagctctggggtgagacctgcatctctctctctctctttttttttgagactgagtcttgctctgtcacccaggctggagtgcagtggtgcaatctcggctcacagcaacctctgcctcctgggttgaagcggttctcctgcctcagcctcctgagtagctaggattataggcacccgccaccacgcctggctaatttttgtatttttagtagagacagggtttcaccatgttggtcaggctggtctcgaactcctgacctcaggtgatccacctgcctcagcctcccatagtgctgggattacaggcgtgagccactgtgcccagccaagacttgcatctctgaaaagttcctaggttatgctgatgctggcctatgctttgagaactactaccacagacatacagtgagtggggaagaataaattcatcccttctgctgtgtgcagcaaggagtgggattccaatgagatccagtgctgtgaatgctaaagggaaatccatcttattttagcacctctactccccatctccccaccccgaggatgttatagcttagaagttcaaggagatggacaacacactaaaccaggcagtatttgccctgcagagctgttcagtgttcctggatgagacctctgagaagaaaagccataagttcctctagagactttcacaatcatttaggtagacaggactttgcatgggtctgaaggcttgcatggcagatggaggcaaagagccagcaaatctggttgtaaatgtcaatgtgaatcctttcttatccacaagctgctgggcctgagaacattaatgttctacaatacccgatttagcatttttgaaagaaattgcatatagacatgcttaatgtgaagactccaaatcaggatatttgattcaaatgtctcttggtaataactatggaatgaataacccattgtatatggacatatagaagagccagttaacagagttttctttttttttttttttttttttttttttttttttgagacggagtctcactctgtcgcccaggctggagtgcagtggcgcgatctcggctcactgcaagctccgcctcccgggttcacgccattctcctgcctcagcctcccccgtagctgggactacaggcgcccgccaccacgcccggctaatttttttgtgttttttagtagagacggggtttcactgtgttagccaggatggtctcgatctcctgacctcgtgatccgcccgcctcggccttccaaagtgctgggattacaggcgtgagccaccgcgcccggcccagagttttctagttgattaaacactggtaaaatcatctcttcctgtaattaagtttggagagagcaagtctcaagtgtaattaggaaagcacagtattggaggtcaagaagcctaaattctgatatctcagttgtgctaccaactatataagggatcaacagactgtttctgcaaaggaccgatactagatattttctgctttatgggtcatgtggtcaactctgtcattgtatactaaaagccacagacaatacctaaataaagggacatggctgtgctccagtgacactttatttacagaaacgaggcaggtaagatagatttgacccttagtgggctacccatttccccttagcactcagccttcctataaaccatgaagcgtctaactacaagtacctgtgagtcttcctgagtcctttctctgcctgtaggagtagctctcccacttgcagagcaggctggaagctggggaggagattatctctggaatagcacttaaccaatggacaaaagctgggggataaaggtgttggtcttcatagttttcatactgctatgaagaaatacccgagactggataatttatacaggaaaaagaagtttaatggactcacagttccacatggctggagaggcctcacaatcatggcagaaggcgaaggaagagcagaggcacttcttacatgacagcaggcaagagagcatgtgcagggaaactgctctttataaaaccatcagatctcatgagacttattcactatcaggagaacagcacaggaaaaccccacccccatgattcagttacctcccacatggtccctcccacaacacgtggggattattggagttacaattcaagatgagatttgggtgagaacacagccaaaccatatcaataaatatcccaccttcttctccccttgggtaggacacctccaatgcatgttccacactaaaaatctccagtgaattgggcagttgaccacaatgataagcatacttattagcatgcctcgtataggcttccttccgatgtgtaggctttcttcccattttggcagaatctggacccaaccccacatctcctgagtttgatttcagtcctcttcagtattctcatatatctcaactttgttccctgctgagatacaactgacagatatatatgtatcttcagctctgcagctctatcttctcttctaccatggctttctgggatcagctcccaattgaattatttgtatttaaatccttgtctcagggtctacttctgagcaaacctaaattaatacaagtcttagaattagtgccacagttataccttttgagtaagttatgttgcaattcccattttatagatgagataaccaagggtcagaaaggttaaataatttgtccaaggttacagagctagtcagtgacagagtgggtattcaaaaataagtctctatgattccagagcttatgctattaatcagtgcaccatgtatcaagcagtgatttagttatcttcatttgaattttttgaagtctctatttaaattgaatatcaaatcctcacatataaggttatttatacctttttatttgttttatttatttatttatttttgcttaacttttttttattatactttaagttttagggtacatgtgcacaatgtgcaggtctgttacatatatatacatgtgccatgttggtgtgctgcacccattaactcgtcattgaacattaggtatatctcctaatgctatccctcccccctccccccaccccacagcaggccccagtgtgtgatgttccccttcctgtgaccatgtgttctcattgttcaattcccacctgtgagtgagaatatgcggtgtttggttttttgtccttgcgatagtttgctgagaatgatggtttacagcttcatccatatccctacaaaggacatgaactcatcattttttatggctgcatagtattccatggtgatttatacattttaatttgaacttcactcacctctacaaagttaaataaagcattccatttccatttcaataatactttaaatatctaggcagttaaagcatgaggttacttggcacttaaatgtactcttgtcatactacttttgttggcttaaattgcaaaaaaaaaaaatggttaatttattgtgacaataccctacatttatctgcagtgatcattttttttgtgaaaatggccttcgtttatctgcagcaaaggaaaaagaggatggcaattagttcttgcattcttattcctctcttgggtcctgatccttctcattaatagaaacatggcaggggaggggtatataacccacaccctttcctgttgtggttatgtttccactgttgattctgcttcaggtgaacctttaggattaggcaaataaatttccgtgaggccaaatctttttcttcctcattaacagatgatttctctgctaaaaacacttacgacatggctatactattgccggttttatagttacaggctctaaaccttgaaaacttcctcaaagtctaatacgtcaggagcaagcttttgtacaaaaaatgtgaagacccttaatcagttccaataacaaaataaatccattttaaaccctatcccaagatactgcaaggccttggagcagctggagagactccttaactcttgacattaattaattaatttaaaaattcatatttgtatgtatcagtgaggtaagagtgcttgaaatataatgagatgtgtcacactgtagaaaggggagtgacaacagaaagccctggctggtgaggccccagcacttctcacactcatcagaaggaagtctttccatgaaggcagtagggggtccctggtcccaggccaggtccttcaacaatgctcactggttaacaggaaaggcactacagtggcatcattgttaacatccaagacagtgatagaatgtgaaacttctactgtttagtatttagtattcagcatttagatgttaattatccattttgtgatgaagttccctttcttctccctctcttaaccttttggtagttttattgcatggttaccatttccagttagggttgtgctttggggtctgaactgatgaaggaagagaaactctagttcatcatttctaggaaaaagagaaggctaacatcaattctgatgattagagattttttgattacctatgtcctgcattttaacagaaataaaatgttaattacagtaaacttactttaaccttcttatgctatttaacactcttcaagaaaggacttttgcttgaaatcactacagagtataccataatcttgactgtcatactctgaccaagaaaccagaactatttaggcatatttatgagagtaagtaccctaccgctcaaaatggaaggcttcaacatgtattcctaatatttcctaaaacttcactgaatagttttaaaattgaatataactttaccttcagagagaaacaagatttcgaaaggaaattgtagcagttttgtacttcaattgtcgattttaagattgtggtctgaaaagtatttgaacagtcattctttcttttccactatctcaggaaaggctctcattctattagaagcaatcttagaagcgtaactgccaactctcttcttaaaaagtgaagagcagatggagttctaccaatctgctatacttgacagtttttcaactacctaacctaagttccagttactgtctaaattatttttattcgaataggaaaaatacatttatgcttactgtacatttcgacagtgttcattctttgaggtctgttatttaatctccttcccacttttcttttctatcttaaatcagatgagtccccatggtctggcaacaaaacagctgtttctcaaatttttaacgtctctgtggccctcctcctacccttccaagtgttttccatactatttttctgttgtgggcttcagaattggatgctgttccataattactggtcttcccatgactctgtcacatcataaagtctatatatacccttttcctacgtttacatgccaaataccaggtgtgtctagctttaattcaatgactagcatatggtaggtattgcactaatattttttggtcaagtgaacatatattttacagatagatcaaatacatcaaccttcccatgtaataataataataccaagaagattaaatgatcgcgtgcttgaccagctgtttagtggcagaatctggacccaaccccacatctcctgagtttaatttcagtgctcttcagcattcttatatatctcaactttgttccctgctgagacacagctgacagatatatatatatatcttcacaatctcagtagtaagccctatttttttaagattacagtgctgatcaaagagggatattctatggcattgatgcaaatcttccaggccagatataacccctatctccttaaaccctcattcttgactgtgtcttgaaatcaaatttgagaacctctgctttacatgctaccttcctcttaaaattcataaggtttattccttctctcatcttcagtatttttatgaaaatatgttttactcttatttccaaagtgcttgccagcccatgctgagttcattagacaaacaatctaggtatcctaatatttaggtaaaattgctagcagcactaactataccagtacccacttaaattgcaatataaacctacaataggaaaaaaaaagtcaaaattatactactttcaattcctacttctggaataattatcacaccttcaaaaaaactcataattgttctccaatattaaaaaccaggaactaaattacatcactatatatatatagctatatagacatataactgtatatagtttatatatatattacatgtcactatatatggttatatatacagatagctatatctctatatagtttttatataggaaactatatatataaactcatatatatttatatataaactcatatatatataaactcatatatatttatatataaactcatatatatttatatataaactcatatatatataagagattttatatgtatatatgagagacaatattgaaataaaacaaactagccaatctccaatgtcccttcattttcccaggactcttctttattctcaaagaaatgtatgaatacacaatataaataaatgttctataatgttcattatggattataatagttttcttgtcatactgaagtgaatgggaattgtttcttcgattattagcatacttttcataactatgtgatttggtgataggcacttttgcttactaagttcagcatgatcaaaacagaactcctattatttttattgttgattcttatttctttaaggtaaaatatgcccttttcctttgaacctgcacactgtttaacaaataagcacataactcaggattgaattgtacacttcgatttgagcttttttttcaaggtcaggacccagtttcacaagaagttttattttttccaatacaactgacatccactcccaccagctgaaagacaagaaaaacttgtctaataaagctttcagattcaatttgctgcctgcatacagcttgaggaatctctggaggtcactcacagcatgtgttgcaaccccaacagggagaagtaatgaaaagattctagttaaaaagctgacactgccccttccaacctctttgaatgtgaatataataagccagtttacagacgcaaatctctatgattctggggatttccatcttgatctctgactccaaggaacatttgaatgcatggatttgtatccattatctgggtgaataaatgcttcatattgaaaaaaggggtgctttaacaacataagtctgatgtaaatcaggcaaaacaacattgtcacttcatgtttaactctcctggagggtctctaaggtctcacagtttggttctattccagtaatatataggcctatcatagccattttcaaaaataatacctgctttcatttcgattattccccctagcttttgcattgacccgaacatacctaatatttatcttagggctaacacgcattaatgccttgctctgtaccaggcattttgccaagtattctttgtgcatttttctgtttaatcttacagcagccttatgaaataggtactacattattattatttttcaccatgagaggaaatgaaagcctagagagaatggttatccaaaaacacccagctactaagtgggcacagcatggccttgaacctgagtctttataaagttcatgcctgtcttttacctttatgttaaacatactgaatcttggtcatgcagtctatgaatgaagactccatatactctaggaccaattctaccatattgtgcatgcttttgtacatattttccaaatgaaattaaacaacaatactctctcttcccctttcttttccgttttgcatgacatctaaatcttttattaaatctccgtgggtggaattgggccttaagtagtagtacctttgaagcttaatactataacctcagagttacggaagtggtttcaatatgaagaaatatatacgttcttttcttttcttttcttttctttttttggctcctctagaatagaaggcaatcaggagagaaaaagacattaagatgataggcttgattctcccacagtgttactacttagctttatttattctcccacatctgtaactgtcaattcaaggtcaaaaagccagtacagcagcagaattacaaaaagtagatctggaaaatctatagggtaccatagtccagcaccctgctgcaagtcaaaatcaattaaataaatatgtttaaacagcacttcatttaatcttaagggcaccacgactcccttggaaaattcttttttgtgttcagacctgattctctgaaagtattttctagtgttttctttgttcggtggctgtggtgaataagtggacccaattgcctacagcatgaaatcgtagaaatgaatatgggctggaacttcaatcaatcacacaaaccagaaacatagagttcatcacctcttctggaaagcgtccccttcggccgtcaaaagggtagagtttcctccaacatatgttcatacttccctttgcctcccatctgcaatttcaaccagtctgttgctctcgccctttttaggcttcacataccggatttcttcttaggagctcacttgaaaaaagggttgtatgctttaaaaatactaaaagtcactggactagatgataataaaatttctgtaaaataaaaagggagttaacagaggtgttaccacttatcataatggatattgttgacctttcctctagccagtgtcccacttaagcatgcttcttggctggaatttatttttctcatctggataaatctgaagcattatagtaaaacccagtgtgagcaaggccatggatgcaagtggattgagatgaatgagtggatagacctgcgtgggcagaaataatgaggtcagcaataagccataccaagggatgcacactcaaggaataaattggaggtagcagaataactgaacaaatgatacatttgatcagactgtcacatgaatatcaactgaaacaagttatgactgtagttagtgaaccctagagtgaagaaaacaaaatattgaaatccatctgatcaaaaaataataaaattgtttacatgtatatattatctaaaatttcccttaagaatgaagattataaattcccgcagttgaggaaactgaataagaggagaatcaggacagaatcttttctcttcgtattcctagtccatttttcttctaactacagtagtgagaacaagaatttattcaccaaatcataatacattgcaattaggggatgccatttgaatcttggaagacacgatttgaggcaaataaaaaatccatatttataaagtcaattattggtttatataatttactgtttcagcgggaggtataggttagtaatgtaagtcacttcaagaaggttttggtcgaagttttgccaattttttctgtaaaaagccagatagtaaatattttgggttttacaagccagaagatctttgttgaagttactcaactctgctaatgaggtgcaaagcagccataggcagtttgtaaatgcataagtgtggctgtgttccaataaaagtgtgtttgcaagaacaggcagttggttggatttggcccacaagccgtagttcactgacccctgttttagataaatactagtcaatagattccttgtagctaataaagggaatatagattgtttaatgtgtttccctaatcttcttaaggcttcctccaggggaaaaaatatttcttatcatcagcagtgttattaatgcttactcagaacaaagaataccacttacttagcatagaatggacatttataaagccactcatggaaagaataaagagatgtgaaatacctggtacaactcttaagagtgttccactatcatttgaaaaaatgatgagtagtagttatataaaaggactcgagcctaaaacatttgttctcactttggataacgttttcctatctcagcatcaaaaaatacaaagaaaggggataactaggtcttagattttctaaattctcatgactataagtcccatatatttagatattgaagtacccttaaatatacctaagtagaagtaataatttcgatattatgggaaatctaattactgctcatagttctcgagattaaaatgttatacaccacatctcagctttctttgaaacttgaaatggcatacttgtacaaaggtagaatggtctcccaaagcagcgtcatagattagcagaaaagagctatgataatgccacttcaactgactatcatttaaataatgaattagttaggaagagttaaattatatagttacaggcagcaggagatgtcaccatcagggggataagaagccattttccagtacactatttgacttaactggtgcagttccttctttaactgtaggttactcatttgtatccttaatttatcaatatactaatctgacaaataatttattaaggattactgtgtgccctcctgtgtgttagattctagggatacaatatggatcaagataagcgtgattcctagactcctagaaagtaagaaaactaaataactgtacgtgacaaatactaggatgtagaatactagggaagaatcaggaagaatcacctcacccagtctggagtattgcaacagagcgatgtcagaggaaaaattctggaaaaaaaaaaaaaaaaggaaatttgaagatgagacttgaaggataagtaggtgtacctaggcaaacaagtaggggagagtgttccaggcaagagaaacaagtaacagttggaggcaaaatggagcctagcacgttttaaaaatatcagtatggctgaagcactgagttggggttgggaatgggtgaggagcgatgtgtcagggaggacattccagatgatgctggaaatgcatgcatgttcgcaaactgcattttaagacatgttagagaaatcaaacacattttatttgaagggtaattgaaagccactgaagcattgtagagagactagtgacatgagcatatttgggttttagagggattactctggctgaagaataggtaactgattggataagagcaactttggaggctattccagtggttcaggtgatagataataatgacctaaactaaagaagtaataaagggaatggagacaaagtagacagattcaagtgatacttggcacgtggaaacaacaggccctggtaactgattggacataaaatggagagatacagagaacgcgaatagaacacccaggcatttggcttgataaaccgagtagaccgtggtagaaattactaaactatggagtattttagggttcaggggaactgtgagttcaattttagacatctagttttgcaaggccactgaggtaactgagcatatgagtcaggagagaagtttaggctaaaaatatggatgccagagttaaccagcgttatgataaaacaaagctgaagtctcgagggtaagaacacctaaacatctaggctggagaaggcagcaggtaaaaagtaaaaggagaggccaggcacggtggctcacgcctgtaatcccaacactttggggggccgaggtgggtggatcacctgaggtcgggagtttgagaccagcctgaccaacatggagaaaccgtgtctctactaaaaatacaaaatcagccaggcatggtggcgcatgcctgtaatcccagctactcgggaggctgaggcaggagaatcgcttgaacccaggaggtggaggttgcggtgagccaagattgtgccattgcgctccagcctgggcaacaagagtgaaactccgtctcaaaaaataaaaagaaagagagagagagagagagagagagaaacagagaaagagagagaggaagacaaagaaaggaaggaagggagggagggagggagggagggagggaaagaaaagaaaaggagaaaaattcaggagaatggttacttccagggagatggaggcgattgtgctgtggggaacacaagggtggggtcaaggtattagcagtattctatttcttgattggggttgtatttacataaagtgttgctttataattattcttcacactttatgtgtacgttctatgtaatcatctatagataagacagatttcactgtaaaagaaaataaaagcttccaaaagattatcatcacaattgtaacagattcccctggtgcctggagtcacacgccattttcctgcactgcagttgcagctgcagtggacagccctgtgtgagttcagacttgcctttagctgacagcatcccatgtcaagggaatggctcccatttttctactttctatctaagggacttctctgacatcccaggagcccacagattttgtgagctttctcacccttgaagttttagtgagtgagcaaccttcaaccaatggagatgggagcccatggatatatttttaaccactattccttccgggggcaaggggaattctctgtgattctcaggaacatacaaaagttctgtcaaaatacagtccccatggtccataagcattaccttgatgataatacatttgattggcatttcctccccctctgtctcactcttttggtttttcattcttgcttcctagggatcagcttccaaatgagctatctgtacccaagtcctcatccaggccctgttttcaggggacccaaagacaacaataagaaaaatggaactgaaagaggagaagactttaaggcatgaaaaaagttcctctgtattccatactgcatatttaactgcctactcaacagttccacttagatgtctcaaaaataatctcatgatcttttactgctatgaaatgcatgaccttcccctgatatattcctttcttcaggttttgtagcaccacttagctatccagtaacaaaatcttgggggtcattcttaaaaccttcccacctcacccctgctggacatccaccactaagttcagttgatttttttgctcctaaatatttcttggttcagctttcatttttagatttatcctgcatacccctgtacaatctcatcatctctttcctggactgttacagtagtcttatattaggatgatcatagtcttgatttgcctagagaaaacatgctttatgtcattgcctcagagtgactaatagtcccacctttcacttgtaacactatgcaggttattgggttaaataatactgtcatccaaacctaatctctcctcattcatttcttctctcctatgcatcttagctgtgtgaaaattcaaaatataaatttgatgacagacagaactctgtttaaaatgctccagtaccttaccatttatctcaaaataaaaatttcaaaaaaagaaatgatatcccacaggatcttgtatagtgtgaccctttccatttcatcatccttataccagatactgtgaactacttactctcttatctccacattgacctccctcctagttttgttttgcttatgaaagtgcttattttctgttttttaaagccattgcacatattggtctctctgattgagacactatccttttgaatttttgacctcatacctactcacttttcaggtctcagctcaaatgttatactcaggaaagacgctccttacctcccaaactaggttagtgtaaatggcactatttatactcctcttccagagcacacaccaaatcttatatttatttgtgggacaatttgaattcatgttgttccccctactcaattgtgagcttcttgaggacatactctgcctcctccttacctagctttattgaagtataattgagaaataaaaactgtatgtattcaaggtatacaacatgatgattttatatgactatattgtgagatgattaccacaatcaaattaattaatacatctagcacaagaaatagttactattgtgtgtgtgttgggggggggggatgaggacacttaagatccagtcttgtagcaaatttcaagtaaacagtaaagtattattaactatagtaaccataatgtacattagatccccagacatcttataactgaaagtttgtgccctttgaccaatgatatggtttggctgtgtccccacccaaatctcaccttgaattgtaatccctgtaattcccatgtgttgtgggagggacccagggggaagtaattgaatcatgggtttgtttccccccatgctgttgtcgtgatagtgaatgagttctcatgagatctgatggttttataagcatctggcatttcccttgctggcactcattctctctcctatcaccctgtgaaaaggtgccttcctccatgattgtaagtttccggaggcctctgaagccatgcggaactgtgagtctattaaacctcttttctttataaattacccggtcttgggtatttcttcatagcagcatgagaacggactaatacagtaaattggtactgcagagagtggggtattgctgtaaatatacctgaaaatgtggaagtgacttggaactgggtaagaggcacaggttggaacagtttggagggctagaagatgacaggaaaatgtgggaaaatttgaaacttcctagagacttgttgaatggttttgaccaaaatgccgatggtgatgtggacgatgaagtccaggctgaggtggtctcagatggagattaggaacttcttgggaactggagcaaaggacactgttgctaagctttagcaaagagactggcagcattttcccctggcctagagatctgtggaaatttgaacttgagagagatgatctgaaattggaactttgttttaaagggaagcagagcatcaaagtttggaaaatctgcagcctaacaatgtgatagaaaagaaaaacccattttctgagaaatacaagctggctgcagaactttgcttaagtaaaggagccaaatgttaagcgccaagacaatggggaagatgtctccagggcatgtcagaggtcttaatggcagcccctcccatcacaagcccagaggcctaaaaggaaaacatggtttcacgggccaggcacagggccgtgctgctttgtggagtctcaggacttcgtgccctgcataccagctgtggctcaaagaagccaaagtacagctcaggctgttgcttcagagggtgcaggccttagtggcttacatgtggtgttgggcctggggttggacagaagtcaagaattgaggtttgcaacctctgcctagaattcagaggatgtatggaaaagcctaggtgtccaggcagaagtttgctgcaggggcagggccctcatggaaaacctctctgctgggacagtgcagaaggaaaatgtggggtcggagctccacacagagtccccactggggcactgcctagtggagctgtgagaagaggaccaccatcatccaaaccccagaatagtcagaaatgctgatagtttgaaccatgcatctagaaaagctgcagatactcagtgctagccatgatagcagctgggagggggctgtaccctgcaaagccacaagggcagagctgcccaaggccatgggagcccacctcttgcatcagcatgacctggatgtgagacatgtagtcaaaggagatcatttgggcagttcaaagtgtaatgactgccctattggatttaagacttgcatgtggcctgtaacccctttattttggccaatttctcccattcggaacaggtgtatttacccaatgcctgtaccccccattgtatcctggaagtaactaacttgttttggattttcaggctcataggcggatgggacttgctttgccttagatgaaactttggacttggacttttgggttaatgttggaatgagttaagactttgggtgactgttgggaaggcattattgtgttttgaaatgtgatgacatgagatttgggaggggccaggagcagaatgatatgttttggctgtgtccccacccaaatctcaccttgaattgtaatctccaaaatccccaggtgtcatgggagggacccagtgagaggtaattgaatcatggaggcagtttcccccatgctattctcatgatagtgggtgatttcacatgagatctgatggttttataagtgtctggcgtttcccctgctggcactcattctccctcctgccaccctgtgaagaggtgccttctgccatgattgtaagtttcctgaggcctccccagccatgcagaatggtgaatcaattaaaactgttttcttcataaattacccagtctcgggtatttcttcatagcagcatgagaacagactaatacaaccaacatcccctcttgtcgattttcattgaatccccattacctgggaatgaatgaggaaggcagaaatagaaatcagcgtattgttcaatatagaaatcctgaagttacacaagataattacgagcaagactcagtacagagaaggaacccttgagctggggatcagagtcttctggaaacaaggagtaccaaaggggagtgaaaaagagaagtggagaatgagtagtagcagtaaaagaggaagtatgtaaagaaatggaaataaagatgaaataaactgtcatcttgttccagagacaaagctagctaggggagctaaggaaatttagagggataaaaagtctcatccaaaccttcataatgagctaagggctagtttttcatagaccctagcccaacttgcaaccctctcactctcttacttttttcctggctctgttttgctttactgcctttcatataatctaaaatgatgttaaatgtatatttcctgtctcttttctatatcacaatataaattccatgaggccattgcctgtgccacatttaccactgtactcccagtgcctagaatggtgcccagatcaagtagactcccagagtgtctgttgtcaaatgattctcagtccagtgatgtttgcactacatggtgctgccacttttttttttttttttacttcattccatttggaatttggatcattttgccaactttagggtttattcctctttatttcccctgtgtttgctgaatatctgactatctatttttctcagctctcttctcctcacactttgcctccaacttcctctctgctacaaattatacttagcacaagactggagccacttttcattgattttgatgtcagtgcttgagtgacaactccatgtggagaactttcaacctcctgctgtctcgttgtttgctttgaaaaaaaaaaatactcatcttcttcctgaacccactgggtaaatttatgctcacaaaaaagacaaaacttctagaacaaaaactgtatgagcttcaaaagtattagttttcccttgattttgagactcaaaagtaccatagaaattttaaaagggggatgaagtaattttgtcattcaacccgatatattttacaatttgaatgtcagaaccatgaaatgtcttttcagtgtactatcatcctcactatttccacctataaaagaaaagcaaaaatattgtttgagaacaaaaaaatattgcagtagcggaaaaattcactttaagtctttttttggaggttgccacatcacgcctgtcttcagctcctctcactgaagattctttgttttcttgaaaccagttggtcacttccaattcttaccacctataaatcttcctggttctttatatttcactttatatgtcccttatctcctctgatttttgttccagtctttcattttttacattctttgtcatcctatatgtcagaaagaatctgccactccaaattccttaatatatttatctaccagtgtttatttgcctgtcacatgtactcttcagtaatccattgacttgaaaactttctactctgtctttcttactatagtttgcttcttgagttcaaattattaatatattaggtcaagtaattctatttttatgcacattttacctaacattcttggtaaatataattgttttttaaattgcatcacatggtgagtattaatttaagacgtaattagtattaatctactggacaagattttatttattaactgttttgccctttgctagggttctgtaatctcaccctcagtgcctttaaatagtcttacccaaggatcacctatccctcttcaatttaaattctctattgtgttagtttctgagattgcacattctctggtttggtttggtttttcagtgatctctgtggtcacttccaaccatttctacttagtttacttttttccctgttagccctcttcagtgttaatatcacctggaagttaacccattcctagtctgcattgctctatggccagcatcttggctgattggccatcacctatcctgtacttattgtcaatttttttaaattttttattgtggcaaacagcacataacggaaaatttaccatctgtctttgttcatgtatgttgctataaaggaatgccagagactgggcaatttataaagaatggaaggtttatttggctcatggttctgcaggctgtacaaaaaagcatggcaccactaccaacttctcatgagggcctcaggcttcttccattcatggtgaagggcaaaggggagctggtgtgtagagatcacatggttagagagcataaacaagagagagaggggaagtgccaggctgttatttggcaactagctcttgcagaacctaacagaatgagcagtcactcaacctgcccccaggaagggcattaagccattcaagaaggatccacccccatgaccccacacttcccgttaagccccacctccaatattgaggatcaaatttcaacatgagatttggaggggacaacatctgaactatagcattatcttaattcaaataattttactaccaattccatttattagagaatctaagattaagactactgaaactatgccaatgattatctctagttcaggcttctctcttcaattccaaactcatattttcacctgctgacaagctaccacgtagatgttccacaggtatttctaactcaggatatgtaaaattgatgttatcattattttctgaaaatctattcctcttactatattccctatttttgtgaatgacacaatctaatggactggccatgttaaaaatcaggaagtttttctggcactttctttattccttaatattaagccccacgataaattaccaatcctttcgatcttgttaagacaaataagcttgaaatttcttatctcttatttagcactgcaattttgttttctcattcattcagatagcatcttctacaaaacctcttcactagtttttctgtctctcagctcatcttgtacactgcaaatccattaaaactacactttttaacatgccaatcataatgtattagtaaaggttgtataatagttctctttctcttctaggataaaagctaaatttttcagcttggtacacaaggccgttcatggatttggtacctactagtctatctagggtatttcctacatcttccctcctctctcttgaaaaatcaagtaatactaaactatttgtaactccctaatcaccaattgctgcctttatactttaacatatattcttccttttgctagaaatacatttgtcataataggctctttggtaaacttaccattacattctcagtttataatattatttgtgtaagtaccttttttcctacttagtcctccaggggaatgcatgtgcttctctctccatattatcattttaaaatttactcctatttcagcaagtatcataatattttactgagattaattgttggcatatttatgttaccctggtgacatatttaatagttaagatgctttgggctgcaagaaagagaatgcactttcaaagtggcttcaaaaataagaataattcaactcacataactggaagttcagaggttaaagctggctccagatgaagtacaagcagagctctgtcactctttctctatgactttctttgtcctgatttttttctctgcgtcagctttgacctcctcactagttgccctccaggttccaagatgactgccagcaacaaatgggtaacataatttcttgttacagtgagagacataaacacttacctcacagattcagagatttcaccctcagataagaacaatcaaaattttaattgtgtatctactgtatcattagtatatgtattaggtattcatatatatctactattgtactaaagatgattcagaatggtttcataagctggttgatttaaacttttcttcctgaaccaagaggatgagattatcttgactggcttagaatcgaagatttaggtgaatctaaatccatctccagaactgaggatggattccgtagaaacttgaagacaattggaattctcctagaaagcagaatttcagagtgggtgtagggatatctttgaatggaagttgtttaagccaccaacaatattcactccattggggtgacactgggcccaaaggtacccagttaatatttgttcaacgaacctataggaagacaatattatctgcaagctatttataaactaaatgacaacgagaagtatttttagaaaagttaatcatatacaatttagtcattcacattgggaggctcttcctaaatttcgtttctgatccttatcttgatctttgacgcaatcatatcttggcctccatctaaaagccagtagaagcctctggccattttttaaacaattggtttaacaacattaattggaatctatatagctcaacttaaaaaaaaaaaaaagaggaactagcttatcataatacaatattgtcaaggcaagtgatacttccatgcagctattcagcatttggtgtattcttggtttctgcagacctaataaaaagagattatctcagcgtcctctaggtttaattttaaaaaacaagaaaccatgaacaatgaaaatgatttcaaaacatcttcactcacatctaaaatatgaaatagctagatcagaggttcttaataatttaatcggtgaagcataactgaaggatttagaaaaagtgcctaaactattaaaagattcttcagctgctgcttaatgttgatatcaagttattttttacactggcaaacagctaagccattccctggtcacatccacttttcagcatttagcgctcctctcaatcatcccgatcacagccccaggaatgtttcatggcatctccgcaataatagtatattactattgggtcctgaattttgaggtagtttatctttcagaaaggatatgaatagagcaataagtccaagtagagtgggctttattaatgatgcccaagattttagacgtatactataatcttcaatcaattttaacaccacttcccttaccctagttttagtctaaaccagtccaactgtgctgtagtctcagataatacaatgttagattttttttttcaagatatagaattgtcgggaaaacttgtatgtaacctataccaatctaaatttcttagcatttaactctaaagagtaaagcttttagcacttcctgtgtaatacaagggcaagtgctgatttctctgaatataattttcctttgttagcacatatgttcactgtttaataaaaataagaatgcttcaattatctccttttgtcaagggcctgagaaataaagaaatatacagagggtcccaatctaaaaatgttttgatttacaatggttcggcttaggatatttttattttacaatggtgtgaaagtaatatgcactcagtagaaatcatacttcaagtactcatacaactgttctgcttttcatgttcaatacagtattcaataaattacatgagatgttcaacacctttaataaaataggctttgtgttagatgattttgcccaactgtaggctaatgtaagtgttctgaccatgttgaaggtaggctaggctaagcaatgatgttcagtaggttaggtttattaaatgcatttttcaatttatgatgttttcaacttatgatgggtttttcaatttatgatgttttcaacgtatgatgggtttatcaggaaataatcccattgtacgttgaggagcacctgtatcaatataggcatttacacaactctcgtactgatagcggcaggaggcagagaagctctaggcagaaaagggatggtccccagcgaaaaccccaccctcaagccaaaaagcctgaaaccgcagctcaaagtgggaacttatatcccagttttcctgctcgaatgttgcctttttctaaaccacccatggccccaccccaccccatcctgtgcctataaaaaccccagactcagctggtagacaggactacagctggacatcagagagaagcagcttgacttcagagggacaacttgatggcataactttagagaagaatccggctggacttcaggggaagattacttgccacccccatccccttttcagctccccttcccactgagagccactttcatcggcagtacaatccctcacatttacaatccttcaatttgttcatgtgacctcattttccctagatgctggacaagagctcaggagccacaagtgtgaatacaaaaggccctttgcccttgctggtggagggcagctgcctcctgtgaaaagacaaatggcccactgagctgttaacgcctaagctgtccgtggatggcagagctaacagagcactgtaacacaccctctggggcttcaggggtcgcagacgcctccacctagatgctgctccagtgctcatgcactccagttcccacctcgtttgcttgcacactccctccagtgaggagttgagagcagtgggctaagtaaataaggcacccctgttgcgagttccacaaaggggtcagggaaatatcctgcttcgttactaagtaggtataaaccctttactaagttagtaattattcagtaataatacttaaatgaaagctattctgttagactaaattcagattatcaaagacacgacagaaaacagctttctcattcatgaacctattatttccttttgtaaaatatgttaaatgaaaatacagccgtcatgctaatttctaatggtagaacatattttgaaaactcctttatgtttggaagattttgctttagtgcagataatcagaatgatgtgatatactaagaaataatttttaaaatgagatgtgacatttctcataatctaaataagaaatggcaaaacattgtcctaagctaaataactcatatgaagtgataaaatattgctttctaaaggtccatgatatgtagtgatttctaatgtgtttaatagcattgatcctattgggtaattgggtggttctaacatgtaaggaaggcctccagtactaatttcatgtactgggaaactactgggcagggatgaatcccttaactcctaagtaagactatcagatcatataaatctgctttttgatttgcaaagactcttaggcatacctcttgagaatattaaacatctactaaattatatgtaaagcatttcagtctaagatttacaatgctcaaaggagaaagattttaaagttcagcattggaatttccataatttccttccaattgtagaattttacaattgagatagcaaataataatataaataaatatgtaagactgaaatcaacataggagtttggaaagaagactgtatgggttaactagagttgtcaacaaagacttcacagaagattgtgatcgtagacattagtaaggaataaaatgggtgcaaaaaaaagtctaagaaacaacaaggataaatttattttgtaaagagtgaaagcatattgggtattacataaagagactggctagtttgacacaatgtgtacttttggggtaagcagtgggaaatcactttctgtaagtaaagtggaagagaattcaggtattggatatggtcatataggatttttcaacctttgttttgcccccatccctatcctaccagtatcatcacagatgttggcaatattcactcacttgcctgaagatagatattcatgtcaggggctacagatatgtaaaggtgaatgaagttaaatagcaaaattcaagcacactagttctgactgtgcaccctctctcactcagaaaagcactttggaatgcgagagtactcttatattgacaacctttagttggttctaatttataaaaaaatataaaaatatttagacaatttggatattttatatctatgccacaacccattgtcaaatgattgagatatcattgtttggcaacaatgaaactgaaatcaactctaagagtaaagagtacgacttttaaagatatttggttaagagtaatgttgcaaggcagagaccaacattatagaagttctcaacctgtgtgctggatatagctaaaatttcccaggaccattgaaagaaattctcaaatccacaaccacctcaagtgttgtctgtgaatcaaaggagtgatgcattacccacaaacatgtagtagacattttttaagtgatgtagatgctactgcaattaataaatgcaaaattatattacaatattactgaattcagaataagttgattttgtcactatttttctcaatctacgcatgctagatataaagttattatatagagacgtaacatttttaatatttcagaagcatgctcatgatattgtaaaccaggcactgttaaaagatcactggattgggaattaataaacctgggatctagtcctcatttgatctcttgttggctatggtttgggggttttgggcaaactattcaaccttttctgccttggtttaattgataaatgatggtgttttcccagataaatcccttcccaacttaatattaccagatgtagcatctatggtttagaatgtacagtataaattaaccttcctgaagatcttcacaagttactataacctatattttcatggcactgaaaactaagtttttgatagcttacgtttttataaataatttacttactcatttttatcataataataaatctgattcactaatcaccaaaatatcatttttgaaaatagatgcatgaaaggatccgaacttgttatggttttatctgttcaagtcacctaattttggtagccacaggcccccattgtcaataggggaagattatccattttagcaatacagtctctgataacttcagcccatatgcccttcaattccacttttacgtcagattgaatgggaatgtgaggcccccagtagtaaactaaccctactttctctttggaaattggtctttctacctagctctttgcctctgttcacgttcttgtattccacagaaaatatatacattaggtgttaaaatcacaatgattaacaatttttaagtagaaatagttattaagtatagcataatcatgcctttgaattagtacaaaagtaggaaacagagctttagtgacttttttcattctttccaccatttacagggcaaaaatgaagaattttaccaattcaaaactatgcacatgtatagtttccaccagtatttagtagttatgtttctcaagatgtataattcctttcctttctgttttctgtagtttgataaaccctagataggagttaatgttgtttcagttaggtttattatttcttttatgtggtttaatttcatgcaataagctagagattttgtaacataacttgataaaaattttctcccttcgtatctttttgttttaaaataatggattaatatagattgtaattttacagtagaggaaatacattttacttttagttcttatctagatatcttaggaaaaaagaaacatcatttttaaggattattatttttctactaatgaaaaaaatagcatgattttccattctggactttgtaattaactttaccttggaataattgaatcttaaatataacttcattgaaaattttattttcaagtaacattttaaaatgcaaaatttgtgtgatctctactaaaaagaactctcacatcccaatgtgcttatagctacaataattggttaaaagagacaaattataaagaagatataggttgtgacattgaaattacaaaatgtggattagggaagtaagcgtgtagagttttgtatgcaatcaaagttaagttattaccagcttaaaaaacccttacgtaagatgtaaagaaaagcaaaaacctatagtagcaaaagcaaaaacctatagtagatatacaaaaggtaaaaagtaaggaatcaaagtatactactgagcaaaacagtcaaaccataaaagaagacaacaaaaaaaggcatatagaacaaaggatctacaaaacaattagaaaacaactttttaaatggcagtagtaaattcctacctatcaatatttactttgaatgtaaatggattaaattcaccagtctaaagatagagtggccaaatggattaaaacaacaagactcaactacatgctgcccataagagactcacgtcatcttttaggacacatgttgactgaaatagaagagatagaaaaagatattttggtttccatgcaaatggaaaccaaaagagaatggggatagccatacttctattagacaaaataggctttaaaaatcaaaaactaaaaagacacaaagaaggtcattaaataatgataaaaggatcaattcatcaagaaggtataacaattgtaaatatatatgcacccaacattggagtacctaaatatataaagcaaatataaagtgataaaaagaaagagacaaactacagtacaataatagtaggggacttctaccccaaattcaacaatagacagaaaatccacattaaaaaatcaataagaatgcattggactttatgctttagatcaaatagacctagcagacatatacagtacatctcatctaacagcaggagaatatacattcttatcaagtgcacaagaaacaattcttcagggtagatcatatgttaggccacaaaatgagtcctaacaaatttaacaagattgaaagcatgtattttatgtaaaacaacgccatcatggaaaaagtactagtgtaaacaaggtttaaatatgatttactgattgtttaaaaaggaattatcttagccctgatctgatgggatttcccctttgtaagcagcaaaaataagttcataatgaagcaactgtaataatacagcttcacagatctttctgaataaacagagttggatatgtttctacttcagaaaccatttactgtgggctcacagcttttccatacactctttacactcttaattttaaacccattcatcaaaaggattaagacaatgagattcaagtccaagacaataggaagtatgtgcatcaaaactgtcatgctaatgctctgaggaacattgttatttcaatagcataatttaaaaccactgaaaccatgttttatttatgattacctttcatacgttcaaaaagaatttgagatggtttggcagggatgtcttaaagaaacaaacaccaaatttttatttgttgtgcttctaacaagcaatttttcctacgtaagtgttacctgttttctccccttgattttgatctcttttgtatggttggtagttgtcgcacttctgggcatagtatggttttctacaagttaaataaaaacataaattgattttgatgtagctagttccactatttcagttagtgtgttttccatacctgcaattcataacatgtttactgacccagaacgttaaaactcaagtttagttcaatacagtcacttcaaaccaacttaagatagcagttacatttccaaggtcattatgaagacggagttcaagacttcagcagttgaatttgtcaagctcatgggtcttttagttacaggaagtgtgcatatttcacataagaaacagcaactctgatgatacattgaaactcaaatatacccaaggagtgtaaaactactttataagcccttaaacaataaatatgccaacaatcctctgcatactttttgtcattttttagagcattcaattgaattatataacatgtgataccaataaataattaactttttatttatttatttagagaatgattcttgctttgtctcccaggctggagtgcaatggcatgatctcagctcactgcaacctccacctcttagtttcaagtgattctcctgcctcagcctcccaagtagctgggattacagccatgcaccaccacgcctggctaattttgtacttttagtagagacagggtttcaccataatgatcaggctggccttgaactccggacctcaggtgttctaccacctcagcctcccaaagtgctggtattacaggcatgagccacagcgcctggcttataattaactttaaaaaatattctactatcgaatgcctgaaaaaatcatattacttctatgtattaaaaacaaactattacgtaaatagaccagagatacggtgtcagagatgagattccttggcaacagtctctgagacaaaaagttgcacacagaaagtattttgagaagtattgttgctatttataaggaagtgaaggaggcagtattgggcagagagaaaagctcatccacactgcagttgctactgaggcttcagcccatgtgacagggacactggagctgggatggtctttcagagttctaccaaattgaggcaaatgggcgagacttttgtatctttgcactagccaagagcaggcaccagggagaaatgcagctgtgatccttttgtagatattattattctggagtcaatgcaaccacaccacaaatactaggaataatattggtagtgtgggtgcatcgactccagaagaggatcttgatgaagcattacagtatccactacagagaggcactggcatattctgcttaccccacaaatattgcaatgaggatgcaagtaggagtagtgaggacataaaataaatcgattattttccactgggccttaatatatcagaaccattggaatttacaggatgatatttattatagtactcaaaaaaatctcttttaaatctccttaactcagaagggaattttaaaaagtccacaattcacctggtctatgaattcccttttaaaataaaatgtggtttaatcaaatttacaagaaaaaaacaaacaaccccatcaaaaagtgggggaaggatataaacagactcttctcaaaagaagacatttatgtggccaaaagacacatgaaaaaaagctcatcatcactggtcattagagaaatgcaaatcaaaaccgcaatgagataccatctcacatcagttagaaaggcgatcattaaaaagtcaggaaacaacagatgctggagaggatgtggagaaataggaacgcttttacactgttggtgggagtgtgaattacttcaaccattgtggaagaccgtgtggcgattcctcaaggatctacaaccagaaataccatttaactcagccatcccattactgggtatatacccaaaggattataaatcattctactgtaaagacacatgcacacgtacgtttgttgcagcactgtttacaatagcaaagacttggaaccaacccaaatgtccatcaataatagactggatacagaaaatgtggcacatatacaccatagaatactatgcagccataaaaaaggatgcgttcgtgtcctttgtaaggacatggatgaagctggaaaccatcattctcagcaaactaacacaggaacagaaaaccaaacaccgcatgttctcactcataagtgggagttgaacgatgagaacacatggagatgggggaggggaacatcacacaccagttgggggattggggggcagagggagggataacgttaggagaaatacctaatgtagatgaagggttgatgggtacagcaaaccaccatggcacgtgtatacctacgtagcaaacctgtacattctgcacatgtatcccagaacttaaagtataatttaaaaaatgtggttgaaaaacaaaacccacataatacaaactttgccagcttaactgttttatgtgtacaaaccagtagtgttaactatacatacattgttattcaacagatctctagaatgttttcatctctcaaatccgaaactccaaacccactgaagagctcccattgctccctgtaccccagcactggcaatatgaccactctactttctgtctctaaagagtttaactactttagatacatcatataaaaggaagcatgcagtatttgtcattttatgactggcttatttcacttagcataatgtcttcaaggtacacccatgttgtagcataggaaaggatttccttctttttttgtggccgagtaataatattccgttgtgtcctataccacattttttaatccgtttatcaatcaatggacattttagttacttcaatttttggctattgtgaattatgccgcagttaatatgagtgtgcaaatatctctttaagatcctgtttttaattcttttggatatacagatgctcattgatttacactgggattacatcccaatcagcccatcataagttgaaaatatcatgtcaaaaattaatttaatatgcctaagctaccaaacatcattgcttagtctagcatactttaaatgttatcagaacatgtagattacagtacatctgggcaaaatcatcttgcaacacagtacatagtagagtatcaattatttatcctcatgataaatatcatgctgcaacccaatatgtcagaagagagtatcatactgcatatttactagccctagaaaagatcaaaattcaaaatttgaagtatggtttcttaatgaatgcatatcgctttcacaccattgtaaagtccaaaaattacaagttagaccttagtaagttggggactaaccgtacacccagaaatgggattgctggattatatgataattctatttttattttttgaggactggattatatgataattctatttttatgttttgaggaacttccatacggttttccatagtggctacaccttttcacattcccaccaacaatgcagaagtgtttcagtttctccacatccttgccagcacatgttattttctgtttatgatcgtggtcatcctcatggttgtgaggtaatatctcattgtggttttcgttcttcatttgcatttccccgatgattgacgatgttgagtatgttttcagatgcttgttggctgtgtatatattttctttggagaaatgtctatttaaatccttgcccattttaaaatcaggttaattgtttttggtgaattccttattaattactcacctcagagcctttcttcttaaaatacagatttctcagaacctttcatctaatttactaaatgttgatcttgaagaagtattttaatttatctgaatttagtttcccgttctataaattgatagtaatcatgttttccctatccacaccagagtggtatgatgaggaaccaatgcagaaaatgactaaaaaggcatttttatgctgtccagatcttgtgcaaatatattataattgatttgaaccaaaagaatctacattttaagactatttaatattgtcgcatttacattgcactaatggttcctcttttttctcactgatgaagttctagattgaaactctgaggaaactgtaaatcacagttacataactctgttatattaatttatataacttctctgtctctctctaaatatatatatttagactatatatacatatgcatatatatatttagagagagaacgagattacacttaaggactctgcttagtacattgcaacttgcacctcattctaattgtgaaaacaacaacaaattttgattgagaccctgttatttttcagacctttggtcttgtgaggaaggaaaagatgattctgatacttatctcaaatagcttatcatctcctctggtggatgaggcttgtgagggcctgacacatggtagaggatcttattcattatataacaactttcaaaacacatcactaattatttttctgcttaaggtgaaaacgtagctctcccaaacaaataagagatttagactgaattctgtagaaaacactgcttacctcattttgcttagttttcactgcagagtcttgtctctaacattcaggtaggaggaactctattttaaaaaattgaataaacaaacccaaatcagaataaattatttaattcaggagttttttaaggtgctcagaattttggtagaatagcagtgtattttctgtaataagaactacacaatgttctctagctggttatactcaaatggttatatggattttattctgatatcagttttgcaattgatgaccacccttcatcaatagcgtggtctttattatggtttcatctggctttttcttcccttgtcttctgcactgggctgcctacttcttggctcttattattacatactctacttttttcatatacaaaggtcttagtgcattaatagtgagtttctgctaaaagtgttactttcttcaaatatcctgtcaaatgctggctgcctgatttattgacctcatagagtgactatgtgaatcttccattctctgtggaattccattccacattttaacttaaagactccgtcttttccagctgtgttctctctgctggataagcatttttcttttaatttctgtggtaatgggaagggaattttaaatcctgttttgcgtacaagtgtttaacaggtaaaaatggatgctgtgtcagctatctattgctgtgtaacaagctaccccaaatgtagagacttaaaataagaatcattttttttttttagctcatgattcttgattctgcttggggcttggttcatcgaggcgattcttttgctagactcagctgtgctcattcatgcactcgtggtcagctggtagttgatgaccacatgtggcattcatatgtctggtataactttttggttataagttgagacggtgtgggtgacaggatcacttgcctgtaattattcatcaggctagcatagttccatagcggtggaagagttccaagcatagcccaacacccaagcattgttaagcctctgcttatgtcatgtttgctgatacctcattagccgaaacaagtgacttgaccaatccatattcaaggagtggagaaacagactatggctcttaatgggagaatctggaatatctcttgacaaaagtgtagatgcaagaggagaatctgtggacatttactctccagcagagatgttgtcatttttgtcactaagacagttcctgtgtaatattatttattattccttggcagccataagtttgtggtttacttatggatacttcagtgcctgcccaatatcatgttggaaagagaagcccttaacaatttctcttaatttctacttctgaggaatgagaaaaaaaaaattggataggcataaatgatttccagcacaaattctaagcagctatttgagaggtgggtgggtagggagagatggaaaatccttttaattgagacatgctcaaccataagcaatttttctttcctcaggagacatttggtaatgtcaggagacatttttggttgtacatctaggagggagctctggccagagatactgacaagcaattctgatcctacaatgcacaggacagccactcacgacaaaaaattatctgggacaaaaatgtcaatagtgctgagattgagaaaccctgcttttcactgagcgcatgtagatgaattcatataatgttagttatagaagggcacttagatgatgccaactaaaacaggaaaaggcaatgattatttctctattcaagttagtgaaggaaggatatgtttaaagtcaggttggagatatttctcaagggtaatatttaagttgtgagtggatgccagatgcgcttgattgttacaatccatatttttatagctatatcaaatgatcttctctcccaaattaaaatggatattagatatatttcatggataccatatattataagctatagctcttagaagtatttgagtgattaataattcttgcatattgaatgagacatgtaagaaagatacctgatgtcctatgattcttagaaatatgtgcagtggttaagcacattgtcttggaaacatcacttgttaatgtgagatcctgaacaagtttcgttaccttggtaaaagggggatgataacatctaccctgaagatggtttggtaaaggtgaaataaaagagggtttatgaagaaccttgcctagcacataagaatcactgagtaaatgatgggggtgatggcagtgttggtggcaattatcttacttgtaagtagtagcaaatatttatttggattatatttttaatagcaagaaagaatctattaaaatgtaagcaaatagcaccattaagctttaaaaatccatagctcccaaacttaacatttttttttcttaaatccagaaatacaaatggttatcatgaatccttgagttccagtactccggccttgcctatgtagagtacaagcatttatttttctaaaatgagaattattgatgttaggtgtgtcatatattttatttactctttagagtgacagaaaagaaagcagacaaaaataagtgtttatgtgttcatagtgtttgtttctaattttccaacttgtatgtgcagactgtaaatatttagagggaagacatgaaattcttccttacctacacaatagattgtctttcttagaatctagacatgatttcaaattttcttcagaagttctcttgaattcttacggaattcattaatccaaatgccatcctttcaaatattcaaaaagaaaatattctccaatgttgcttacatggaggagagttattttatctactagtgagatggaagtcgctaacaatctttcttataccccatagtattaaatagtaatgcaatttgatcacatataacattgctctcctgttgacatggaatgataaggaggaagggaatatctaacagcactttttagatattctctcatagaattgttaatgtgagcccaataacttattttgtaagttgagtgatttttcaaatataaaagtgaagcaaacaaaaaaagttacccacattcattcaacaaagctagaaatagagtatgtgcttcttgctttcttatcaaccaaaggagacctgtgaattacaggaaaaccatgtgtgaatacttcaaaggaaatatgccaaacacattgtgtgtgtgttttaaaagatttagtagctcctttaaagctctaagtaaagctgttagtctgactaatcatgtacccctgaaaccaattaaattttcagactagagaagtgttcttcaaacacttgaaaaaaataagagttccttcctaaagccaacaccttttaattaacaaaatactcagagcaaagctgtggtttgcaatagtatattacacctactgttattcatgctaccattctggtgtgccaaactcaattcatttcaactattttgagcttgattttctgtctgcttaactatggagggaaaaccacaattttagtagagtcattttaattttctaatgaatgcatgagaaaggtattatgctacatagtatgtcctcagactattcagatgccctctctctctcttgctctgtctctgtctgtctctctttacacacacacacacacacacacacacacacacaatgtgtgtatctatctgtctacctagatatacagtttaattttgtacattgtaatacatctggttctggcataaggtgattgagcaaaaaacaaacaaacaaaacccacccaaatctgttactggaggaacctttaatagcataacatcagaaagactattttcagtaaggaccctaggcaggaaaagacaattcctccaatggacttgagaagaatacccttagtctctgaggtggttagagaggctgagatctgaaccagctaataccagagccagcttcttgtaacccaagataggggcataagaaacggggtgaatgcccaggcatgaacagacttggggttaagattaaatagggtacacgggaaaggatttccgccagctggaggggaagccatttcccatgctccttagggatgacaacaggagacccagcccagaacatcattgaaaattctatgtaataatttatatatcctaactctttacccgttcgttctagattatggattcaggcactcttagcaaaacaaatcctctttcagtcttttaaaatattgacttaacaggaaatatccttggcacaacaatacgaccctgcctgacccttagaactgtgaacaggttgctcagactgtacaaaaccactaacaaatctgaccagcctacacttcactgaaaaaggtgatttgcatatatttctagtactatgacatggtggaaaagaaagaaccgcatatgtgttagataaaggtaaacgcatctgaaagtgcagtaagaatcaatgtgatatatacaataaaataagataaataggccgggcatggtggctcatgcctgtaatcccagcactttgggaggccgaggcaggcagatcacgaggtcaggagatcgagaccatcctggccaacatggtgaaaccccgtctccactaaagtacaaaaaattagttgggcatggtggcaaatgcctgtagtcccagatactcaggaggctgaggcaggggaatcgcttgaacccgcgaggcagagattgcagtgagctgagatcacgccactgcactccagcctggcaacagagcaacactctgtctcaaaaaaaaaaaaaaaaaaaaaaaatttcaggacttcaaaacttctgtcctttgaaacactttgattaaaaaatgaaaaaaatatatacatgcctgaatccagaggcaagtctttttagaaaacataaaatattttaagtaatgtttttctgaacagaaatggctctaatgtgagaggtcgatgaagattagcctcttgcttctttatgttttaaagtatattccttgagacccaaagtttctgactttagaatccaactctcaactactatcagctatcctctagacactttcaaaatcctccaaaacctaatagtggtgcaagattttgtccttcctagtgataactagatttaagtaagaaaacgttaaagactaaaaagtgtttaggacccacaagaaaggtgtaattctgttcctcatggagatattttagttacacacttcttattctggtcctccccaaaacacagaaatctagagttgacatttaaagagaaaatgagatttttgtctggaaacaggagagaaaaagttttcaagaagtatagaaagcgtatgaaaggacacaggtttgaaatggcctgtgctcatgagagaatgcacaatagacatgggtgtggaggagcctggaaagaatggagagaggtaagtctggagggtcaaatctggttcagagtacagagcataaaatcccatacgaatgtagaacatgaggagccaataaccattgtgtgagaaatgcaggaaaaagaggaagaaaaaaatccacatagtgtacttacagtcagaacaatcctaggaggtgacttacatgtatgatgtcataaaatccgtaacacaattccattagattggtactgttttcatagttacacaggtgaaaacttttgagggtcaagatgttcattgtagcaggcatagtataattccttacctcaagatgcctccaatgtcagtgaacattacttttccaagattgtctatttaggaaaaagtaaggccagttgtctatgaaggaagtactattataatcgccactttacagaggagtaaatggagattcagagaggttaagtcatctgactatagttacacagctaaaaaaaaaaaaaattatagagcaaggattcaaatacaacaatctggtcctagaaagcctaaatattctacaccctgctttctgattcagagctatttcctgcttttctcccttcgataggaaaaaaaatgtatgtgtgtggggttgggggcaaataaattgactggctgtattttctctctttaatatttgatctttcattgtctgctccaagcagtgggtcttcctccattatcttctcgtgaaaatagctaaaatcacctaactagtaaaaacctaggcatgttttgtgttctagcctccattcttccattctaatgggtggctgttaaattttagtactcattgtatgtagaagacctctaagttcactaaagagcttactgcacattgacttttctttagattcaaagggaatcaattgagcacctcctatactccaggacatgtgcaagatgcaagagatagagcagtgagaaagtctgataaggtttcccctccctttcccagcagtgtacagatagatgttcttcaggtggtgcatgctggagaagagaagaccagaaatactggcctgacgggtctatagatgagattatctgcccatgactggcgcagggatggccgcattgctagacctctccatcatcctctgaatatgcttcagctaatttatcatcccaatggcatatttagtcatcatgaaccattctctctttttgagtctcaggccctggccttgcttttcaatagacttccaatagattccttcctccttccttcccttactgcctggcttcctgacttccttccttcctgccttcctgccttgtcttgccttgcttttcaatagattccctccctccctccctccctccttcctccctccctccctccctgactttcttctttccttcttcctttctgtctttttccaaacgtgcttttcaggaaacagtggtctgcttgttgaagtctgataattctctagttcctcatccttcactttattgaaatttagtgtgacatgatcatttccacctcattaggtacttctttcatggtcagaagtaagtctggagaaaaaaaaaaaatctcttgtctctgctcttatttgagggtcaaattttcaataagtcactttttaaaaaagcattttctgacacttcccataagcttgaaatcctcctaaattgctgtatattgcctcagtataccttgtgtatctattttaggaacactccatccacatttgccagtcagcctggtgttctgcagttagttcctacagtgatattttaatttagctctcttttcatcctcacacatgcatcctctctggatatttagctcctttcctggaatcccttttaagatttctagatctttttgcttccatgatttcttctcctggactgtgacacaaaatgctatttcttctttacattacatttaattctttctagaaagagcctcagagtagtcagatagctttgagaaacaaaactttttctttattgcctcactgttactgcctttcaatcattgtttcgtgacacaaatttttttattctctctgacaattaaaacactatttttttctgtctgcattgatcaaaattagttccttcattcatagaaaactcttggtgtccctgagaagcttgagagacaagaaacattcttccattctactcatcttcttctctaatgaggagacaaccttaaaagcacagttacatagccataaaaattaatgattggctacctcagaatgaaaattcaatgtctcatttttttttaatattcttagaatcgttcactggttgtccagtgtgagtctcctgttgagatgtcttttgcagctttccttgaaacctttcattccaaactacatagtccaataattttgccaccaatcttctggttatattatgctcttgagtctgttgtctataaacttgattaggcattccttcccctcaccactcacctctgataacccagctgtgtgttggtatttagtatcaattcacaccagcaagttcagccctcttcaatcaatatagggccacacacggacttttgactgactactccccaagtatttcacattttggggccttatctccagtttctcaccacagttgttcatcactgtgtttcttactagccaggcgtttataaaaacagtaatacctaacactattgatcacctactatagtgtcaggcgctgtaataatattattgtgatgatgatgattatgctgctctttctggcattgtcatacgtgtattgcttgtactactcactgaatctacacaactgcccttatgacatttaccctgttattattcctcttttaaggtaaatacatgaaaaatgcttcccactttgccttgcttactgcttattgctagtactgaacaaatgttagaactgaaacttagagaggttatgtggctttaccaaggtcccagagttcctagggcagagaacaggattgtctaccagacattttaattctagtactatgcatcttaaccattaccataggctgacttactctacagtgtccaacactattcatattaagatttatttaatgactttgaaacagtatttcatgtctaaatagaaaaactactaactcgcatttttaagaaaatattgtatcttggtttttcttcactgctggccagtttactaacaatctgaaataaaaagaaaaaaatatgataaactgctcccagtataaaatacagagctaagacaagaacgtttcattggctttgatttccctagggtccagcttcaaattaatttacttcctattcaagggaattttaaatcagaaagaagatcttatcccatcttgttttgcctttgttttttcttgaataaaaaaaaaataagtaaaatttatttccctggcaaggtctgaaaacttttgttttctttaccacttccacaatgtatatgattgttactgagaaggcttatttaacttaagttacttgtccaggcatgagaatgagcaaaatcgttttttaaaaaattgttaaatgtatattaatgaaaaggttgaatcttttcattttctaccatgtattgctaaacaaagtatccacattgttagaaaaagatatataatgtcatgaataagagtttggctcaaattgttactcttcaattaaatttgacttattgttattgaaattggctctttagcttgtgtttctaatttttctttttcttcttttttcctttttgcaaaaacccaaaatattttagctcctactcagactgttactctggtgacacaacctgtggttactaaggaaactgccatctccaaactagaaatgccatcttccttgatgttggaggtacctgctctggcagatttcaaccgggcttggacagaacttaccgactggctttctctgcttgatcaagttataaaatcacagagggtgatggtgggtgaccttgaggatatcaacgagatgatcatcaagcagaaggtatgagaaaaaatgataaaagttggcagaagtttttctttaaaatgaagattttccaccaatcactttactctcctagaccatttcccaccagttcttaggcaactgtttctctctcagcaaacacattactctcactattcagcctaagtataatcaaggatataaattaatgcaaataacaaaagtagccatacattaaaaaggaaatatacaaaaaaaaaaaaaaaaaaaagcagaaaccttacaagaatagttgtctcagttaaatttactaaacaacctggtattttaaaaatctattttataccaaataagtcactcaactgagctatttacatttaaactgtttgttttggcactacgcagcccaacatattgcagaatcaaatataatagtctgggaattgattattatccactcttctaagttgtctgtgccaatttgccttctccaatgataaggataattgaaagagagctataacttaaaaagagaaaagtaacaaaacataagatatttaaaattaccctagatcttaaagttggcatttatgcaatgccatgttcaaatgaacatgtttttaatacaaatagtgcatttttcagcctcagtgtaatccatttggtaaaattatgacatcaactagaaacattagaatacattgatgtaaatatggtttacctagctagatcaaatatactatatatcttttatatttgtgaatgattaagaaaaataatgttggaattgttatacattaaagttttttcacttgtaacagctttcaagcctttctaaagaaatacaaagttgtgctgaaggtatttaggtattaaagtactaccttttgaaaaaacaagaagtgaggcagacagagtaaggggaatttctttgtaaaataaacttcaccaattccataggaataaaagtaatttgatagtaaacaacctgcatttaaaggccttgagcttgaatacagaagacctgaattcagtgccatttgcaaatgatgattgtggtcaagccatctctggatcttcgtttcctattctgagtacagagcatacagagtacacattcacattcacaatatagttatggatatggatgtatataaatatatgtaaatactacatatatgtacctaaaatttgttttacttctgctttaaaaaaagtaattatagccacatttttcagaaaaagtaactgaggctcatagatgtcaaattcccagtaagtagcagaacaaggattcaaatccaagtccatttgattcctaagcttgtgttattacttgctactgcagagagtatacgtagcaagtaatatatgtactgcaagcaatacatactattgctgcggtaataactgtaactgcagttactatttagtgatttgtatgtagatgtagatgtagtctatgtcagacactatgctgagcattttatggttgctatgtactgatacatacagaaacaagaggtacgttcttttacaataccatattgagttatataatactcccaggacttttatttaccaaaggaaacaatattttataatgtttaaagcccaggttttgaagttacattgtctgggttcaaagcttggctcccaagctgtgtgaccttgagtaagttattctgcctacctgagcccaagtttatctagctataaaatggggatagttgtactatctgccttgcagtttgtcatcaggattaagttggttggtacatgaaaaatgcttcccactttgccttgcttactgcttactgctagtattgaacaaatgttagtaattatatttggttccaccacgaactctagaaatctaaccaatgatggcatttgtattatgcaaactgtatatcacatcataatattatatggaaatgagagcttgtttccgcttctgtagcctagtctaccattgacatagcttcctgcagaagttaccagataatagattgggagagaaagtccacacttccttgtgacgggtttgtgagtccagcatttagggaagccattgatgtgctcagtagtctccagagttctctaaataaatgtgtccttttcagaaaggactactgatttgatgccccctcacagagatcgtctttaaatataggtcaaaaactaatgtagagggccaggtgcaatgtttcacgcctgcactcccagcgctttgggaggctgaggcaggtggatcacttgaggtcaggagtttgagaccagcctggtcaacatggccaaaccccatctctactgaaaataaaaaaattagctggtgtggtggcccatgcctataatcccagctactagggaggctgaggcaggagaatcacttgaatcctggaccagaggttccattgagctgagatcacaccattgcactccagactgagtgacagagtgagactccatctcagaaaaaaaaaaatttagggggaaaaatcaaaagccatttctgagacacaaaaatacaggatttataaattatatatggtatatataaaaatatttttaaaatagtatatatagcatattatatataatgatatgtaatgttcatatattacatatttataaaaaaatctaatctcccttctcttgcttgctgaatagggggatgctttgcctgcctcttcctcttatattaaaaaataattcttaaagacattgtcagttcttggcttttatagcctcaatcaccaaattgtcggtaaaatggccctaaataatcattaaacaaatgtgtgtgagaggggaaataagaaggataagtaagtatggggaggattttgttataatttcaggaaatcaatatcaattttatgtaaagttttaaataaagcaatcccaactttaatgtttgatgtgtgaaaaattaggcaaaattccaaaagggctttataaactgaaaaaaactttactaacacctatccatttttattattttaaccaacttctattgagctgccactaagtacctgggaaacataaagttgtacaacatagaatgtgcaggtaaaagaggttgaaggaagaaaataataacactatgatagagataaattttaggataatagctaacacatatgatatgccagtcattgatctaagtacttcacgtgaattctttaatgcttacaacattactgtgaggtagatagagaggcacagtaaggataataacctgcctgagatcgaggaagaaagacaatgatgagatgtgaactcaggcagtttggttccagagtcctctcccttaaacctcatagttttcaacttctctgatattgtgtgggtgatgctgttggggctttcttcagggaaaactaagccaggagagagaatggatgctagtgagatattcctgaagaaggaaaaacttaagccaggcattaaagaatgagttggaattacctagctagataaaacgagaagggcaatccaggcagagggaacagactgtgcttttcactgaggtggaaaaaaaacagagtatatcagaggaattgtgattccatatggctgaagttaagggtatatgatgaggaagaaattgatgaggttgaatagagaggactggggctaaataatgggaatcctttgttgccagactgaggaattttgatgatggcctacaggcagtggcaactctgaaaggattgtaaacaggaaaataaaatcatcacatatagtttagttgcctatcaattagagctctctggatgcaagcaacagaaatcattctctgattaaatcaggcagaaagtaaatgtgctgtaattagcacaaaggcattggaacaaaacttacaaaaggaaaaagaatctgagcatgcctttctgggcatgtggctagcaagaagtattccagtctgtttgtgatactctcttttctccatcctgtgtgtaactctgttcaaattttaaagtcttaaaagagagtccagttcaccttgtttgggtcacatgttaatacatgagctagaagggagcagaaaactttgatttaaatccctctcctcccaaagtctcaaaattagggaaaggcaattctcctgaatagaaactgggttctattgacaatagaagaaggaaatgattctgaccaaccactaaacaataattgtccactgaactcagtcaagaacatgtagaataagttggaggatagagcaaataaaggagatttgtaggaggtaattattatgatctaaagcaagcttgttcaactcatggcctgtgagccacatgcgtcccaggatggctttgaatgtggcccaacacaaatttgtaaactttcttaaaacatgagatactttttgtgacttttttttgctcatcagctatcattagtgttagtgtattttatgtgtggcccaggacaattcttcttccagtgtggcccagggaagccaaaagattggatacagctgatctaaagcaacaggttcatctactcaacttcacaacgtgtagacctgaaataaagaccattcatataccaatacctgaaatataaatttgtttgaccatgacacgtacagtaattggttctcaataaatgtggatagcttgatggataatgtgaatgcaatgtgataaggaaacttcatattcaacaaagactggaatgtgaggattataattccaaagcaccagaagatagataagataatgcaatgagacattttatgactcaaggcaaagttagttatgagattcagaccaaaccttagacgtgcagtaattgaaatatttgccacagaaggggtataaggacatgacattcaagtaagctaacctttcactagctttagactttgaactcagaaaacatatttggtgaaaagcttatggtcccctttagtatgtattgcttgattaaagtattattttagaaaatggtgagctgcttccattttgaaataaaaataatttttactaagtgaattatattcagtgaaaaaaatggaagctacaattacaactttaatttttttaagttttaagaatacagccatttaaaaaaattaagcaaatctgcttcattttagacagtagaaaatataccattatcttttagaagaatagagatgtgaaatatgcaaattaagcctttagaagtaaagcacacatgaagttcaaagtttaatttctagaattgtgaatcaatagcagtggatgatttgtactttatagcttagtgtcggagaaatctgattaaaaaatgctttttctgtttcatcacataaacataagtaaaattgctctgaaacaacaatatttgacaagaattagcagttttcttttttgacataatctatcaaatgaagggaaaaatatgtcctgggttttgctttgagagtgattactaaatctgacccttaaggaaaggaaggagagaacaaagaagggaggaaagaaagggaaggaaggaggaggaaagggaaaaaaagaaggaagagaggaaggaaagcaggaaaaaggggaaggagagagaaaagacaaaagaaaggtagcaaggaaagaaaaaaagacaagaaaggaatattaaagaggacaaaagaggagtgaggaaaggaggaaatggaagagggatggtgggagacaggagggagaaaggtggagggggaaatatgaagagaggttcccagcagtggagactagtgttgctatcaacaaatagaatttagatggccatatgatattatttttcataatactggtgtctgattgcctgtgctgagttaattgtagtcttttttttcaattccgtttggccaggtgttcaggataattcaccacaaaatctcaaccactgcacttgtattgaataaagaattgagttggcaaaggcattttatcctccagtaagacctttccagattggggttgagacaaattggccaatctggacaagatgataatagcattgttcaagattaatttttaaccacacattgcactgttacctgggagatttcattatctaaaaattgaatgagcagttttagtgggtatagtgtatatttaaatgggacataattacttgaatgagtttaatttttgttgttgttgttaaggtcaaagtacttaaaaattatgattttttaaaactctgtctatacacaaaaagcatttgaattagctacagaataattctgattataacttttggtgaatagattcagtcaaaatctgattactaaacaacttgtgtagtatagccctggaagaattgatgggacaatgtgtgggtaaagtggcattggctatttaaactaaaagcaatacaaaacagaatgtttcttggttttattctgttgtcacaaacccagcagaaagtggctattacaatagtttcccttattcaacaaatgagagaagttatagacaatttagttaattgatctaaagtcacttagtaaatgtaattgtcctaacataaacccagacccccagacctcttgggaatagataatgtttcttacttcttttctatttcctcagccacccccctcaacttcttacacatctcatttctccatccaaattataacaaaacaaagcaaacatggtttatttccatgggcatcaaatggatttcacgaggttgggtgacagtcatcttagggtgaggagattgattattctgtttttctctttcatcgatcaacaatccagcccttctcatctcatcatttcatttctgcacaaacttgtttaagaaataccaattaagaaattaattaagaaattaatgttgtaatctgtttggctgaagatatttacaaattttgtgctttaattatcttccaacaaatgtacatgtctctggtagacagcttgcgaccatctggatgactgatccatatttatataattttctttctttacctaatgagaccaaatccactattatcttcaacgaaggatgtaaagatatgtcagtgtcagtaatgtgacttattttatattctctggtcataacaaaaataaaccgccccttaaataaaaaggtcatagagttgcaaacacacacacacacacacacacacacacaaaatcatattttctaagtctcctaattacctttttatggaaaatgataccatatgcttttttcttaaagaaactacataaacttataaactatactaaactacacatttcaaagtctatgaatggaaatgtgtatcttattatattttaattcaattcactgtaaacttttctgtcaaaatcttatcaagcaaaactgatccaggatatttacatgaattctgatggaagtcactgtactgtgttttccataaaataccagtgggattctgataaggaagtttatgtttgccattgtgtttaaatagagaattctgggccgggcatggtagctcacgcctgtaatcccagcactttgggaggctgaggcgggtgtatcacctgaggtcaggagtttgagaccagcctgaccaacatggagaaaccccgtctctactaaaaatacaaaattagccgggcgtggtggcgcatgcctgtagccccagctactcctgaggctgaggcaggagaatcgcttgaacccgggaggcagatgttgcagtgagccgagatcacaccattgcactccagcctgggcaacaagagcgaaactccgtctcaaataaataaataattagagaattctatttacaaatttcctttcttggatctagttagggctcctttatatggagtgatttttattgttttcatagaaatacgtagaatctgggtcttctctaactttcttacaggaaagcaatgtaataaggtttttttttaattttctgaaagttatataatgttattgttccctaaagtttaggacctgccttttaggctttccatttcaccataacttttggtccttaaagtctgtaattgaagttacagtgtgttatgatgtaaatttttcttattattacctttaatgttagggtaatgttaactaatgttaatgttaggtatatggttgtttttttcattccttcgttcaacaaattgtctttgaaacccatgttacaaagcactctagagtcaggttgaagactattaagaaaggagaatagaaagagacactagagtaataatttggatttaaatttgatttccttgtgtatgatagtgaataagtgtgaataagatgaggcagtgatcacacatcactattagtaaaagtgtttctgtacctgtatccacacttttatgtatatggttacttatgttaaagtgatacatattatataaaattaacgtatacattaagtagatattttaatagtctgtaattaaatactactagtattttctttcctccttcaagtgcttacttttgatacctcgagttacagtgtcataaagattctttagaaatatattgactgtcttttaagagcttttgatacaatactgagtttacattcatctgttatttattgaacacttgctggtgaaaggcatcagtgttatctgctcttagggaacaaaaattaaaaagggataggccctaattttagagtgtatcctctataagaaaaacataaaagatagggcagtcatggccacaaaagaaaaaagtgttatggtggtttcaatcatatatgtattagaatgaataaatcaactgatcaattgtgatttcttattctaaatatgtgcctgcctttttcatatagatgaaaattaagctatgtttatctttccagggatcttgttgatttttattcaataacttgggagtgaaagttgatttttgcatatgttttaatgtttttaaatttcataaatgaattgatcagtaatttccaaggtagtaatggctgcattgtttttgaaaaaaaaaaagcaacaggatttgattgtgcttttatgatttttaaagaattcattaaaaataatgccacggtttctaaaatgatttgagtcaatttcttattcgatttataaaaataactttgaatacaattttagtaattcacaaatgctttcagttcccttacctttatattttatattctgtgtaaacaagtgacataatatttaagaattatatatctcctatgatttattcaagaaaagaatatatactgtattatttatttcaagaacagaaatgctttgatttaactgtcatcttctctcttcaattatggaagcaaaataaactgtaatgaccaatgtaacccctcccccatatcaagttaatctatgttcaactccagaattatttttgaacactcaaactagaaattaaaaaaaattaaatccatgaagacgatttttgccaaaagcatatagataaattgagttgattctatacttaagaaagtggagaggagagagtaatttggagagagtaatttactcttaatcccatattttttccctaaatgtgaaagaagtagattgtagtgagagggaaaataacctgtagcaacttcattgaggctaagctttctgtcatgttatattatacgaaagtaatgaaatgcttccacagatagaatcagaagtcccctctgagaaattctacataaaaattagcctgccactttaccacacttactcaagtttgatttttttaagttatgtaatagatgttaggcactagaagaggacatttactgggggcaaagatcagtagttggaaagaatgcaagcaggcaagaagctatatataatgagattttacagtacaattgttttctaaatgaaaatgaggacgggtccagacacaatggctcacacttgtaatatcagtgccaggatggaggatcccttgaggccagaagttcaagagcaacctgggcaacagagtgagacttcatctctacaaaaaaatgaaataaaaagttagctggctgtgatggtgtgggcttgtagccttagctactcaggaggctgaggtgacatgatctcttgggcccaggagttcgaggctgcagtgagctatgatagcgccactggattccaacctgggcaatggaacaaaactccatttctaaaaaagaataaaatataaaactaaaataataaataaataaaaatgaggatatattttattttaacatttggaaactttgtaggtgaggaccatgcaaacattcaaggtgtgagttctgaccaaatccaattattaaccataccaatgacttaaggtttcttcacactccttaaagttgattaatataatgattatatagttgactggtatgtcacagcttgaagcctttgagatttattcctgccttttctgtaaaggttgttttgttaattccagtatgtactggtcgtttttgttttgttttgtttttgtttttgttttgtttttttgagatggagtctcgcactgttgcccgggctggagtgcagtggcacgatctcggctcactgcaacctccgccacctaggttcaagcgattctcctgcttcagcctcctgagtagctgggattacaggcactcaccaccacacccggctaattttttttatttttagtagagatggggtttcactatggtggccaggctggtctcaaatacctgacctcatgatccacctgccttggcctcccaaagtgcggggattacaggcgtgagccaccgtgcccggctgccaatatgtattggtctttttcatcaatgattcagtccaaaatcattttgtcctttaactatatattttcttgtaaagctgcttctgttgtcttgaacttttcttttcaaatgtatgttgtcatttgactttttagattgttattttctggtcctcgaaataaatttaaatttcctgtaaaggaaggtgtaatattctatttgacatagccgctaaagatgtactaggtgctttataaatattgttgatttactttatcttcacagattactagttttacttagtatttggaatatgacaacattttatagagctatattcatatatatgtttatcttaactgttaaatgcaatatgattcatgtcttgttttggtcaatgatgaatgaaagtctcctgagaattaaatttactgcatcgatgcaaaaacaatcataattttagacactctaagaattttagaaattaaaggattttttttttccagtttactctgttaagattgtgtttagctatgcgtgacagcattctcactacagtggcttatccagatagtttctttttctcatagagcaagacttccagaattatgtgttccagggtcagtgcagcacctccaaaaccgtatgtcccaactttttcctccaaccccagtcatctccaacatgagactttctttttgttttgttttgttgtttttgtttttgtttttgttttgagatggagtctctgtcgccaggctggagtgcagtggcgcgatctcgactcactgcaacctctgactccctggttcaagggattctcctgcctcagcctcctgagtagctgggattacgggaacgcaccaccacgcccagctaatttttgtatttttagtagagacggggtttcaccatgttggccaggatggtctcgatctcctgacctcatgatctgcctgcctcagcctcccaaagtggtgggattacaggcgtgagccaccgtgcccagcaagactttttttcctgtggtctcaacatggctactctgcctccaggcactatgtctgtactttaaaatggaagaagggaaaatggggaaagtaaaagcatattccagctgtgtcagctcctgtttgtaaggaaaaccagtgcttttctggcagccccacacagaagagtttctacttgaacagtgcattaaccagaaatgtgtcacgtgaccattcctaacttctaaggatcttgggaggattgagtgttttaactgaataggtgtgtttctttcttcataattcaaaatgtgaaaattggtaacttagttataaaaccttgctagtctgaacagaatttggatttttttagctaagaaggaaagaaagggtatcggataggcagctggctatgctagccaagatactcttaataatgcacatttttcttctttggacataagcagttttaacttagctaaatatgatgtgattgttttcctgtcttcttagttctgtttaaatttgtttcagaaatcaaggaaataaaatggagaaaaaactctattattcatgtctatctttctgcctctgaatatttttatgttggagaaagagaaagcagtaactttcataatagcttacatagtctgacaaattctaaacatgtccgttagcatcaatatacgtggtattaggtcatcagtttttatattctgaattattaagacccaaataaacccactgagttcaagagaaagtatacactgagcaataaaaacattaccagttctagcaatgataatcaaacaagaaaacaagtaatatagtctgtttagaataacatgttttaaagatcaagtttttcttccttaccaatgttgcctttcttgtaacacttttttttccttcttgagataggctttcctatcttttgtcacaaaccccaatatttacatggccattcgtagtctattcatagcagcaccaccccatggcccaaacttgtagatattgccctccttctatggttgttctaataagaataaccactcttgtctctcataatctcagctgttttgtgccgttaaaatggaaaataatgagtattaagatactaactaggggccaggcgcggtggctcacgcctgtaatcccagcactttgggaggatgaggcgggcggatcacgaggtcagaagattgagaccatcctggctaacacggtgaaaccacgtctctactaaaaatacaaaaaattagccaggcgtggtggtgggtgcctgtggtcccagctactcgggaggctactgcactccagcctgggcgacagagcaagactccatctcaaaaaaaaaaaaaaaaaaaatactaactaggtttcagtcatatgagatgaataagtcctacaaatctgtacagcctagggcttgtagttaacaatgttttatatttaaaactttgctaagagagtaaatctttttttacctgttattatcgtacatgcaaaaataatagtaaataaggaaggtaagagaaaaattttggaggtgatgcataggtttatggcatagattctggacatgatttcacaggggtatacagtcatgcattgctcaacaacagatatacattcggagaaatgcatggttagctgattgatcttgttgtgcaaacatcatacagtgtacttacacaaacctagatggtacatcctactatacatctaggttgtatggtatagcctattgctcctaggctataaaccagtacagcatgtgactgtactgaatacttcaggcaattggaacacgatggcaagtatttgtgtatctaatcacatctaaacatagaaaagttacagaaaaatattataatcttataggaccactgtcctacatgtatacagactgtgcacatgatagtggtccattgatcaaaatgtccttatgcagcacataactgtaattatctcgaaactcatcaagctgtgttcattaaatgtgtatagctttttatgtcaataaagtggttaagaaatcaataaagtggttaaaaaatattttgactaggaaatatactatcatttctagttgataaaagatctcaacatttccaaaattgtcctacagaaaaccaggttcatcaggtgttcatacatgatcctcatgaaaaggtcaaataagctgaaaaacatgcatagacgttgcctatcctagcaatctatgatgtacatctccatagtaaggtcactgaaaagtcttttaggaatgttagtattgttagctcagtatttctcagtgatttctccatggaaaccatttgtgtagagcatcttgaggagcacagctgagagaacattatcttagttggatgtgtatgtccctctgagtcacttgatttctctacatatgcttttaccaaattaatcttttagaaatcttttctcttcgcactatgtctataatttgtgaagttgttaccaggataacatttgtgcctctcaccatgatgtacctaccagggtccaagcagccattccttctctagagcaactgtctgagggaaagaatttaacacagcattctacgaaatcattttatttataaaaatagattactgctttacatatagtaatttatatttagaatattgattaattattaaaatctgcatgagagctttaaagagtagtacataatatatagcagtttgtactcaaactgtcttctaaaaaggattcactttttgtttgtattctattgtcctattcgttgatagtgttacgtaagtaattataaaacttaaaatctggaaagagaatgtggactcagaatgccatctcttttgttatttcaaatggattagaaatgaacatacatattcattttctttcattacacatccagagaaatagaatggattttataaatatgtaaaagcaaggattttgatcactgataaaaagggaaggtttggtcactaccttatttcattccttttttcttatccttttttttttttttgtcaattatttgatgacatctctgaacatcaccttttattcatgacaagaattgggtatcatggtaaagaacactgttaatataattcagttacttcaccccctcctgaaatatagagaagctttaagactatgtgaatatttttttctggttttcttgtatttgtagaaatagcatgagctttgtttaaagtcaggcatctaaaaccttgccctgtatgttattgacaacctgcacaaattttaggatctattctattacagtttgttcaactgtaaaactaggatagcaaactctatgtcatattttcgttatcagaatttaaaaagcatgttttaagatcttagtaaataataaatctctactctgtagttgaatttgttctatattctttaagaaattccctttgatggttatgccaacctctgtattacttttcttcacactttaactttgcgctgaaatcatagtagtattttacgttatcagtcaaaataacagtcatccttaaaacaaatatgaattttagatgattaaatagatttgtatggaggttcttcttgctaatcatagcagttatccttggtgaaaaatgatagacacttgaaaaaaccaattaatcatgatggctatttttgcatcataaataaagctttcaaatttgagagggaatcaaaagggcaatggtagtatagtgtctcaaagcccctttccaattgatggtacaaatttaaaaagagagagagagagagaaacatgtttcactgtaattgttttctaagagcttccaaaaaagcgtattttcttaatagattcaaatttttcagttggattgaaagggaagtcttggagtgtagtgaggagggcaccttctgttgagaggtgttcagacgacagagtgtgcccaaggccaaagatgagatggttttgcgaaagtcagtggccacaaacaggtgtgtttgacccctgagagatatgcaggaagtctaccccactttaattcttccaaatattctttaccttaattcccaagtacttgataaaggagcaatggggagaaaatatgcacactattatggaaaagttttgacctacactttggagagttttagattaagagcattctagaaatcagtcccaaatgcctagggtttacttacttaaagataatatcatagtttgggtgactgggaagcataccctgagattgaggtgagcatgcagtatgtctatttaggagtgttcttggggtcaacgtgtaggggcagagggagaagttgagctctgacgcagtcttagtaagggcctcagctgaccgttcagggagttcttaagctggaatgacccttcagaagtgctaggaaacgaagaaaggggactggatctttataaccccgtgtcaagtcatgcactggatgtgggctactccaggaaggcaacgaactttagcaagatgattctctttagccacgggaatttccataagggggctgctatggtctgaatgtttttgtccctccaaaatgtgtatgttgaaacctaacactcaaggtgatggtattagaaggtgggggtttgggggggtgattaggtcatgcgggctctgccttcagaaacaggatcagtgcccttataaaagcggctccagaaagcttccttgccctcccaccatgtaaggacacaccgaagatgccatttaacaggagtgggccctcaccagacaatgaatctgctgatgtcttgatcttggaattcccagcctccagaactataagcaataaattctgttgtttataaattacccagtctaaggtatttagctatagcggcccagactaagacaagggctgacagctgaaggctgtctaccagcagcactcctagcagctggggaactaagtccttcatttccaaaggggaatctaggcagcatatttacagcttttcactacagataagctcattatttcaaatagggactagcaggaaaaaattaaattgcccaaaatttagtgggatgctgaaatagattgtggtgtgtaaattggagtatagtgaggagagcaccttcaaaccagtatgtactacatgatattgtttttgttgcaatatttattatatacccaaacacacatatattacttttagaaacacacaccacatatatatctatgaatattttatatacacatagggaaggattgttgatgttatttatgctattttaaagatcgatgttttcatataattatgtattggttatatattatttcttgatataaggtaaaaaaaaaaagcaaaacaaactttaagtgatcactatgaaaagaatcccaatgctgcacatttaggtttatccaactcttcccattaaaatattaaatagtagaaataattgtgaataagaaagagcagattttgaaaaatggaaagaaatgcttaaagacatagcattgttgcccaaccatcattatttaaacatacagtgtttggctttgaccaaattgccttcaaacacttccttttggcccaaaatgttaggtcatatatactaccataaaattcatgatgcttaccatgcattaatttctagtatataccaggcattgtgctatgcatatcatattcaatatttctaatcctctcaaaagtggtacaagctaactggcgtttttcttgttttgaaagggagaaactcagagaggttaagtgacttgcccaaggcaatgccattgataagtgccagattctatcacaggtttattggcaacaaaccatatgtgcgcgtgcatgcgcgtgtgtgtgtgtgtgtgtgtgtgtgtacacatacacgaataacatatatggtataaatacgtggaaacataataaactgcattgagctgcgtttataattagtatttaggacatgtttggcaaataaaaacagtggagattgaaatggatttgcttaggaaaaatgatacattaaaataggctttattatgagtcttcaactattctgtgaaaatagatacccagggaagaaataatagagaatatgaatcttgagcaggcaactgagaacttgtcgaagagccaagataaaaatgtcagagaggagaatattttggcagctcagatgagcccccagagggtgggaggcaatgatctcaccgcagtctcgtatctgaaccccaggtttttgcatctccataaagtaatttcttacacccctcaataatgatcgggcttactctcaatctctcgctctctctctgtgtctctctcacgcacacaaacatgcagaacatttcttgcacatgcataactcataagacgattatgtaaataccagcctttttatttcataactaaattacaaggcctggttattgtttggactgtgaaaaaataattatgtgaataggtgcctcaagatgaaagacaaggcaagattgtgaaattattcatatgatagtaatagtatgcaaaaaataacacaatctttaaagatctttaacgacctagttataaaaccatgctttataacaaatataaccatgaggaaataaaaagaaaaatgtaataatatactccaagaataaagtcaaatgtattgttgaatgtaaggagttggttacacttccttatagtggaggttattttaaaatttgtggcttacgtggtgttatgaattgccctagatcaacactattatgcaaggccaactattaggttatttttggtagataaccacagcaaaactttagtataataggtaaaggttagctacactcccataccctcactctcaggtgttgtcatactccgtataaaaggttcaatcaagggagacatgagaatattccagaatctagaggcaggatgcagttaaccttagagaaggcatcagacaactagaatcttcggattcaatgtggaaacaaagcatagtttaggcattaaatcttgggcaccattccaaagaatacaggttccataacttactatatttttatacctagcaagctagagatgaggaattgctctcaaatattttaaccaaagcatgtatcttaagtaacactaatctcataagtgaaaactcatttctaatattcattttgctcattagcaaggcctctagtgttgactgtgataaaaaatagttcaaatgctggtagaacccaccccaggagactggcctttctgattaaattctaactctatccccacgtgaattcctgacttaagtaactgagttcctgcacatcagaatataagtatattatagatataaaaacatatgtaattaataaatattttaagtgagacacttctttcatctttatggcttaactatatcagacatttgattatttttagcggtctaactacaaaacaaaacacaaagcccacaactaaaaatttctttgtatatattgcaaagaggcaaccatttggtgtcaattcaatcatgagtgaaatgctattatacgagtacatctccctggcttgtatgggggtaatagggcatggaatttacagattcacaataactgagatattcacaataacaaagatatcaatatgtagcttttcccataactttgtgtaatgaaatcctcagtttgtgctgtgtaaaaagcttattgtttacttctcatgaaaatcatcttagtttttatctttatttaatagtctgtaatttgggggtaatacattcgttttgttgatactatgtgaagtggcaagcagaaaattctaacaggaatagataagcaagtatcctataaatcagagtcagtgtctctctctctctcttttaatgagtcagtctgtctctctctctttttccctgcctggctatctatctgtatttttcagttttgctttgcaaataagagaattgtgtgttgtaaaccaaccaacttaccattaattttctctgaattcaaaagcaattacaagcggactcttgagtttgtgctgcctggttgtctgcatataggccagatgtctagaataggatctttatttactatttttaccctcctaatttcatggtaactccaaggtagatgatatttgtaatcgtacactacttgtcagaaatctttctaataacactgctattttataaaaataaacattaattcagtataaaattttattttaaattgttaattcaagcaaatcagtgaggtaacttttacactgccgagcgtacgtgtgtgtggattagtacagccatgccatagacttcacttgtaatcttttctttatattttttatacacctgaaatgttcatcattgtgctgtagaaaacaatctcattgtgtttttaaaagctagagtgggtattgagaaggggaagaggatcatagaaaaagttggttaacatgctacttaacacttcaaatctttactcgatgtcatcatcagcaacattttaaatttatgcttctactagtttgcagttcttttcctttgattattcttatgatacaagcctttccacacaaaatttatgtacaggaattgtgtagaatttttctttggaaaatatggtgatttattacaatttgggcaacatcatcattttaaaaattcagaatttgatttttctcagaatcatcagaaagaataaagcatatatatggttcatgtcaggagaattagaacatgagaattaatatatctctgatcttttaaaatattttcatgtttgtgaatcagcagatttttcctagtttgagatttaaaaaatctagatataattaaaatctcactgatgtttcaccatcagatgattttatatttgtattttcttccacttcataacttgtatagagaagaatagaagaaagaaaaagggaggattgataatctttctctctcagttcttatagcacttcattttttaaacttattacttccttctgcctgctttgtttgtctacatgtttgtatttcatgatttcttagaaatccatctactgccattctgaaggtcatttacctgaaaatgatagaaagcagcatatattcaaacaactgcagagtaattgtctatatcagttatcattgttcattacttttctgttttaggattgaggggctgcctcgccacctccctcacacccccagcatattatcacaaagcctactgattcattcacatccctgggctgaatttgccacccactgtgtgttcctgttgttttgtgtatggaagtgaaaagatttaatttgatgttgttgaaaagacacagaggctaactttcaattttcatatgtagttcttccctctccctctgcaccacctcctttacttgttgagaaaattgccctctccatggtaacaatagaagaagctttcagattttagtagtagttgttgcagagaaaagaattcaaaaagtagatgaagtttaaaaatgaaaaagagagaggaagacagctgggaagaaggcttaatgtttatgagtgggtgtggaggggaagaactaagttgaatgaacaaagctgagctaaggggaagatggtttttctgcatcccagaaggcaataccctagcctttcctgcagccttcactccccaaaagataagagctttatctgaaattcttataggattcattcctgaagagcagcttgtcaccaaacagaaacactgtgatttcctcagggagtcacagtttattattatttttttaatgtaacgcttttgtgaactccagtttccacctcaattcaaatggtcttttggttacagggtgaaagagacccaacaatacacctttcccacttccggaggcctttggttaaaccatgtctgccacaaggacacaggagcctggtatgactggttgttttttgtttgcttttttgcctcctgtgctttctagattgtgagatactgtaactcttgtcgatgacacatagtaccgaacccacccgaagaagtatgtcagtatgtcacattgtgacaaacagcttctcatgctaagtaaatgcagaaccattgtgaaaggtttaataatgcccactcctcccccgccaaagatgtccatatcctaatcccaggaacctgtgaatatgttaccttacatggcaaaaggctttgtattaacagatgtggttaagttaaaaatcttgacacggagagatagcctgggttaccccagtgcgcccaatgtaatcacaagagtcctcctaagagagaaggaggtgatgatacaagcagagtaaaagagagattggaagatgctacactactggcattgaagatgaaggacagggccaagagccaagaaatgcaggcaggctctaaaagctggaaaaggcatggaaaagaatcctcccctacatcccttagagggaatgcaagctctgccaacacattgtttctagcttgtgagacccattttttggactttggacctccaaaattgtaagataataaatttgggttgttttaagccattaagtctgtaatcatttgttacaacagccacaggcagctaatacagccatgaacatttagtaatgactaactttgcacaattttaatacaagcttcttattaaggtttattttttcttaattacaaggaataaaagtggggtctgggggcaatgtcatggtccactccgttttagccatatgaatttgtatttccagcattagaacaaaaggtgacaaatctgaatgtatttgtgtgaaataataataaagcagaacaaaaagggaaaagtgtccagctggaaatgaagttagagaaagatgaggagaagcaagccaattgtgtagttttcccttctgctttttaaaatcatgatttgtttaacccactgaattctattttagaaacaggactgcaaggaagtgttgatggatttggtggcatgagaaccagagtcacagaggcaggaaagtaaggaataagtgttagaataggaagcagagttgcttgggaagagaccttatgacatgtggacagggctagacttaggagtcagaaagacctgagttcaaatgctatcctttagtatagtttgaagtcaggtagcgtgatgcctccagctttgttcttttggcttaggattgacttggcgatgcgggctcttttttggttccatatgaactttaaagtagttttttccaattctgtgaagaaagtcattggtagcttgatggggatggcattgaatctgtaaattaccttgggcagtatggccatttacacgatattgattcttcctacccatgagcacggaatgttcttccatttgtttgtgtcctcttttatttccttgagcagtggtttgtagttctccttgaagaggtccttcacatcgcttgtaagttggattcctaggtattttattctctttgaagcaattgtgaatgggagttcactcatgatttggctctctgtttgtctgtcgttggtgtataagaatgcttgtgatttttgtacattgattttgtatcctgagactttgctgaagttgcttatcagcttaaggagattttgggctgagacaatggggttttctagatatacaatcatgtcgtctgcaaacagggacaatttgacttcctcttctcctaattgaataccctttatttccttctcctgcctgattgccctggccagaacttccaacactatgttgaataggagtggtgagagagggcatccctgtcttgtgccagttttcaaagggaatgcttctatagtacaaggctacagtaaccaaaacagcatggtactggtaccaaaacagacatatagatcaatggaacagaacagagccctcagaagtaacgccgcatatctaccactatctgatctttgacaaacctgagaaaaacaagcaatggggaaaggattccctatttaataaatggtgctgggaaaactggctagccatatgtagaaagctgaaactggatcccttccttacaccttatacaaaaatcaattcaagatggattaaagacttaaacgttagacctaaaaccataaaaaccctagaagaaaacctaggcattaccattcaggacataggcatgggcaaggacttcatgtctaaaacaccaaaagcaagggcaacaaaagccaaaattgacaaatgggatctaactaaactaaagagcttctgcacagcaaaagaaactaccatcagagtgaacaggcaacctacaacatgggagaaaattttcgcaacctgcttatctgacaaagagctaatatccagaatctacaatgaactccaacaaatttacaagaaaaaaacaaacaaccccatccaaaagtgggcgaaggacatgaacagacacttctcaaaagaagacatttatgcagccaaaagacacatgaaaaaatgctcaccatcactggccatcagagaaatgcaaatcaaaaccacaatgagataccatctcacaccagttagaatggcaatcattaaaaagtcaggaaacaacaggtgctggagaggatgtggagaaataggaacactcttacactgttggtgggactgtaaactagttcaaccattgtggaagtcagtgtggcgattcctcagggatctagaactagaaataccatttgacccagccatcccattactgggtatatacccaaaggactataaatcatgctgctataaagacacatgcacatgtatgtttattgaggcactatttacaatagcaaagacttggaaccaacccaaatgtccaacaatgatagactggattaagaaaatgtggcacatatacaccatggaatactatgcagccataaaaaaggatgagttcatgtcctttgtagggacatggatgaaattggaaatcatcattctcagtaaactattgcaagaacaaaaaaccaaacaccgcatattctcattcataggtgggaattgaacaatgagaacacatggacacaggaaggggaacatcacactctggggactgttgtggggtggggggaggggggagggatggcattgggagatatacctaatgctagatgacgggttagtgggtgcagcgtgccagcatggcacatgtatacatatgtaactaacctgcacattgtgcacatgtaccctaaaacttaaagtataataataataataataataaaatctcaaaataattaaaaaaagaaacaaacaaatgctatcctgatcctaactggctggctgtctttggggaagttggtaatcttttctgtgcttatttcctcatgtgtaaaaaaatgaatatagtacccagctaggtagagttgttgttgggattaaatgatgactataaagcatctagcccagcttcggctacattatagctgcttacgaaattgtagttacgatgtaaaagagaaaaacactggaaaaggaggatatgggccattttattccaccttcaccaccttttagcttggtgaccttgggcaaattatgcttcattccgtgcttcattttccttgtctataaaagggtgtaagtacagaaccattgaggggtggtcattattaacctacctcaaatggtgtctgtaagttaatatatattgtgcttttcctatgtacaatatctagcacataattacaaatcaaatccatcccatgtgcaatatctagcacataggaaaagcacaataactagttattactcttgttgtagtaattgctacgctgtaggagtttgaattgtaaggcagtggagagtcactgacctttacgagaaagtgtagcagaacatttgagtagatagtaatggggaatattacataaatggatagatattaggggcagatattactattaaaatattacagcatggatatttattaaggccaaactggttaattagttgcatctctcaggttcctaatgttgcttaattttttaacctcccattttgtgctgccctttgtacgaatatttaatgctcccaacacctcttcagtagcacatgtactgtgagtttgttttgttattacttgtgtgtattagcattcctttgtgaaccaaaagcatggaattagctgttgcctctaggctacctagttttgtagtttggattgaagccttcacctcagtaacacctattctgtctactatcttacagaaaacttgtaaaattaagacagatcattaatatagcagaaagagacaaagggcagagaacattgagatactggatattggaaccacccaatagtgttgatttatttatgattatcagtttttgtctctgcctagcctcatgccactaaagtctctgaggcaacaaagaataagcaattttgctcaccttatacaaataaaacacagaaaaaggaatcactagagaaatggtactgcagcctttctgcagggattactgcttatttttaaattacttaaaaggtattgaaattattgttcataatgagaaacctgcctaataaaacagaaaattaaacttaacacttccctataatgtaaacagctcggttaggaacacaacattacagaaaccacttaagaattgattgtacttgttcttggagcagaactagaagctcaccgtttagaagctgtgcacatttccctatcaaacagtacataaagtttccatattcctcagaatcggcttcatttgtgccatgtgtttgcttggaactatgccacagaaagcagttctccccctcaagctgggctcctttcatgccgcagtgcaagtgtgtgatatactggcaccatgtgctaatgtagacccatttttatatgataagaattagtacggcctagggaatagacaagtatgtctaaaatcctccccatagaatatgtcccttcctttaaaagctgtcatactgtaagttccagctgagttaaaggccactgtgctcctatagggaaatatattctattgtaatttttacgttctccaataacagtctgttctttgtttactgaagagagctttcatgtcataaaatggtgttttttgacagagaagcagaatcattgttttattatagaaatttgctcttacaacagcaaaaataaatagctcatctcttaagctcctgatcaatgtctaacacctcctacccccagcaacacttcactgcaagtatattaacactctataatagcaattccactcacctaccaagaaatgatcttcacaaatgatttacagctaaaccagagcttaaacacatagcacccaatcaagggcagatttttatctttttcccagtcatataagttctgagaagaaatagattaatgttgatctcccagacaactgctgagaaaatgtacaaaggatgttgtttattttgaagaatgagacctagttgttaagcactttttccccttatatgtacgtccaaaggtaaccattacaccattttgatgcaaatttaggatatatatttattcatacctctcttctccattcggatgttgtctgtgtgagtgctcacagacacatgcacacatacacacatgcactcctgtttcacacttatttgtaaaactcacaaggatttccaagccattaatatagcattgtttaaggtgaacacatggttgttcaccatccatatgtatcttcactttgtagcactcagaatttggcaaaatcagaaggctgaaacctcatggattaaatatattctatataacatatgtcttaattgctgttactgtaaagaaacctggactagccatatttgactaatttctacctaaggtatttgaattcttataaatagattcattgctttaatcacacaagagtggtttatatgaatgtaattatctccactttatagctgaataaactgagcctgattctatccctatatgggaaacatgaattgaacagctgtgccaattattttgataattcaaatttcacatctaccatgtgaagacagcagaagagggttagggggcttgaattattctgattaactgtgttcatgagtgtaatcgcctctagataatcactcatttcttcacttcacttcccatctacaggtagtatcagcgaatggtaacatctcttgctttgcctcagtttattgatggctgccgttagaaataaaaagcatggttttgtttcagtacttaaatgaataatatcttcaaaatgtttttaaaacgtgaaaaggttgaatgcatttttaacaaatgttttgttagctttgacttttatttttgaacagatgagcacaataccccagtactcctttcctagaaataggagtactacctgaagacttatttcccaaagaaaaatatcaggtctagtgcagcaatacgtattaagggcattgaaaagttatattcacaaaatgtgacatcataacatatgttaatacttcttatcactgataataatccttgaagttgtatttccagagagatctcaatttcttctcacactctgaaagtctctgtttatcctttagagtaggaatgtaagaatttaacaaaacattctgaatgtttaccttttttctaaactgaaactacaatccctttttacccctatatagtaaaatataatattacaagtagaatcagcaaatttgtttaataattctttgggacagtttttacaagcaatggggttgaatttatgttccttgtgtgcagtggagttattatattcttcttaaaaagatgcatgaaggtaaattagaaatgttttacatgttttcatgacaggacatttaatcaaagaggagatacaagaggcttttcttgggttactgcaatttaattttccatttctttcttggaagggacattggatgcagttgtacgaggttaatatttctaacatgccacttttattgtggcattcttctgctctcaaacctctgatgatttcccatggccttcaacatgatgtccttatttgggcatctagtgttctgagccctcacattctggccccagcttcccttctcaacttgatcacagccatcgtaattctgctaactaattacacagctgcccttcccactctttctcaaccactctgctgtattctgacttctacactttagttttaaagctactccttgtcctgaaattccttctcccattaggtcattattaattgagttcatcctctaagttacagttcatgttgctgttcctctatggcaccttccctgaacctggtcccatataaaatcccatctctcagaatcccattagggtaggatatgtggtctgtagactattacgtttgtcatttacatattgtcttctattattgggtaactgcgtgtgcgagcatgcatgggctggcctgaaggtcacctccccaactgcattgaaagttcatcacaagttcaattatttcactagagagtctctttcatgtcatccatgaggcacattccctactgtgatgtgttatgcatacaattatttcaataaatattttctagctctttgattgaccaaagcttaattacctgtcaactctagcctcttgtatctggaatttctacagtctttggatagtatctttaggatgcaaaattaggaggagtatgtaccaggcaaactattacaaataatgccctcaaatagttacatttcactattcatgtcttgtaatttatcttctgctttggtattttagtacacttatgattcaatttgctgtatagattcctctgaatagggacaagagaattcgtcttgataagtggaagttcgaaggattccaaaatgatgttattcaaggtagaacaagaaattaatactgaaaaaattgaggagtaataatccccaaatatgtacatgcgtatctcgttttattgggtttcactttattgcactttgcagatatttcactttttgtaaattgaaagtttgtggcaaggctgcattgagcaagtccgtcgggcacaatttttccaacagcatgtgctcgctttacgtctctgtgtcacgttttggtaatttgctcaatatttcaaacattattattattattatatttgttatgatctgtgatcagtgacctttgatgttactattgtaattgttttgagatgtcatgaactgcactcatatgagatggcaaactttgtggggtgcagtggctcacacctgtaatcctaacactttgggaggccaaggcaggaggatcgtgttagcccagaagtttgagaccagtctgggaaacaaagtgagaccctgtctttaaaatatatatgtagaaaaattaactgggcatggtggcacatggctgtaaggagccctgccagctgcatgggaggctgacacaggaggatcacttgagcccaggaggtcaaggcggcagtaagccatgttcactccagtgccctccagccagaatgacagagcaagaccctgtgtggaaaaaaaaaaaaagacaaacattttttcaactttgattttagattcagggagtacatgtgtaggtttattaccttgatatattacatgatgccgaggtttggagtacaaatgatactgtcacccaggtactgagcatagtaaccgatagttagtttttcaacccttgtttccctccctccccactctagtagtcctccgtttctattgttgccatcattatgtccatgacaacgcactgtttagctccacatgagaacacgtggtatttggtattgtgtttctgcattaattcacttagaataatggcctccagctgcatccatgttgctgcaaaggacatgattttgttcttttttatggctgcatagtattccatggtgtatatgcaccgtattttctttctccagtctgccactgatgggcacctaggctgacttcatacctttgctattgtgaatagtgctgaaatgaggatgagaatacatgtggttttttagtaaagcaatttgttttatttgggctatatgcccagtaatgggatcactaggttgaacgatagttgtgttttaagtcctttgagaaatcttcaaactgtttcactgtggctgaactaatttgcattcccagcaacagtgtatcagagttccctcttctctacagcgtcagcagcatctgtcatttttttgactttttaataatagccagtatgaatggtgtgagacggtatctcgttgtggttttgatttgcatttctctgatgttgagtgatgtggagcattttttcatgtttgttggccacttgtatgtcttcttttgagtagtgtctgtttatgtcttttgcccattttttttgatggggttatttgtttttgacttgttgaattgtttaagttccctatagattctgaatattagacctttgtcagatgcatagtttgcaaatatattctcttattctgtagactgtctgtttactctgttgataaattctttcactgtgaagagctctttagtttaattaagttccacttgtcaatttttggttttgttataattgcttttgaggacttagttataaattctttcccaagtctgatgtccagagtggtgtttcctaggctttcttataggattcttataatttgagatctaatgtttaaacctttattccatcttgagttaatttttgtatatggtgtaaggagggggtccagttgcattcttctgcatatggctaaccagccatcccagcatcatgtcttaaatacagagtccttttcccattacttattttcataagatggcaaacttaatcaatcaatgttttgtgtgttctggctactccactgatcagccattccctcatctctcttcctctccttgggcctccctattccctgagacacaacaatattgaaattatgccagtcagtaaccctacaatgtcctctaagtgttcatgggaaaaaaaagagtcacatgtttgtcactttaaatcaaaagtcagaaatgattaagattggtgaggaaggcatgtcaaaagccaagacaggctgaaagccagacctcttgtgccagttggccaagttgtgaatgcaaaggaaacgttcttgaagaaaattaaaagtgctactctgttgaacacaggaataagaaagtggaacggccttatttttaatatggagaatgtcttagtggtctggatagaggatcaaaacagccacaccattatcttaagcaaaaggctaatctaaagcaaaggactaattctctgcaattctgtgaatgccgagagaggtgaggaagctgcagcagaaaagttggaagctagcagaagtatgttcatgagccttaatgaataagccctctctataacataaaagtgcaaggcagagcaacaagtgctgatggagaagctgcagcaaactatccagaagatcaaactaacatctaagttaataaaggtggcaatactaaacaacacattttcaatatagacgaaacagccttctattggaaaaggatgccatctaggactttcatagctagagagaagtcaatgcctggcttcaaaagttcaaaggacaggctgactgtcttgtgaggggctaatgcaactggtgactttcagttgaagccagtgctcgtttaccattccaaaaatcctagggcccttcaggttatgctagatctagtctgcctatgctctgtaaatcaaacaacaaagactagatgactgcacatctctttacagcatggtttgatgaacattttgagccctctgttgagacctacttctcaaaaaaatgtgtctttcaaaatattactgctctttgacaatgtccctggtcacccaagagccctgaggaatatgtccaaagagaatgattttattttcatacctgctaacacaacatccattctgcagtccttggatcaagaagtcacttcaactttcaagtcttattacttaaatcatacatttcataaaggtatagctgctatattgtggtgagtccactgatggatctggataaagtaaactgaaaacggaaagtcctcaccattccagatgccatgaagaaaattcatgattgaggggaggaggtcaaaatatcaacattatcaggagtttggaagtagttaattccaacactcatcaatgactttgagggtccaagacttcagtagaagaagtcactgcagatgtggtagaaatagcatgagaaccagaatgagaagtggagtcagaaggtgtgactgaatagctgtaatctcaaggtaaaacttcagcggatccagagttgctgcttatggatgagcaaagattgtggtttcatgagatgcactctactcttggtgatgatgctgtgaacattgttgaaatgacaacaaaggatttagaatattccataaacttagttgataaattagcatcagggtttgagaagattgactcaaattttgaaagaagttctactgagtaaaatgctatcaaacagcatcacatgctacaaagaaatcattggctataaaggagagccaatcgatgcagcaaacttcgttgttgtcttattttaagaaattgctacagccatcccgaccttcagcaaccgccaccctgatcaatcagcagccatcctcactgaggcaagagcctgtaccagcaaaaagattatgactccctgcaggctcagatgattgttaccattttttttaggagtaatgtattttcaaattaaggtatgtacattttttagatacaatgctattgcacacttgacagatgatagtagagtgtaaacataacatttaatgcactggggaaccaaaaatattcgtgtgcctcattttattgtgatatttactttattgcagcagtctggaaccaaacacacaatattccaaggcagtcctatatattgtttcatgtctctctttcttctaaaatgtgtgtaggagaaaaaattatatcacttatgttactgggccataatatcaaaagcctgcgaatctgatgcacatgataaaaactggtcttaaacctgtcttgattatcctttgttaatatgccaaatttatagaacaatagagtttcaagaaatgtgaacaatgtagaataactaaaagatctaacgttgaatagctaaaattatcaacgccctttatatcactttagaaatgcgtttgcaaatcattatcaacaaattgtagcataaaattctttttttttcttgactttgaaattgtatttcaagatccgcaatttacaccacattatttacttactggcttgtgaaagtgaaaggcattttcatttttggatgttaagggttttagtaaatgacaagtaaatcaatcctttaagttccgtgtggtataatagcttggaaaggaccatcttaatctttttttcaacacagggagataatttattttaaaaataacacactaatagtagattaatattattaccatttcaaagaagtcaccaaatttggtaggcttaagaggttttttttttttttttgagattactatgctctttttttattttatttattttatatttatttatttattttttagttttttaattttactttaagttctgggatacatgtgcagaacgtgcaggtttgttacctaggtatacatgtatcatggtggtttgctatactcatcaacccaacatccaggttttaagcccccaatgcattaggtatttgtcctaatgctctctgtccccttgcccctcaccccttgacaggccccggtgtgtgatgttcccctccctgtgtccatgtgttctcattgttcaattcccacttacgagtgagaacatgcagtgctaggcttaagagtttttttaactccccaaaatatcaacaaattgaaacattactacaaagaaatagagaaataaatttcactgactgtcttattgttttttaagtttgaatagctaataatgatttcttaaacagctatcatattttttatttttaaagctagccaaatgatcagtgatttttataatactgataaatactgcttagaaaaggaacatgtgttctagcaatttccacacatttctgattctaattacttgtttctttttgttttatttttatatttttaagttttgtgagtacctagcaggtgtatatatttatttggtacttgagatgttttgatacaggcatgcaatgtgtagtaagcacatcatgtaaaatggggtattcaacccctcaagcatttattctttatgttccaaacaatccaattatactcttttaattaatgtaaaatgtacaattaaatcattattggttatagtccccctgttgtgctatcaaatagtaggtcttactcattctttctaactaattttttgtacccagtaactatacctacaccacccccacctccccacgacccttcccatcctcaggtaaccatccttctactctctatgtccatgagttcaattgttttgaattttaaatcccacaaataagtgagaacatgcaatgtttgtctttctgtgtctgatttatttcacctagcatactgacctccatttccaacaatgttgttgcagatgacagaatctcattcttttttgtggctgagtagtattccattgtgcataggtaccacatgttctttgtccattcatctactgatggacacttaggttgcttccaaatcttggctattgtgaatagcgctgcaataaacatgggagtgcagatatctcttcaatatactgatttattttcttttgggtatatacccagcagcgggaatgctatattatatggtagctctatttttagttttttgaggaacctccaaacggttctccatagtggttgtgctaatttacatttccaccaacagtatacaagggttcctttttcttcacatacttgtcaacattggttattgcctgtcttttggatataagccattttaacgggagtgaggtaatatgtcattgtaattttgattttcatttctctggttatcaatgattcagtgatgttgagcaccttttcatatgcttgtttgccatttgtatgtattcttgatctgccacaagtctctaattacttgtttcttgtaccactgtttcccttcattgtagtcagtgatttggtcaatcaacactttttacgtatgggtatctgttaactgtatttctaggaatggaccaagaattgagaaatttatcccaaccagaaagaacaaaatctatggaggcacaggattactgaaagctttgctcctatagcctcagtttttttctgcaagttcgctgcttcccagttgtccttgtgataaaattcaaaacctcaaactgatttttaaaaagccaactatatactgcttctactatgtctacctaaacttatttgccattatttgtaaagaattccaggctctaaccagcccatttgaggctttattttacgttcatgcctttgttcatgtctgtctttcccttataatgctcttctcattctctagccaaatctgccaaagttcagctgtagtgccatacttgatatgaagtctttgctgagaattcccatatgtggtcatttccttcactgatttgtttcaatagttgttgccattattattattttttttatactgttgctggatactttcgcagatccaatctctaacctgttgttctaccctaggaggttgaccaatatggcagtagcattgggcttgcttgtctattggcttggtccttgtgttgggaggcatcagcagatcaatggatgagaggagagtgagtcgagggatggctaggttcctttactcacagccccagctcctgtcaagaggtcttgtccctgcagccacttctcagattctactaactataccctccccttagcctttcaggccttgaggaggaaagcctcctcatcccactttgaatgaactatttattgcaagaaccatgactgattcagaatataatctgtccttgaatgaaatagttaatttccccttttgtattctcgtttcatatccctgtccctttatccattcctatattatatcatactatcatatagctaccttatattatactatgacatgagtaccttgtaagtatatcatgctatattatagttcttaagtgtgtgggctttggggccaacttacctatgttagaagttctgccacttattaccatgtgatcctagacaaattgtttaacttctttttcattcattttctttactagtaaaataggggcaatattagtacccacctcacagagtaatatgataattacattgactgatagtttttatttaaaacttttattgttcttactatgaaatgggaaatgttctaaacaccttacaaatattaactctattaattctcataatgaatctgagaggtagagactcagtatctccatttcacagtgctggaaatgatacagacagcatttaagtaacatactgaaaatagtaaaccgaataggtggcagccagtatgcaaattgggaaagcctgactccagagttcattcttttaactagtatgctgtgatagactcttttggcatatggtatgcactcaataaacaactattgttgttgtcgttagcattacttcccattgtattattacacaaaaaataattgtttatgagtatttgtttgctagattataagttccttgaaaaaagaagacaagttttatttgtctatgtgtactagctgagtgcttggcaaatagttgcagtttagtaaatgtttctaaaacaaattattagttgtttcttatgtatttcccaagtctatcctagccttggaaacagctaacacttagctaaacctagaaatgtcatttgagatttcagcagccatcattgttgctgaagccacaggttctcctttttatctccaatttcttcctcagatgattcaccactttctttgtcgtttccctacttcatttttcctatagtgacttttgttctccaataaccattgatagtgatgacagtcccaccttggaaccacttctaactgtcctgttcagcttttcctgaggccagatttcccccaaaatacattttttagcttcataactgctccttccagaaatttgaaacgcattctcaggaattaagcaagaggcatttgattgacgtcatttaatttgtgtttaaatgtgttcttcccatcaacgattaaccagtgcttcagccaagatacataacttttattctccactaaccttagggttgaggtcacaatcaggtacgtaatctgtagagcccagtgaaaaatgaaaacgcagggcccttggttaaaaaaaaattaagaatttcaagatggcaacagtagagcatgaaaccaagtatgaatcccttctaatgcagatccttgtgtaactaactgcacaagttatacgttcaagaagctggtcctggttgaggtctttgtctacctagggcacttctcactcagagaggtggaataatcttaactttctgtcttccgtcatctgaaaacttgccccaaagttccttttgccatctcttgcagcaaacctagtggttgttatctgttaaggattcctggtggcttgctttagtttcctacagttcttgagctgcatgtgttgaatggaactccaccattaccatgtaacacatctgaatactcttattttcctccagttaaattctgcgctccttggaaataatggtcatgcaccctaccttagtgatttctaaatagaggtagtatgtaaaaatacatatttacttgaattgcatcttaagaggccagcccatgggaggcatgaagaaacctatgttactaattaatattcaataattgacagttacacattcaggtagtagtgtcatggaaccatcacgttacatggaactgaagagctgatgagaggtttagggtctaggaggacaaaagtgagtgtattagtcagggcctgaggttatatgtacccagacaggataaaatgggacaatattttattagtggaaatatctatgtgaaagaaaagaaggaggaagccaaggaaggtgcaagagatgttagatcaagatgcaattctgactctgcaaggaagagagagggagagaaggctaggcagaagcatcccagtgtgcggtctagtggaaggaaattttggcaaagctgttgggaagtcattgaggcagagccaggcaaagaagtcccatgtctcccaaggaaggctctctgccttagtattcccaccacacccaatcattgggtgaggagaagtctgtgagaagcttggctttggtgcagtgcaatcatggatttcaaaatgcagtaacaggagtcctcagtcagttaagacccaataatagaaggcctgcatattctcatggtggccacttgggtatgaggagcagtggtgtttaaaactgttttgtataatttaaataaagaaaagctgaggactacttaagcttgattccttcagaagacagtctttggcctttatatttcatgtgatatctttgccatatgctctgataactctccatgtttcccctaccataatacctcaggttgttgcaattgcttttttattgcctgtcatcactactcgtttgttttctctttgagaacaggaattattttctccttcactgctacagcccctgcacctagctcaatgagtgacacaacagaagcacttaaaaaattgctataactcaaatttgggggatattctacaaaatacctggcctctgttggtcaaaactgtaagtgttataaagttcaaagaaaggcaaataactatttcaacttaaaaaagactaaggagatacgacaactaaaagcaatgcgtgagtctggaccagaccaggaaataaaaatatagctataaagttcattaatggggtaattgtcatactctgaatatagagtatggataagattatggtactaaagccacgctaaatttcctgactttgaaactgagctgaggttatttaagagaatgtctttgctattaagaaataaaacctaaagtatttaagggtaaaggggcatgatatctgcaaattattctcaaatgattcagaaaaaaaatatatatatataaaacattacatatacagttatatatctatacacacagagagaatgataaaatgataaataattaaaaataatgtggcaaaatgttaacaaatggtgaatccgggcaagggttacctgggagttctttatcttgcaaatattctgcaagcttgaaattatataaaaataaaatgcatcttataaagtatttattcagtgaataaagaacaaaaaaggctaactgcagttggaagatatttatgaagttggttatgaagattcttaagaagttaccgatggaggtgctagtagaacattcaaaaaagaagtagggaaggttgaccaagtaggaaaatatcaatatccaagccagtataaaatggaaatgagaagtgaggaagtaagtggaagacaatgaggatggttttcgatttggccactctatttggagaggcagccgaatgcaagaatagaagccagaagaagatgctcagtgagatggttgaaagctagatagattacagcatcctcaccagtaaaaccctttcggtaactagaaaggctacaatttagtaccttcctgacttctatgcttattttcttcaatacataaaatggttccgtaaactcttttaccttctgaattctttatattaattttttgaagttgtaaataaaatagcatcagttctacattgttacatttcagcttaattcatattcatttactgaaaatgggaacatttgaaaaatcatcatgggcatttatgctatgtagattgttgatttttatagaaaaatataaaaatatgaccagtttgattttcaaagtcttttcttagacatgtaaatactaagcattcaactcaacatatagagtttttatttgagtattatttaggtggaattctattttaatgaatacaataaaaaattgtaattttgtctaaaagcctaaaatgccctagttataatatgtatgatttcactgtttaacttcctatttcatagggttgctatttataaccacttcactcaactctggggggacttagtgagattaaagacttctgattcactttgtatttgaagaattttttttcctccatctttgctcagctagtggaatccatgatgaattctcatctccaaggggtaagcagtttttagtaaagcccagtagctgacttatgactccttagaaatagcattgattccttccttctcctgtgttttgtttcctctagaatgatagaatccatgtagacacgatccattatcatgcttaggtactggtaagcatgtaatgattttagttttgttcgctttaagttatttgtgtcacaaatatctgggatcatatcagagaaataaataagcacaattagcattctacttgtttgttatgactaaagctaggttgaggaaacagaaaaggaccagaggtcatatgaggatgaagataatactaggaacagcatgtttgggagagtaacatctggtaggggtagcagattgggggcagagaacagaattttatagatggatattttggaggcaagtagtttgagtaatgattagatctaaggtgttttctcatctgtgggtggctcgaaggaatagaggtgaaggtcagtttatttgagaagttctggaattataaaactaagttgaagtcaaagaaagtatagtagcaaataaatagaatacccttaaaaggaaaccaaatgaaaaataatcgttactctcaccatatgcttgtgttcttattagcaagaaattcttttaaccactgtttttataatatcttaatgaaaaaatactgaagcgtatgccatattaaatccctctctttatttctagaaagggaatcaaaggagaaaattcccattctgctatactaaaagaccactaagtaaagagcctattagtgtatgataaatcccatagcaatatacattatcattttacagcttctttgttgaaatgaatgtttgtatgtgttgaccatagagtgggataaaaagttgaaattttgttttgaaatattttagaaatgcatagttgtactgcagttgtgaacctccttagatttttaaggaggctgcttcaaaggatctcattaataatcttctcaggtgcttacaaagcatgtgtctgtcagcagaattagagaatcacccaactagagaacaggtttcacaataccctgagacctattttgttcattagagaggaaaatggcttgttttgagtctaagttgacatgcttgctaatttcagcaataaaagctgttcattgtggtcaggtttaatttagagcctggtaaggttcagattaaagttgatcaacttacttttacaacatacttcttaaatgaactttgaaatcttaaaagaaggaaaaaagtatagcaaacagtgaataatgtatctaaaactgagaagcaaaaaaaatctggttatgtgagagtgaattaaaagaagaacaacccaataaagataatctttgttatataaaaatttccaagtatcgaaaagcacgatttttcatgtgagttacacactataccgaatatatttgtccactgccacatgcatagtccctagaatagtgcctagtgctgaaaaatatttattaaaatgaatggatgagtaaatgaatttatgtattttgccagccctgtgtatttaaagttctctgttaactttgaggtgaaaatttgacttcatctgaggtttctgggtaagtccgttttaaaaattctattgaacatattcaaacattttagggtaggcaattccaaagcaacctttcagcttcccatgtcacagatgaccagagtttcacattctaacactggaaaacatcttatttcataaaatctacctgctactatatggttcctactttaaaatttgttcagtactctccagctgacttatgccacttacttcaatagctgtctttggcaatttgttccatatttcaaacactctgttgtgtaaagaaaccataaaagttagaaacctgaaaattggattttttttctgagcaatcacagcttacaaatgtggaaaatttgttaaaagttagcccctccaatttttcaatacagagaggagaaagtgcctaaagtagatgtacaatgtttggaaaagttttttgcattattttactattaccaaaagcaattgagtttaaatcacaaagcctgtctccctacctcttcacagaagaaacactacagaatgatcaaaatttggcctttccaaaaccaaaattcgttagaaaatcagcaggagtcaaagtacagagtaaataactaagtttcatataagtttcagatacattactatctaccactttcatctcttcatcttcattggcctcatgtggtagaacatcatatttaaaattatacaaacttgctggcttgtttactagtgtggttattataagaaaaaaatgagaaaatatagataaaacatctgtcacatattgcttataaactaacagtaaatattacttgtattttccccaattaaaataaaatttactgagttttagaaccagagctagtcagatgcctttttttcataaatttcttcataaatacctctgagattgtggtccttaaatctagagagactaagatgacagagaaaatagacactgaagaaagggaagaatatcttaatgatttacattactacctataaattaaaaattgttaactttattatatttgtatttttatttaaaatagtgctatattaaagtcatttataatacaggggaataggaatactaacctgtaatctgatgctctccaaacttgcctaaatcataaaagttaattagataatttatttaaaatgcaagatttgcagccctttccactacatattcattagttctggagggaggcaaaaaggtttggtgattcttacggacaggcagcttaggagaaaagctgatttagctcgtctacttcaccttttcatttgacaggtgagaaatctcaggggtacaatgaagttaaataagtaatatctcttaaatcggttctgtgctttttctgtttttaaaataaatataccttaattttgacgtcacacagaatgatattataagtataaatagttatctatcttttaaatacattgtcgtaattcagaataacatttcttactcaaggcattcagacagtggtttaagtaatccgaggtactccggaatgtctccatttgagcctttaaatgaagaaaatctatagtcaagattttcatttgaaatatttttgatatctaagaatgaaacatatttcctgttaaattgttttctataaacccttatacagtaacatcttttttatttctaaaagtgttttggctggtctcacaattgtactttactttgtattatgtaaaaggaatacacaacgctgaagaaccctgatactaagggatatttgttcttacaggcaacaatgcaggatttggaacagaggcgtccccagttggaagaactcattaccgctgcccaaaatttgaaaaacaagaccagcaatcaagaggctagaacaatcattacggatcgaagtaagttttttaacaagcatgggacacacaaagcaagatgcatgacaagtttcaataaaaacttaagttcatatatccccctcacatttataaaaataatgtgaaataattgtaaatgataacaattgtgctgagattttcagtccataatgttaccttttaataaatgaatgtaattccattgaatagaagaaatacatttttaaatcaattcagggcttatatagttgcaaagcatgcattgatgggtgtggtgaccacagtgtggcagaacatttgtggcagaacatttgttctttagttgtcatctgggctggcatccatggagatgccagtctctccctcatatccttggctgttggtccaagcaggcagtggcttcttcctgggccatctttcattcccatgtgcagtgactttcagatctggatatctctccgctactttgatgcccccattttgtaatatcaaaaatcatcgtactgtaccttatgccgtagtagggtgggcaggaactttggtaagacccatctgactagacgctgtgcatattcttttcttctgacatacactcctatccatttaatggggagagtgattcgcagtgattgtgtgttgtgtcagtgagtttccatggggtcaggaagagtgacagacgaaggagtaggggaaactcgccacccggtttccctcagagattctcctcagaaatgaggtccaagtcagctctgctttcaggttctctcagatctctctcggtttcttcacttctctctaccttccttccctccagggacacacactggtattgaattttcttgcttcctctgcaatatcccctcattttccttcccacaacccgaagaatcctttgtagtgcaggaaggaggaaaacctttcagccatctttttttttctctttgaaatcttttgtcttttaccaggcttagacttttcaaactcggaaaccatgagagtctatatcttcataatttatattctgctatgttaacccttccctaaggaaatgactagttgtcaatatgttggggaaagtgaaagagtaaccagagtaaaaggttaatattttaaaatattattagtcatacttccacatattgggtaagtacttattgataatagctagtatttattcagtacctcataagcattagatggtgtgtgcacatgtgtgtgtttctgtgtgtttctgtgtgtgtgtacaaaatctttacagaatcttgtgagctatattttataatccccattttatagacgagaaaacaggttccaagaacagttactcggccgggcgcggtggctcacgcctgtaatcccagcacttggggaggccgaggcgggcggatcacgaggtcaggagatcgagaccatcctggctaacacggtgaaaccccgtctctactaaaaatacaaaaaaaaattagccgggcgtggtggcgggcgcctgtagtcccagctacttgggaggctgaggcaggagaatggcgtgaacccgggaggcggagcttgcagtgagccgagattgcgccactgcactccagcctgggcgacagagcgagactgcgtcgtttacaaacaagcaaagaacagagcttggaatttgtaaatgtctctttctgacttgaaaatctgcgctctttctagtatgtttaccatttcccatcttgttttgttgcttttgttaatgaccttaatcattgtactaagactaaatacttcttttgtctgaaattatgtatgttttgattcacttcctaaagacatgtcttctttcagttgtagtgattgctaattaaaataggctgttcttggttttgaaagtttaactctttattgttgcttaaacaatgaatgtggatgtatgctaatgtattatttcagtaacactagccactataacaggtaatctcccaaatcttggaggcttactacagcagaaatttacttcttattttagtgcagtccaaaataagcagccctctatgaagtcattcaggaacccaagctccttccatcttttgtgtccagagcataagactcatatgcatttaatgggcagatgaagaatgagtattactcatgaaaatttgtcatgagccacgcctggaaatggtgtgtgttaattttgttcatattctgttggatggatcttgtcacatggtcacacctaactgcgagggaattagggaaatagtgtacactgttgagcctaggaagaggaacagatttggtaagatagccatacaattgatttagcagagcattcctccaccatactggaaccttgagggttctccaacaagttgcaacacactgacccaaaagagtgaatcttagtgagtgatttactcaatatgagactgaattcccattacacaggtaagtgatcagtttcttgcctgagaaatatggaaatttggcagtgaggtttatgcaaatctgaacatactatacagagagtcatttgttattttactaatgaaaaatcacttcaattttttccctaagaggaagacaatatgaatgtattatacagtatttgttcaacattgtctgaacattttccattatcccctgcatttttttttcatattgcattgactttttcatgatagagattaaaattgaatgaccggagggcaagtttgtatctctctgccaatattcagtgatttgaatagttcttcttttctaagcttttgtcttttaggaatgaatacctttatgaatatttgcagcctagtggaaaggctgtaatccaaatggtccaagaaagcattttcttaaaagcaagtgtctgtcgagatgtgtcatagcgcttattaagagtctaagctggaatcttagttccaaatatgcctggagcctctaaatggtaccaggataattctgacaagatatgtttatctaaacaatgtcatttgcagccctgctacacttcagtttatctctccctttgaaatctataaaatgggatggaaattcaatactcataaacttttcgatcgtgttcaaaatagaatttttcttagtaaagatttggttttcaggaaaaggacagaaataaaatacttgctcataaaattgtattttctcatttgatgattttggtcttcctttttattgccatgaaacttctagaaatgctcaaaaagaaatcagctaaataaagaaaaaatagttaatatatgtatgtaatactatattgaaacatttttctttctctggtaaatcccatttcataactttgaacagttgggaaaatctatacatagttattgcagtctatcaagagaaaagttcagtacaaagctatttatgtctactagaaatattcatgttaaacttcaagtaattgggtgtgcaagccaccaccatgttttactatatgaaactattaccgtggtatctgttgtattcaggtaattatattgatggaaatcatgcagtaataatctaggtaagagagtaaattttgtctaaatcagatcaaatgaaaaattctccctctttctaatattcgaattgctcatttttctttaactctttggtgtctgaatttgtcaatcattcctggccattttcttctgcaaaagggctgggtcaggggaccaaaagcagataagattagaagaatttaaattttcttccttggaggcgtctgaattacatgaaactcttgttcgtgtctgttaatactgcaaggcataataccataataccttgcatagcagtgaagaggatttggaaagataaaactgcttccttttatcattctgtttatttcacaaacaatattggtgaatgtcgttcctgtaacatttggatttaagagccttgtttctgtagcttctccctccgtaacccccaccactaccatttcggggctatacagcaatagcatgcattactttaaaaggcaggctgcctagactggccacttgttagctttgtggccttgagcaaatgactaatctcagtaaactatctgctcttagtttccttctctgtaaaataggctcacttataactatctcatgggttgggaggattagatgaaataattaatgtagagcccttagatcagggccatagtaaaagctgaatgaatgttagcatttgttattttaattataatctattggggtgctttgaaggcttaatgcaaaatacttaatgagctttttggtagctgtttagttatttcgccccccaccaccaccccaaaaggagagatttaaaagaccgacaggagaaggttgcttggaaaagatggaataagatctataaatagaattaaacaaatattcaggaaagccttttgtgggaaatactgcaaaatttttattatctataaatttaataggtagataaaattactactcccattttagagacagaaaaccgagactcggagagctaacgtaacttgtctagggtcttaggaagatgacaagtgaggaagtagaattcaagcccacgtctatatgattttaaagcccgaggcacatcaaatggaaaaggctggttagtcagaaaaataggaaggtatatttatctgacaacttaaaatattaggactaacctcaggtaattatagtctggatatacatttttgctgctcctgtttatacttttgacttctgtgtatttgagtgtctaatcaaaggattgtcttttacatgtgttggagatgtacagactagtggaccccaatgatctattagctgtgtaaccttagccaagttaattctctttcctaaactgtggttctctcatctgtcatgtggggctaataatagtacttatgctggtagggtgattaagaaagtaaaataattggtgtttctaaagtaaatatgtggcacatattagatgctcattaaatggtacatattgttatggtgagatggatttggtacagagagaactggagatgggagaatatgaagggtgtataatgtggccttttattagctaaaccaagggaaggacttctgaaacagaattccaagttttaagagggagtcgtttattttggaattattttttcagctaaggatttttcaacccagtccagaattcttagagaaatttagtgatagcttataaattttaagaaaaggaattcacattatattgcataaagaactggtatacagggccatagaaggggagaatgttcttctgtatgagaataaaaaaaaacatctctcacacgatttttgaattaactgacagttttatagcagctttgtcaacccatcattcattgctgcaaccaaatctatgaaatccttcatggcgaaataaaaaggctctgttgttctccacatttgtatgaaatctctgttgctaatgaaatgccagccagtatcttcctctcaggtattgtctattagatggttgcttattttagaagaagtggagtcaaccatataaatttccttcttttgacatctagcacctgctgtcaacctgttatagctacaagcagctctcaaaattcacatccactaggatgccgctggcaaccaaagagttcagttcagttcagcgaacgtttgaatgcctactctgtgctatctaatatcagagatggtagaggggatacaggaaaaaagtaagattcagcctttgtctttaaagagctcacaatcaaatgtgggtatttggacaagtatatttaggcaaggcagtttaggataggtgcttcagtagagcagtattacaaaatgttgagagaaaactagaggaggagttttaaatgagggcttagtggaatgcttccaggaggaggctgaatttgacctggtcatgaataagactttgaaaagcagaaggaagctggagagggaagggtatttcaggaattgatgacaggagaatacataattagacctgttaacagtggggtggaagacgaatatcagcatgggagtgtgtgtgtgtgtgtgtgtgtgtgtgtgtgtgtgtgtgtgtgtgttgtggaggataagggagtaaatgaagtcagtaagaccagttagaaggcaagagagcccaagctggagcagtgaccatggagtaaaaagaaagaagtgaaattgagacataaggtggagctagaattaacaggattttgacattgattgcatatataaaactgtcaatctaagagaaggcctgcctctaagagttggagattgaattctttggaagattaatgtcataaccagagacaaactcaggataaggagttgattatgggagacaaagtaatgtgcttaacatgaagctagatgaccatactgagattttaaagaaatggttgaaaacatagagattgcaggagtgatgttacttttggacaagaattcaaaagttacctggaatgtctgagcttgcacagagagagggtacctggtgcaaagaaaagtgaacctaggaaaaagcctagaagttggtttacatttaaggaatttgagaagaggtagcaccacccaccccccacacaacccccaaccctgccaacttacaatatagaagcatttagacacacactgaataataattttttttttgagacagagtcctgctccattgcccaggctggagtgcagtggtgccatctttgctcactgcaactccgcctcccagattcaagctattctcttgcctcagcctaccgagtagctggcattacaggctcccaccatcatgcccagctaatttttttgtatttttagtagggacggggtttcgtcatgttggccaggctggtctcaaactcttgacttcaggtgatccacccgcctcggcctcccaaagtgctgggattacagacctgagccaccgcgcccagcctaaataatgaatttatagatgctacactgtatggtttcctttttctgctgctgtacaaccattcaagtaacataagtttcatcctggttcttaatgataccatgaataaagtatagaaactctttagctgaggattaaagattgttgtgtttaggtagaccaggtttctgatgcagccctcagtataccagggaaattagccattactgtttgccttgtaggtctaatgaaccctttagctttttattttgtatatgtctaagttactctacaaattcttatggaagtataaagagatagtgaaagacaatcttatgagaaattttaataagaattgaaatacaggctgggcacagtggctcactcctgtaattccagcactttgggaggctgaagcgatggatcacctgaggtcaggagttcgaaaccagcctggctaacatggtgaagccccatctctactaaaaatacaaaaaaattagccaggcatggtggcgggcacctgtaatcccagctactcgggaggctgaggcaggagaattgcttgaacccgggaggcggaggttgcactgagccgagatcacgccattgcactctaacctgggcaacaagagtgaaactccatcgtaaataaataaataaataaataataaaaaagaaatacaacttactttttgtatcaaataaattttggtgcacaaacatcataaatgacataatatctgtcacacatcctttagcaaaacaggattgttaaaattcttacagctaatattatgtggtgaagttcttcctgttgaataattaagtggattaaaatatcatatttcctttctgtcattagaaatatattgtgcattaatcagtccttgggcctgagaacatttatctaggttttcatcatctgaaaactcacagtccaatatttcacctgtattatcaattcaccattatcattagagtttagaatgctgctgtctctttccatctatcttctgttgtatctaataattaggagatatatatatatatatatatatatatagagagagagagagagagagagagagagagagagtgagagagagagagagattggtaataatactaatatatataataatattatatatatacacacatacagagagagagagagagagagagagagagattgattttaagccattaactcatatgattgtgggagctgaaaagtcaaaaatctgtaaaatccaaaagcctggcaggatggagaccaagggaagagttgatgttgcaatcttgagtccaaaggtaatccgatagcagaattccttccttttctggggacttcagtcttttctcttaaggacttcaaaattgattggagaaggcccacccacattgtggagggtaatctgctttactcaaagtctgctgattgaaatgttaatcacatctaaaaaataccttcacagcaacatctagattggtgtttgaccaaacaactgggaaccatagcccagccaagttaacacataaaatttaccatcatcagccatcatcatgaggttcataatgtcatgtgtttcttcacatataaatctcgtggttcttttatttttttagtagtacctagttaataaggtacctggaaatatacgttaaataatagaaatggtctttaatatcttaatgaatttcagagttctatcagagtaattgtaacttgtatataaaaactgatatataaaaaacaagtatgttttttcttcctatacgttgtgttaaattaatactaattacctatcatgaaatgaatgttttccatttttcataaatgtatttcatttttaaattaagaggattaatatcaaaacatatttgaataggatttaaaatccaaattacctgttgcgattatatttaattataaatctttcaagtgagtttataataggaaaaatattttttattaaagtgatgtaccataattatgaacataaatagtgttttctactaattgtttttgtcttcattatgtttctttttaaggggaaagatctgggttaacaaatgttttattcatccaccttgaaaattaaacataataaacaaaactattaaataaataaaccaattaaagaaaatagtttttcttccttttttgtgataaagatgattatgagtaaatatattaaagaattttatactcagacaaagtgagctaataagacaaatacaaacagagatgagcccagaaagagatactctacatgtttataggctagcatttttatcttatgacctacagggtcattgtaactaaagtcttgaatttctgttatattttggtacctgtgggcataaataggaatattactccctgatggcatcatgcattttagataaaactaagccaagggttaaacacgtgccatggactgttcctaaaaaatgctctcagctctcaagttatagaaaattgtagggattattattttgtacctactacttctttctttaccaaaatttacttatacatgatttgaaaattgcttgccacctgtctttattctgttgtacttgtcttaagtaaaacatttataaagtaagtaggaaggattaatagattgtgacctttctacatgaaaaggggaaagccgagcttgttctacttttgtcaggaaagagtttgaatagttacctgttactgtaaaacaatcaccccaaacttagtgtcctaaagtagcaataatcatttattatcactcataggttctgtaggtcaggattcatgcattgcttggttgaggggttctgtctcacgatcactcatgatgttgcactcagatgtcaattaggctgcagtcatatgatggcttgactggggctgaaggattcactttcacagtgagttacttgtatagcttgtgagttggtgctgtctagttggtttccctctaaacgagttcctccatgggactacttgagtgttcttatgatgtggtggctggcttaccccaggacaagcaacctatgagttttgccctgagttttctgaaacatgatcccatgttgctttgaatatccccattagacactcccacaaatgtcaatcatactctttgccctaaaagttgcagactacttgtacatgtcctttatcctacatgtgtacaggaaacacgtgcagaataacatgtgtttttgtttcttgaaagaaacaagaacccaccaaaactttatagctccgggacatgatgataattatctcaggtccactcagcctggctccacatggaaaatatgggtattgtaaagaaagcttttgaattttggaggcctaacaaaaagacctaggaagctaatagttggttatgagataattataacaatggtgatgaaagcaattgcgattattacttttatgttagtgagataaatacataagaatgtccttctttaatttcattccttaatttccttaatccccattcttgatttctggattagaggaaagctatactatctacctgattacacaaaaagactggactgaggggtaaccattaggactcttgttagttgaaggtaataaactatattacttcagtggctaaaacaaacaggagcttttttctcatataaaactagaagtcaggaaacaaatggttgctgatgttggtttatccgtttgacaggttctacctttatcctggagattctttggcctttatttctttagtaatatagtagtaacagcactgaatctaaaataagagcacttggtccaagcactggctctgcccccttagtgacagtgggacccatggcaaattatttaatctctccaacagttaattttctcatctgtaaaactgggatcctgataacttccatactagtttggtgttaggattcaatgaaatgacgcatggaaaagtccttttcaaatggctactcactatacaaatattaatgtcttagtaagctcaggctgctataaaataatgccatagactgggtggcttaaacaacaggcagttgtttttcacggttctggaggttgagaagtacaagatcatggtgctgacagatgtggttcctggtgagaaccttcttcttgctgtatcctcgtatgttggggagagaggtggtgcagagaggtactctagtctctcttcttgctcttcttaaaaggacactaatccaattatggaggcctcaacctatgacctcatctaacccttattatttctcaaaggccccacctccaaatatccattgggggttagcacttcaacatacaaattttagccggcgggggggatgccagcattcagtccataacaatcaactatcctcattattgagagttccactaggccttctcaagggttgacaatgatagtgccctgctagctataagagtaaaaaaattttcacatctagaaaatgggtgcacgaatattggtaactgttctaatgtctatgcacagaatttttagaacttgctcgagaaatttgtctttcctgacagtgttgcttctcttaaattccagtcgagggccttgaaaaaaataggttttccatcaagattctctgaatgaataaatgaaatgctctgatattttctttcaatattaagataaagcaaaatgtatacagaattttctattttcagtgtttccaattactgcatggtttggcttattaccatctctaagtctaaccctgggtcataggagtaaagccattgggggtcccctacaaaggatacaaggcagtggtagatacaataagcctgacaattggagtcagatttttctctttcatacaggaaccatggaactgttgccctgggccacagctggctctcagaaaaacgtagaactggtcgaggaaaggaaaggcagggagtccttgattcacttgttatcagaaaattgtctgttcaaacaacagaatgtttgaaaagataaaatcaagtctcaaatgcacagaataagaatgaggggaaaacacctttctctgtaattaaacagaaaagtgtgccatgaagtgataaaacccagtcaacctgaaaatgtgaacatcaagtgtaattgtgcagaacgataaggtaatatgaacagcacaggaatatataggctcacgttggcattttaaagcaatggcactttacctgttcctcatgaaggatttggtttagtctaatcccttgtaggagccactaagaggagaaggcacagtccttttgggatgtaaaatggggaattctttctatgattacaagaatttgtaaattgctcagagttttaggacagcaggttatgtgtctctcaatgttgggtaccatgccaaacgtactttaagagacatagcaataaatagaatgggattcatttttttcttaatgtctggcagggcaaccaaaatgcccacgtttcccttcagtagcttggtattttggtaactaaaaacatgttccagggaactccagaatatgaaacatttcagacaatttgaaactgtcaaaattttcacttctttatgggacaaataaaatctaactttattcagattttaaagtatctcataaaagagtaatactttagatttgtgctgtgctttatacgaattggatgaggaactcttatacatatataagtggattttattttcacaacagtccctatggtagatattgtccttattaagtaaatgagagaaccaactatcaaagatattaatattttgcataagatcacacagatagcggaaccaggatttaatccaactcctctgattctaaaaataggtgttagatgggtattctttccccaaacctatgctgaaaggaggctacatttggagtcagttattgaaagtttaaatatatgtgtatatatatatatatatgtgtgtgtgtgtgtgtgtgtgtgtgtgtgtattcttatatactcatgcatgtagatagttataaagtacatgcttatatgtcaattttatatatacgactgatatataaactatcaatttgtgatagtttatttcaattaagttcaaacatattgggtatttattgactcatgggacttaaaatttctcagaggcattaatttctatgcctttaagcaaaataatgtttagcccgttttagaaagataaaaggctaacatatgttttgtttttgtttgttttgttttgttttgttttgttttgttgagatggagttttgctcttgttgcccaggctggagtgcaatggtgcgatcttggctcacagcaacctccgcctcctgggttcaagcgattctcctgcctcagccatctgagtagctgggattacagacacgtgccaccatgcccggctaattttgtatttttagtagagacagagtttctccatgttggtcaggctggtctcgagctcccaacctcaggtgatccacccgcctcggcctcccaaagtgctgggattacaggcgtgagccacggctcctggccgctaacacatgtttttaaaaaataaacaccattcgagtaggaaaagtgggagaactggtggttcagctagagatacggagatgggagggcaagttgctttctcatgttgccacatctgtaagttacaaatgccatagattaggaatttcaacgttgttgtgtctctctgaggacattctccatgtagtatatgtttcgcctccctgatggacagtaagcatcaaacggttactcctttatatttgaattattttaattctaacatcttgttctgaaaataacgggaatgccataaatacttactgattgattggactgtctcgcaggggagctggcagctagtgtaggctacaagctgccatcatcatctccatgaccatgagtcatcactggaattaccctaaagaggttaataaaacgccttgtttgaaaagcaaacaaaaagccagaagaaacccaaagcaaacagacccagactttgcaatgggtagtgaattttcagtcttaagggattgagagtccttttagtacaatctctcataaacatataacagattttaaaagcaccttggtctgattccagttcacatacctcatccttgcagaatacaacatactaggccatttgaaatgttcctcagtttacttttggaggatctgctgatttgagcaaaatggaaatgaaatgtatatagaaagctcttaatttttttttttttttttttttgagacggagtttcgctctgtcgcccaggctggagtgcagtggcgggatctcggctcactgcaagctccgcctcccgggttcacgccattctcctgcctcagcctcccgtgtagctgggactacaggcgcgcgccaccatgcccggctaatttttgtatttttagtagagacggggtttcaccgtgttagccaggatggtctcgatctcctgacctcgtgatccgcccgtctcggcctcccaaagtgctgggattacaggcgtgagccaccgcgcccggccagctcttaatcttaagaagttcagtttcgcagctccccccccaccaacccccaatcttgaaagcaggaatttggattagggttttttaataaaactttctttttcttattaccatgatgttttttgagagggtacagagaactcattaaaatgttatgttataacttaagacaaaatgggaatgagaatttgcattatataaacaaagtgtatgactaagtaacctgttacatataaagtgtttgactaagtaacctgttgtccctaggagaagtagaataaatatcaacatgtggcaactaacagaatgtgttgtgatcactaaagcagcacattcattgactttacacttcattaagtaggtaacgaattttacaaattttaggacttaaccaggctgtccataatactttgcatcagtaagtaccaaaatctacgatagggcacttcggagttccttaatttaataatattgataatattttgtttacattttgatttaattgtatcatttcattatttttgtgtcctgattctaaatatatacgtcaacaagctatatggccattcaaaacaggtaaactttaaatatgtttttgacatagaaattatgtaacagtcttcatcatgagtataggagtcagatttccaattgaaaatttcatcctctaaaatacttggcatatgtatacagttgtctagttcagacaaaaaagtattgaatataaagttgattttgtaaaaccagaattggcatccttaaggaatacaaataaagggaatcttaagataatataataatgctgatttgaaatgaaaattaataaaattgttattctattttagtatgctaaattggacagatccttatttcattgaaaaattagattcttcagtatatcagtgcactgtgctaataacacaagaagattaaattatgtccatatgtgatttggtagaatttaattataaatataataaatccttcaatatgtacagcagtgaatattccaaatttatctctcatataagttgtgagcaacttaaggataggcaccatcccttaacatacctagattaagaacagtacctagaaaacagtcatcaaatgcttcctaaataaattttcaccttcaagcttatggcagcaaattaaacatagattgacccttttctaatagagacagaatagatgagactgatgacttttttttataaatgtgtaagtctgcaaatatttagtaaggatctaatttacacaaagaaatcaacctagagtgagattattttattcatttcccggaggctgtgactgaattatatttgcaacttgccctaatttttatacttaataatttgcattagtatttaaattatgtgaaggaaaaatataagtttaaaatactgaaaagtatattcacacattcatcaaatgttgattatgtgcttacagtgtgcaaggtattggggctaggaattatgtggtgttccaaggaaaccatgatacagcctctttcattacagtgtttattattaggtagaaaaagtaaaattagtataatattagataggatatatgtgtcataggagtaatataaacaatattttatgaacaatgtatgaaggtataattttgttcatttatccatttatcgctctgtacatccatccgtttattcattgttcattacttcatttaataatactttagtgaccattggaaaagggatttataaaagtgagtaaaatgttaatcattttctaaagaagttgataatctagggaaagacaaatgtgtaccaacaataacttggatataaagcataaattagaggtacaagcaaagaaaaatgaaagtacaaaggagaaaaatatttggctgcatgagagcagggactgtgtcttgtttcatcatagattttccagaacctagatcagtgtttggcacaaagtaggttcagatgagtttgtgttgactgactgtctactgaagtaattgtggaacatatcatagaagaagtagatcagaggctggatcttaaaactgggagaaatacatttcagctccgtgaaaccccagaagtgatatttgacattagaaagcacaaagtcacactctaacagtgacagtactgagtgaagtaagaattttctgcaccccttcttcttcttccactcccattaacccttgttagggtgagaaatagcagctggtgaatggtagagaagactagcaagacagaaagaggaagcccaccatgcccactaccccaggtagtaaaggacctgtccacttccatcctcttctaattgaggaagaaatcatatatgtgagttcagattgaagtattgattaatatattgagctggatattctaattttaatgtctcgatatggagcaggactttgtttccttaatgatgaccagaaaagacatgaaacttacccatattttcacccaagaacagaacagaacaacctacttgaacagatttaaagggagaaccaaaggcagataaagttgtctttattcttacacagcataagtcctgattattcatcaatttatacattttatgaatttaagaaaaaaggaaaggaagactataaagggattcatatcaggatacacatgaaggtaatgtagtcagttttttagtggaaccaaaatattacagtcatcactgaacgaaaatattacaatcattacatcattcactagattaagtgaataaattaaaaatatattaaataaaattaacaaagacatgagcttttcaaagtgtgtggtaacctggagcaataagcagtgtagttggaatgttacctcttaaggattatcaaagaggctggctgttcagtaggacagtggtatggtaaagcaagcttgctacattgcagaactccagagggcaacattctaattatctttagctatggggtctgttcccataggataactataacttagtaggttgacagagcctcccaagaaaccacagcagtgctcaattgtggcgaattacttctctatcccatcaaaatgtcgtgattggacccacaactgtgcatacatttttttggcattttcctgccagaagcatatttacatttctttaatatccagtcatatccttcccttatttaaaaataattattcagagaattccagttttttgtaatcctctcttctatgaattttagcaacacttatatacagatacttgatattctggagaaatatgcttcaagaccatgtggattaacagattttcaaatgccgttatagtatatgtatatactatatatgtataagtatgtgtagtccccaaaatgcgtactttaaaatcctcataatagatctcttacagatgaggaaaagaagatgtagaaaggttacataaagtagctaacaagtattccaaataatattgaacttcagtctgactattccaaaattgcattcttaactctgatttctatatttgttttccattctaaactgtgtattgtgatataagttcctcactaaggctctttttcagggtcttcctaatactaaagtcactcttacaatgagtattttctttacgtgtgaaatccaataggcaaaaaaaaaaacttggcaataaattttaggcattaacctcatgccaagtaattatcagaaggctgtaatgctttgaaacttcacaagtctgattttaagataatggaatgaggcttgcattgtgaactttcttgatgctttacattgcaatatgctgtatagattgacttcctaaaaataaaaaataaaaaaaaagatttgtagagcatactgggaaggtcttgccaattaaaaaccggagattggctgaaggcttgcagcaattgaattttgaatacagatggtgtcaaatcgagtgtttccatagcaacagactcttccttaataacttttagatgggagggggtacataaaagagaaaaccatcttttagcagatgtatgttttcagcatgttttcagattgattttggaagctaatttgtacttaactagtgattgttttaagtggatctaaatattactaaattctcctgaggaaacattttgagaataacagaaataaactctaggaactttataaagacatgaaaagggcacaattttacaaaacctttttttttttggtctggagccaatcaaacagtattttatattgagtatgacctatcaatagtcaaagagttcttgattcttaatgcctgttaatattgaatgtttagaatatgggtaaaatcaaggaaaaagtgctatgtatctcatggatttggaatatcttaatatactctttcttcaggttaatgattatttttaaaaaatgatgatataaatcatttcaggaaggactgcataaagaggtcattgatagagttcatatcatatagcagagttgtcgtagatttaatgtccaatcctcagttttgcatagccaacaactaaattttagtagtttacctagagatgatcaggctctgggagactgattcatgctacacaaactcacaaggcactggtttataaaccatttgaaagaagaaataataattcaaactattattttacaacaagactggcaggaaaatcaataatggtaatgtgttcggggtgtcctccccagtgaggactatccagaagaccaaatgatagattattgttcaaagtgatagaattgggagaagggtaataaagcattatgaaaggatgcttccttaagtgagaaaagctacataaactacccatctttactattctagatgaccttaaaaatattaatagaaacagagaaacagacaattcatctcagatggtacaaaaaacataatagcacatgtttgctccctggcttccttttagattccctgcaagaggttttcccccaaccaccaccatatacagatatacagctttaccttcactctcctattatctgtcacagaacaatataaaactcagatatgttagtataagttaatagttggtagctttatgttaatgacattgctacctgttacccccagattcatctgggttacttcatccccaaaaccctttcaaaacgacatttcccacaaagatttctagtattactggccattcccggacatcttgcttccaacataagaaattctgacataatagggatataagaaggccttgggaatctgtatttataacaagctccccaggctatctgaggctcagccagtttatttttgcagatagctattactatccacaatctcttttatcctattgtaattgcagaagaaaatctttctttctagtttctttgaaatttctggaatgttaggacttagagcctctaggaacttgtacataaaaagagagacttaaagagatatcaaagtagagatagagatagatacagataagtgcatagacatagaagtagacatatataatagaaacatatatgtatacatagaaatagaaatatgccatttagaactcttaagaaatatgtgcactcttaaaatatagtttaaaaatgtaaagaacttgctattaattgaaaatagcataataaacttaaatgaaataaggaccccaaacgcaaatatttctctctgacacaccacacacacacacacacacacacacacacacagacagagagagagagagagagagagagagctgtacaataacaaccaattcctgacccagataaagaaaaaatttttatttatcttctttctcattctattattattttttctagattaaattaaaatggtaattatgtgtaagaacaagcattattgccatataaacaatgcaacaaaggaatcaattgaaaattaagtgaaaataaaaggtacagcttcgttaaagacccagttcttagagcttagtctcaaactctttgtactctgcactcttttcttgatttgactcgattgattgattgattgattgattgagtcagagtctcactctgtcacccaggctagagtgtagtggctcaatctcggctcactgcaacctccacctcctgtttcgagtgattctcctgcctcagcctcctgagtagctgagactacagacatgtaccaccatgcccagctaatttttgtatttttagtagagatgggacttcaccatgttggtcaggctggtcctgaactcctgaattcaagtgatctgtctgccttgttcccccaaagagctgggattacaggtgtgagccaccacgcccagccgattttactctctttagaactgcaaaagtaggaatctagctcatatgcagacattctagaaagtttgatttcaaaagtcttctcaaaagaaagagagcaagagcaagaaagaaagcagagagagaaagcagaagataaaatggcattgtttgaacagggatggaaactgagtaagaaatttggtcactaaacactttagtgtctatcatttaagattgtaatttggttatttatcactggaaagtgattaataatctaaaatgcattttataatactaatactattaaaacattaatttttggagaaagtttattatagattgatttatacttaccactgaatattaaaatgtttaatggaagtagtttcaaatagtatttaatgatatagggaattattacaacattaatgctcaggaaaaaaagtaggatatggaattatttatgccataggatcctaattttgtaaaaaacagagaaaaccagcaaaagaaattataactggaaggaaatacatcaaagtggtttgcagttatcactcatgaaattgaggtgaacttgatttttttccttttatatccatccgtgttttaataccacagacatgctttagatctgcccgtatattgtggctttcagagggtaataaaccattgtgactcagaaatagctaagaatttttatctctcaagaacaaattttcactcccttggggtgtcattatctgttgagaatgcatgcaatagttcaagagccaaaagactctgattcagtaagtttagggtagaaaaaaattaagtacatttttaaaatagagctctggtgtttcaaaggcaatgtgcaaatatacctacttaatattattctaattttttcaggatagctgaaatataaacatctatttttagtaataacacaaatgatggaatgcttttacatatttataaatcattaaggatttgctttttgtttctactgtctggaacatataaatttgaacacaatttagaacaacattcaggaaatatgatttatttattaccttcttgacctttattttatttttaccatctacttttatgtaagtcttttttttcaatcattgtttatttctttacttttccttccacatagaattaaagggagattcgggcttagtgtccttaattcatagttccattgtggctattaaaaggtgaactgaaagcttgcaaacacgtggtaccttgtagataattttctccagtcagacagttagataaaggcctctgaggtttctggggtcattgttgaagctatgttttaaaatcctatatccttctctcattgttggttccttttcacaacacagaagttttcttttttttaatttcaacttttagatacagaaggtgcatgtgcagatttgtcacgtgggagtattgcatgatgctgaggtttggagtacggatcccatcgccatgttagtgagcatagtaactgataggtcgtttttttaacccactcccctccctcctccctctagtagtccccagggtctattgttcccgtatttatgtccatgtgtgctcagtgcttagctcccacttataagtaagtgagaacatgtgatatttggtagaacttttcatttttaagttaaaaaacaaaacaaaatgaggatgagtggaagaactattcagcacagcaggttataaaccaattaggatgatgacgccctgaatggagattttcatgaacatctcatattagctatttcagctttggtttttttaatgttcaaagtaaatagaataatgaagaggctatttaggaaggtttagactgagggaaaaaaatcctttcattaggttccaaataacggttagcttattaaacagcaagaggcagagatttagcagagaaaaaataaaaagatttaaaaaaaaacaacgagattaaaaggtcagtaataccattggaactggcagcatggcaagtttatatcagctatcttttgttttggaacacaactatgctaattctgttctgaacctcttgctaatgcctgtctcaagaaaatttaacatactttatctgtgtgtacaaaaatacctaaggacaaagctattacccaaactgtattcagattgaaagaatccatatagaaatttgcagctaacgtattagtcagtgtatgtaatttctactgcttcacagcacaactctttctaattttcaggagcaatatagcaactgcttgccagccaagagaaaaccataggagcattcttatcattggagccaacattagttctgcctacagtgactaacatagatgcgtttattgctagctggaattttccattggcactagttacatgtaataagttagtgctttcaaatggaccgtggaatataggaaaactagagtctgacgtaaccaaaaaaaaatgttgataaactcagagattatgaaagagaggagaggagtggtttttgtggaaatgatagaaaagcaaaaaaagatggcaggatttggaaaaaagaaaatcaggttagagatttaattagtaaaggagctccttttaataattatataagagtatgagtttagagtaactgcctggctaatatgtacaatcttcaagttcagtcgttttccaaaattctaacttttagcattttttttttgtaaattttaagtggaaatcttccacttttgttgactaacttggctacctgatattttactcaacctcctactttcttgttctctacttcttctgagtctttgcttccacaatgaggtagctcatattccttaagtttcctgtctggttttgcttttttttttttttttaacagctaaaataaactctacaagcatttctatcattttctttacatccaatctcttgtcagccatgtcctaatcactttggtaaagtatcagtgaccacccaagaggttcactttgcttcgtcaaaggaccacctgtcatgctttatctccagagcttctgccttgaaagtaagaataatataacctttcctgaatgtcttatttcaatttcatgcatttgatctgcctcttcagaccattcccaaggctttgcccttgttctttaccctcatggcttcagttattcatcactatatgaatgacagctctcaaactgacagctctggcctctcacctatttcatctattccatatggcaaactgtctatattacatttcatcatgagggataattataattccacattcaacaagaaattgtgggtccgtgttgatttccaacagcaacctttattttttagactatgatagagaaagggtcaactttctctcttacttatttatctcaaataactcaaagtcaagctagaaaagccaagcaagtaatatttcccaacaaagcagctttaagcaaaatgattttcagacacgacatgcagcctgtattgtggaagaagcacagtgacctaggtgtactttgctgaaaagcagtggtcacagtccattagtttcatctttttcctgcaagagagaaaagtatggcagggccaagactcctaagaccccttaaaaaattgtgaggtttttataaccctgttcatttcccatcaaaagcattcatgaagcacctgccatgtaccagatgatgcattctaggcagagggaagaacttgggcaaagtcctgtacattttatcttctaaatcttactaatcttttcttatctttccatctaccacccaccatcaggctgtgcctggactcctatgctaacatcttactctgtttttctgcatcttttttgccctcccctccaatctactctccaattagcaacatgactaatgttttcaagcccagattagacggtgtcacttccctgctttaaacctttcagtggattcccattgcactgaggttgaagaccaaaatctttaccataactcacaaggccactgggagctatgaaaattttcttttttagtttttccttttaattagtgatgcattcaataagtggagtctatcgtgaaagcatagattccaaaggcatgtgaatactcaattatgtaatttacttacagaatgtttattacttcttttttagctttgattttgtatacatcctaactcaatctcagttatataagagattataaaaaagtttgtgatgaatgcatacataaaggaacaaataattaacaaatatataaagacaaatcagtattgaatgaccaaatggctctttatttattaaagaacttagaaaaatatagtcttgcttgagaccaagttctggcaacgtatgtgtgtctttttgtttgggttaaaaagcattagttttatatgttttaaaaggataggatcttcccttggctgcaaatagtataggcaaaatgctattctgtatcttattttaaagaaaataacaatcataccttattatttgctgacagttttgcagtttacaaagcactgttcacatggattaccttattttaaattcctcaattttttttccttttactatgggaattctgtttcaggagaatttccctttaaaattaaggtgattatactattctgttcctgtatttcgtagccatatgtttcaccaaggtattgtctctctccaggtctttcttctctggatgtatagttatgattttccaggaggtaaatgaaaacagtgggagcaattgacagagtgttttttgtttcccataaacccaagcattgcatttaaggagctgctgtactattgtaagagttcctatactaattttaaaagttcatttacatattttgtagatttttaggataagtcatcagaaaaaaattaaaaataaatttacatattttgtattaagctgttttgttacttgaatggggattattggaacgaggaaagaattacttttatctccccatttttcaaatcatttactataacattcatgaattgctgaagtttaaacaatcaaaaatatctgaaaatggagcctaggaagggtaacttatgtctttcatactccttcctttttggtttttctaccagcattttagtctaaaatatattttattttcactgatcctgtgtttgtcttaataatatagtatgtatgttaaatgaaccagaattcattgatctttttttttattattcctctttttgcttttctggagaagcatttgaagaaatcagttcaggctacacttcatcaattcatttcctcatcttccccttaatacaaaagccccattttcactcttcaaaacatttgatcacatacttaattttcatagcattgactaaatgtatgtgtttattttgtttatatattgcatatttgtgatgattttcacttttacagtttaggcatgggtaggaaggacacttacatgagtacttaagttcttggttatgacttgagaaactcacaaggtagcatggaatggcacgtaaacaaggctttgatagggtgaaagggaattatcaggacaaaactgactagtggcagtgacttttgagcagagtgctgcaaactgaaaaggcagagagcattgtaggcagagagaaagcatagacacatgtgagatacatgtgaaatacttagacaaatgtgaggtgtgtggtaacattgtacatacctagggctccttcctgtgtagctgtaaagctggagtataggcatcacaacaggcagcagaagccaagaaactagaaaagtagacaaaggccacgttataaaagatcttgtaggataggtaaagagttttaatactatcctgaaagcagtgtggggtgggaggcatgacattaaggaaatttaataagtgatgaaagaccaagattttcatcttcagaagacttctctggaggtgggtggaccacttgatgtcaggagttcaagaccagcctggtcaacttgatgaaaccccatctctactaaaaatacaaaaaaatagctgggcatggtggtgcatgcctgtaatcccagctactcaggaggctgaggcaggagaatagcttgaacccaagaggcagaggtggcagtgagccaagatggtgccactgcacttcagcctggatgacagagggagactccctattaaaaaaaaaaaaaaaaaagacttctctgactagagttttaaagaaggatggggagtgcaaaaggctaacattaaatcagtggttctcatccctggctgcacgttagaatcactagggggagtttaaaaaaaatgccaatacttggactccaccccaaaccagttaaatcagagccttaatagggcccagacattcgtagtttttaaagcagccctcttgattcaaatgcacagacaaggttgtgttccgctgaactagagagaccatcaggaggcttttaactaaagcaatctagggaagagagagatgaatgatatagaggccagaagagctattaaggagaagtgactcggcatcttcttggttaaagtataaggaagaaagaagaatgaaggataatttgcatgtttctccttcagtgactaagtagaggaacagatgtgtatcagtgattaggggagaggaagaatgaagatgatgtaatccagtttggatatgttggctatttcatagagatttagtaggcgtttggctctatggatacagagttcaagagacaattcttagcttaaaacacagattttactctgattattttagagatagtaaatgaagcaatatacatacatgaactcaccagagagaatatgtaaagtgaaaacaaaaagatcaaagggagacccctagggaatagcaacatttaaggaatgggcctaagagagtgaggagtggccaaataggcagaataaaatccaagaaggaatcttccatattaatcaaaagagaaggtttcaaagagggttcgtcaattggcaggtactgaagggatatctgaaaacataaagactttagactctctaatactgtagcaactttaaggtcactgctatcacctacaaaagtaatttcagtggcaaaagccaaaacgtaatggtttagaagggtatgtgaggtgtggatgtggaaatagtgggtatagactattgcttctcaaaatgtaatcacctgaaaaatcttattttaaaatgcagattttgattcattagctctagagtggagcctgagattctgcatttctaacaagttatcaggtgatgctgatgctgctcatacacaaaccatcctttaagtagcactggtgtaagccactctcccacaaaggaggaagacatagggtttccatcaggggacgcaggtggggtgtaggaccaaaggaaataatactcttttgtcttttgtttggttggttttggttgttttcttcttaaaataaacatggttgtagacggagattgaagacataggaggggtaaaagatggaatcacttctcatagaagatggaagagactggaacattgagtacagcgagggaattaggcatgggtaggagggacacctaaatctgaagagaaggaggtaaggaagaattgaaatacagaaaagttctgtcagtaagcaatgtatggaattgtgctttttagccatagtttctgttcaagaaattgttttccatttatttttatttcttaacttgaatagttggatggtggagtatgcttgtaaaaataagagtgaggccactttgtttttcggggttaatttccgttttctgcactcatcaagtaaaagttgaagtggcaaggtgtagatatgaaattcagtgtgtgctaagggagaaaaaaatgctttttattctacatgattttaaaaatatttatattccaacaaatgcatcaaatttgatgtgcaaatttacagtgatgaatgagttttattgtgtgcattgcatgctggtgacatggtaataaatctgtggtgctagaattataatggtcccctttagcttcgctttaatgaactcttgctgaacacttttgagttgttagtactttatttgctacatttggcacttaattagttaatgactgagatgctggaccgatggatcatctaatgatatgttaggcctattatcacatctagatagtttcttttctgtgacttgtaagtgacctaagatgataaactgaaatatttttgcatagatatacatcaagcttttctcctaacttcaggctttcatcttaagcaatagtttccaacacccccaaaagagaagtcattatgtttttaaaaaaattattcattttaatgtgatcaaataatatcacatttcagcattcacctatttaattaataaaacaacttacatgtttcattatgactggatgttgatattttttcataatctattatcctccaaccagtggtaaaaacccaatcctcctctcacccagctcatctttccgtatgggaagcaatacatacttccctatgttttattaccaaaacaggagaatgagctttctttagaaggttaactcattttctctattagaatattcagcatacttttaaggaggtaatctggtctttgacagtctgttgattagaaaattaagagacctgcctaaattccatttccaactcctctccatacacattgtgactttgagcaaaacgttttgccatttccactcgtataagttctgtttagtatctttaaacttccatatcccacagatggtatttttttcttcattggaaagtggtgttagtgattcagaaaactgcttaaataatacactgctttgtgttttctgtgagagaatttttttttttttttgagacagagtctcactatgttgcctaggctggagtgcagtggcgcaatctcggctcactgcaacctctgccgcccgggttcaagcgattctcctgcctcagcctcccgagtagctgggattacaggtgcctgccactgcgcctggctaatttttgtatttttagtacagacagggtttcaccatcttggccaggttgatcttaagctcctgatctcatgatccgttcacctcggcctcccaaagtgctgggattacaggtgtgagccaccgtgcccagccgagagaacattttatctaacattctattttaaaatttttcaaatacacagaaagctgaaagaattgtacagtgagtgctcatgaacccactctctagattttgttgtatcactttacttctttctctacccgccaacccctattattttctgatgcccttcaaagtaagttggtgacatcggttccctttacccctaagttcttcaacatgcatgtcattaaccagagctcaatatttgttcacatttcttttgtttgtttgtttgtggcaaaatttgtatagactagaatgtgtaaatctcatgtgtattatgaaatgagttttgatgaatgggtatacctgtgtgacacatgcctctcttaagatacaaaaaaatagccttggcccagacaggagggaacattttttaggttggcttgagtttcctttaactgacatgtagcatgactgaatatatgaccataagattgccaagttgaaatttaccaaaggtccatccaggggaacagtatggctattgatacgtcatttgttcatctaggcactgggctgggtgagttcttcacaaaaaccttgtaaggtgagctttcagctctgacagaggcatcaagaaacgtatttcacaaactgttagagctgaaaacatctccagggatcatccaatctatcctcctttgctttatgactcaggatttaagaagccccagaaaagtccaacagtgttaccaaagtacacgattgcctatttacgcccctataattgagagctgtctaggggtcaggtacttttctcagtgccttgtgtacattatttccttttatctttctagattattaattttcttgttattatccccatataatagaggagtaaacagtgtgaaaatagcactaaactgttgatcttttccatgttccaaactaaccttaaatgttaggctaatattataaaattttaaaatttagtcatttgttctgggtctggcttccatgaacttaaccaaaatgcttggctgtttctgcattctagctttttgggatttagagaaaaagcaacttggtcatcatagtggccaggatttatttatgtgccaataactcccctctgtttttagctttttgatctgttacatctcagatactttattctctatttgtaaaacaaccacattcctccttttctatatctaagtgaaaaaaaatgcccgttcatactagctacatggttagcatatatgtttcttcctctttgtgggtttgagttgaaacttcttttgcaaagcttaactatagataggtcttccacagaaccctgtttaaatgccttgtggaagtagaagggacatatcttaatattccttataatctgtgttattatttggactttcctcagttccttatatgtctttgtatgtcaaacattgagttatgcttacattactctaggtatagttgtgtcctagctttgtacaaggttacaataatggtggtttccttgttttcagcttcattcttgatcatgcctaacattttttgatggttttagcctcggagaacagtctactgctatttctccctttttcctgatcccaacaaatagtttagaaatctttgtcttaactgcaattgggatcatttttcctttagagttgcccacagttagtcatgtccgtcactcttcactcactcaaatgacctcaaaagatttacctgcaatttaagcctttcaccttggcattttctacctggaactctggcgtactctgtgggatcagtgagatccatagtgtgcactccctagcagatcgtgaatgtttgttgataactataattcattgtttagtcttgtctatacagagaagcagtagcaccttgctttagtaggatcctttatgcttttattcattattgaattttatcttcacaataattctgtggttctgcagttgtcattatttcagtttgggagttgaggaaactgagatcgtggcaaatcaacttttcccatttaaatccactatttcatcgctaatccagggttataacccaagactaactgctagtcaaagttgctttctaaaaatcagttacacagacttctaattctcgtgctgtacagtcagtgcagaaattgcaacagaactgttctttgttctgtagcaatgtgtattcaaaaggtaatcatttcttgtgtataaataacattcctccctaagagagatgttgtgggaatttatatcagtcaagaatgtatatcgataattaaacatagctagtctaaaaaacttgaagtgaaagattggttcgtattcaatcaactgaactgtttctttctctgcaatattgtggttcttgacatgattgctgagtttccaatttgacacttctggaggttcgtaaatcaggacacatgctgggtctcagtctgtcatcctgagtcttagcattggttatttatttccctttattacccaacatctatttactgcacaaattagtcgagaagctttccatgacggacctttgtgagaaaaaaaaaatgtgtacattgggtagctcttcaattacaaacatgcacagattgtctgggtttatgtgcatatactttattattatttcacttttgtatgtcagatgaatttggtgtaaatgtaaatctaacaatatgggctctagtggccaaatacattgccataatatgtttttgatctgtcagtctcctgggtgaagtgtcgcaagtgtggtaaaattctgtagtataaattgatgctcagttatggacaattaccaggtctatatgatgtcagactaccacactgatccacttttaggataacagcttcgctctgatgatcttcagattttagatttgctttcattccttgacaaaatgaaatacatttaaaacttctaaaattgtcttttgtatatatttctgcagggtctactcttgggactactataacaatcaattgtactgctttgtttcttttattaaatagcagaatagctgcttgattcgtctgtatgtgctgatgtgtgtctgtgaatctagtccagttcactgtccaataagaatttctgaaatgttctttgtcacatcaatgtacagtcaaaatcgtattgtgtttgtagcagaatgattgcatcttttattattcacagcagccaaaatgacacatatttcacacgtgacaccttttttaaaaaagatgaattgtccaaagttgtatgtagaatatatttcacaaatcaaattccctatttaataaatggtgctgggagaactggctagccatatgcagaagagtgaatttctataaatagaatgcaactgtgtaaatagcatccaaatcaagaaacataatataatatagccagaagctcaggatcccccttcatgtcttctccagtcatgaacatttcacaagggtgactactatccttacttcaaaagttttctattactttttcctgtttttgtgtattatatgaaggaatcgaacagtcatatctacttgtctgtggctgtatttttccccccaacaatatgtttgtgagattcatccatattattgtatgtagttgtggattgttcacttttcttactgaataatattctattgataccacagtgtatttacacatgttgatatagatgagaaattgagtagtttccaacatgaggaaattgctgtcaacaattctgcaatccatagccatgctatcaacagtctagtacatggtttttggtgaatatattaataactatgcatttctgttggatatacacctgggagtggaattacaactcaaataatattcattttaaaaattttatttcgtttttagtcgacaactatattatggggtacattgtgatgtttcaatccatatatatacattgtggaataatcaaatcaggctaatagcatatctatcacctcaaatacttctcatttttgtggtgagaatatttaaaatcctcctttttagctatttggaaatatacaatatgacaatattagctatagttcctgtgctgtgcaaaagaacaccagaacttattcctcctgtctaactggaactttgtacccattgataaacgtctctcatttttccatccacccaccactgcagcttttgatcaccaccataatactctccatttctatgagttcaactttttttaaactgcacatacaaatgagattatatgatatgtgtctctctgtgccaagtttatttcacttaacctaatgtcctccaggctcatccttattattccaaatgacagaatttcctaggtttttaaaattttttttttatttttaattttttggggtacatagtaggtatatatatttacggggtacatgaggtgttttgatataggcatgtaatgtgaaacaagcacatcatggagaatgaggcatccatcctgtcaagcatttatcctttgtgctacaaacaatgtaattgtacttttagttattttttaatgtacaattaaattattattgactatagtccccctgttgcactatcaaatactaggtcttactcattctttctaactattttttgtagccgctaacaatccccacctatcccctacctccacactaccctttgtagcctctggtaaccatccttttattctgtctccatgagttcaatagttttaatttttagatcccacaaataagtgagaacatgcagtgattttcgttctgtgactggcttatttcatttaatgtaatgacctccagttccatccaagatgttgcaaatgacaggatataattcttttttattgctaaatagtaccgcatcatttatatgagccacattttctgtatccattcgcatgttgatggacagttagcttgcttccaaatcttgcctgttgtgaacagtgctacaacaatgtgagagtgcagatagctcttcaatacactccctccttttcttttgagtatgtacccagaagtgggatttctggaacatatggtcattctctttttattattttgagaaacattcatactgtctttatggaggccgttactaattcacaatactaccaatagtggataaggtttccttattctctgtatcctcatgaacacttgttatctttcaactttttgataatagccaatccaaaagatatgaggtgatatctcattgtgattttaatttgcattttttgatgattagagatgttgagtattatacatatatgtgtgtgtatatatatatatatatatatatatatatatatgctgtttgtcatcttttgagaatgtctattcatatatttgcccatttttttattagggttatttgttttcttgttattgagtagcttgagttccttgtatattttggatattagcaccttatctaatgtatgatttgcaaatatcttctcccaatctgtgggttgtctctttattccattaattgtttcctttgctgtgcaaagctttttagtttgatgcaatcttacttacctatttttgtgttgattgtgtttgggggtcatatgcaagaaaccactgcccagaccaatgtcatggagctcttctcttatgtttttgtagtttttagtttcaggtattacatttaaggctttaatccattttgagttgattcttgtataaggggtgagataagggtccagttttattctgtatgtgaacattcagttttcccaataccatttattgaagagactgtcctctccctattgtgtgttcttgctacctttgtcaaaaatcaattgatcaaaggtgtgtaggtttattttagtcctctttgtcttattccattggtctgtttttatgtacttgccatgctgttttgattattatagctttgtaatacattttgaaatccagtagtgacatacttccaattttattctttttagtaaagacagctttggctatccagggtcttttgtggttccatgcaaattttaggattttttaaaaaaaattctataaagaacaatatgcagattttgttagtattgtgtcgaatctttagattgctttatgtttaacaatattaatttttccaatttatgaacacagaaatctttccatttatttgtgtcatcttcaatttctttcgtcagtgtcttatagtttcaacacgcagatctttcactttcttggttaaattcactccaaatattttttcatgctattataagtgagattgtttccttaatttctattttagacagtttgttgttattgtacaaacaataacaattgttatcgctactgatttttgtaagttgattttgtaccctgcaactttactaaacttgtgtatgaattctaacagttttcagtggagtccttaggatttgctgtataagattatgtcatcagcaagaaggggcaattttacttcatccttttcagtttggttgccttttatttctttctcctgcctaattgctctggctaggactcccagtactaagttaaacaagggtggggagagtgggcatctttgtcttgctcctgatcttagagaaaagccttctacgttttactgttgtgcatgatgttagctgtgggcttgtaatttatggcttttattcttttggagaacatttcttctatacctaatttgctaagagtttttctcataaaaggatgttgaattttgtcaaatgctctttctgagtttattaaaatgatcatacggtttttgtacttcattctgttatatgttgaatcacatttattaatttgcatatattgaaacaaccttctatcccagggataaatccctcttggtcatggtgaataatccttctaataaactattaaatatggttcactagtatttcattgagaatttttgcatctaatttcattcgtgatattggcctatagttttctttccttgtagtgtctttgcctggctttgggatcagggtattgctggccttgtaaaataaatttggacgaatcccttcctctttagttttccaaaagagtttgagaaagatttgtgttaggtcttctttaaatgtttgtagaattctcccatgaagccatctggtcttgagctttcctttgatgtgagaacttttaaatactgatgcaatctccttaactctttccttagctgttactggtcttttcagatttccaattttcattattcagttttggtagattatgtatttctaagaattcatccatttctgttaggatgtccaatttcttggtatataattgttcatcgtagtctcttaggatcctttgtatttctgtgttatcagtcataatgtcttctctttgatttctgatttgatttatttgagcctgctctcttcattcttagtctagctaaggatttgtcaattgtgtttagcttttcaaaaaaccaacttttagttttattgactttttttctattgtttctctagtctctatttcatttatttctgctctgatctttgttattttcttctttctgctaactttgggcttaattcattcttctttttgtagtttcctgaggtataatgttaggtatttcatttgagatatttcttcttttttgatgtaggaatttattgatataaacttccctcttagcactgcttttgctacccccagaagtttttctatgttgtgttttcatttctgtttgtctcaagacttttaaaaaatttcctcttgaatttcttcttttgacccaataattgtttaggagcatattgtttagtttccacatatttcttaattttatatgatttctcatgtaattgatttctaattttatattgtggtcagaaaagatacacgatgggttttcttaaatttgttgagacttgtctgtggcctaacatatgatctatcctggagaatgttacatgtgtacttgagaagaatctgtattttcctactgttcagggcacaatgttctgtatatgtctgttaggtccatttggtctaaaatgtcattcaagtccaatgttttcttatgaatttttctgtctattgcttaaagtggaatattgaaattgcctgctattattatgttataggctatgtttcccttcagatcccttaatgtttgctttatatatttaggtgctctgatttgggatgcttatatacttgttatgtcctcttgatgaaataacctttatcaatatataatgatgttctttgtcactttgaacagatttgacctaaagattattttgtctgaagtaagtgtaactaccctgctctctttttgttctcatgtacatggagtatcttttttcatccctttactttcagtctatgcatgtcctttaaggtgaaatgagccacttgtaggcagcacatatttgggtcttgttttttgttgttgtcgttaatccactcaaccactctatgccttttgattggagagtttaatctatttacattcaaaataatgatggatgggtaaggacttactagtgtcattttgttcattgtttcctggttgtcttacagattctttgttcctttcttcctctattgctgtcttcctttgtgttttgatggttttgtgtagtagtatactttgggtcttttgtttttatcattcatgtatgtattataagtttgtgctttgtggatactccgaggcttacataaaacattttataagctgataataacttaaatttgattgtgtgcatatactcaacactttgactctccctcctcccacattttatgtttctaacatcacaacttacttttttttttaattatactttaagttctagggtacatgtgcacaacttgcaggtttgttacatatctatacatgtgccgtgttggtatgctccacccattaacttgtcatttacattaggtatatctcccaatgctatccctcccccgtcccctcaccccacgacaggccccggtgtgtgatgttccccttcctgcgtccaggtgttctcattgttcaattcccacctatgagtgagaacatgcggtgtttggttttctgtccttgtgatagtttgctgagaaagatgatttccagcttcatccatgtccctacaaaggatgtgaactcatccttttttatggttgcatagtattccatggtgtatatgtgccacattttcttaatccagtctatcattgatggacatttggattggttccaggtctttgctattgtgaatagtgcagcaataaacatacctgtgcatgtatctttacagcagcaggatttataatcctttgggtatatacccagtaatgggatagctgggtcaaatggtatttctagttctagatccctgaggaatcgccacactgacttccacaatggttgaactagtttacagtctcactaacagtgtaaagtgttcctatttctccacatcctctccagcacctgttgtttcctgactttttaatgattgccattctaactggtgtgagatggtatctcattgtggttttgatttgcgtttctctgatggccagtgatgatgagcattttttcatgtgtcttttggctgcataaatgtcttcttttgagaagtgtctgttcatatccttcgcccactttttgatggggttgtttgttttttcttgtaagtttgtttgagttctttgtagattctggatattagccctttgtcagatgagtagattgcaaaaattttctcccattctgtaggctgcctgttcactctgatggtagtttcttttgctgtgcagaagctctttagtttcattagatcccatttgtccgttttggcttttgttgccattgcttttggtgttttagacatgaagtccttgcccatgcctacgtcctgaatggtattgcctaggttttcttctagggtttttatggttttaggtctaacattaagtcttcaatccatcttgaattaatttttgtatatggtataaggaagggatccagtttcagctctctacatatggctagccagttttcccagcaccatttattaaatagggaatcctttccccatttcttgtttttgtcaggtttgtcaaagatcagatggttgtagatgtgtggtattatttctgagagctctgttctgttccattggtgtatatctctgttttggtaccagtaccatgctgttttggttaccgtagccttgtagtatagtttgaagtcaggtagcgtgatgcctccagctttgttcttttggctcaggattgtcttggcaatgtgggctcttttttggttccatatgaactttaaagtagttttttccaattctgtgaagaaagtcattggtagcttgatggggatggcattgaatctataaatttccttgggcagtatggccattttcacgatattgattcttcctatccatgagcatggaatgttcttccatttgtttgtgtcctcttttatttccttgagcagtggtttgtagttctccttgaagaggtccttcacatcccttgtaagttgtatttgtaggtattttattctctttgaagcaattgtgaatgagagttcactcatgatttggctctctgtttgtctgttattggtgtataagaatgcttgtgatttttgcacattgattttatatcctgagactttgctgaagttgcttatcagcttaaggagattttgggctgagacgatggggttttctaaatatacaatcatgtcgtctgcaaacagggacaatttgacttcctcttttcctaattgaataccctttatttctttttcctgcctgatcgccctggccagaacttccaacactatgttgaataggagtggtgagagagggcatccctgtcttgtgccagttttcaaagggaatgcttccagttttgcccattcagtatgatattggctgtgggtttgtcataaatagctcttactattttgagatacgtcccatcaatacctaatttatcgagagtttttagcatgaagggctgttgaatttggtcaagggccttttctgcatctattgagataaccatgtggtttttgtcgttggttctgtttatatgctggattacatttattgatttgcgtatgttgaaccagccttgcatcccagggatgaagcccacttgatcatggtggataagctttttgatgtgctgctggattcggtttgccagtattttattgaggatttttgcatcgatgttcatcagggatatttgtctaaaattctctttttttgttgtgtctctgccaggctttggtatcaggatgatgctggcctcataaaatgagttagggaggattccctctttttctattgattggaatagttttagaaggaatgataccagttcctctttgcacctctggtagaattcggctgtgaatccgtctggtcctggactttttttggtttgtaggctattaattattgcctcaatttcagagcctgttattggtctattcagggattcaacttcttcctggtttagtcttgggaaggtgtatgtgtgcaggaatttatccatttcttctagattttctagtttatttgcgtagaggtgtttatagtattctctgatggtagtttgtatttctgtggtgtcggtggtgatatcccctttatcattttttattgcatctatttgattcttctctcttttcttctttattagtcttactagcggtctatcaattctgttgatcttttcaaaaaactggctcctggattcattgatttttttgaagggttttttgtgtctggatcttgtaggtatgcttcattgtttcttattatttttttcttttgtcttctctggctgtgtattttcaaataggctgtctgcctacaagatccagaaaatagcctcaaaagggtcaatctaagagttattggccttaaacaggaggtagagaaagagatagggatagaaagttgatacaaagggacaatatcagagaacttcagaaacagagaaagataccaacattcaagtacgacaaagttatagaacaccaagcagaattatctcagagactacctcaaggcatgcaataatcaaactcccacaggtcaaggataaagaaagaatcctaaaagcagcaagagaaaggaaacaaataacatgcagtggagcttcaatacatctggcagcagatttttcggtggaaatcttaggccccgggcatatccagagatgctgtctgagggccagtcattggagtcaaaaaccttagcagtttacctcatgttctattctattgtggctaagctagcactcacaccacaatataaagtgctccctgctcttccttgcccttttaaaaggcagaggatcctctccctgtggccctcaccaccatgagggttctgcttggcctccactggtgttcacttaaagcccaagggctcttccatcagcttgtggtgaatgctgagagaactgggacccatattttagggccttgggctcccctctggcccaaggcaggaccaaaaatgctgtccaagaacctaggccaggactcagaaatcccagaagcctgcctgcttctctgcctttctgtggctgagctggtacctaaggggcaagacaaagtcccctttacttttctgtctacttttctcaaacagaaggggtctttcaccataaccaccacagctgggaatttgctgggtgacctatgaagccagcacatctcagaggccaagtcccacagtgtactccctgggtattgcaactggttattcaacgttcaaggcctctttagttagtagctgatgaatcctgataggactgagtccttccctttaaggtagcagattcccttttggcccagggtgtgtctagaaatgctatccaggaactagggcctggaatgggggcctcatgactctgcccatgccccatcctactgtggctgagctggtatccaagatgcaagacaaagtcttctttacttttcgctctcttctccttaacgagaagtaaggagtcacttctgttgctgcaagcttcactgctgggagtaggggaggtatggtgcaaccactcccttagccatgccagctggtgtctccctaggtcatgtgggagaccctaatccactggcttcaatatatagagggacgtttctaaattatttatctgtaatttgattaagaagatagacacaggcaataggatatgccaacagattctctctaacctatagttattttaagaaagttagggaaagagaggtcattgattagttttggcttactgaattatttgaccctcccatatcttttaatttatggattttatataaggcacagatattctactagtaaacatgacattaaagatgttttatacaaatgaatgtggttgatacaaaggcattaaataagaaacaaaggaaattcagaggacatttgttcgcctggaatagagatcattagcataagcataagaggaaaataaggaaggaaatgggaaagtcttgagtccattttcaaattatgaaaacttgaaatgcaacaaacaaatagtggttacttaagaagaaagactgaagatgctgggcaaaggttaactttagaaatggcatttttatatcattataaagagaaagtggggataatggaaataatctacatgtacaactcatttgacagacatttattgaaggtattccaaatgccaaacactagtttgtgcactaaggatgtttttaatttttactttttactttatttttattttctagcttcttccgctttgccagagaaggatttttttaaatggataaaatactaacttaggctagcttctttcagaaacagacctttaaacaatgattaatggtgaaagtggtttggttgtaatgtgatcccaggaagtaccagtaggagagtgggacaatgagataataaatgaaagaagccaataattaagccagttatggaactagttattgctttgggccactggggtttgatcctgatgaaggagctctgggagatagtaaacaaacaaacaaacaaaaaacatgcctcaaagttgtcaaccacaagggggtaaaggcaaggaaccagggctaactattccaactcttatccatcattggctaaatgcttcctggtacataaactttccagcacttctggccagcgcacctagcaagctgaggaaaatctctcaggtttgcagtagggcaaatgcttgtactaggacactgctggcatatacttgaaggatgagtgccaacggcagatagatgggccctgacagcatcttctacagattctgtccttgcctttgaggcaaggacactgtctagagtcagagacagaaatgtaaaatgtaaaaatgtaaatcatagtagcacacagtacaagttttaaaatcttaacaaagtgttatgggagaaccacggtgagagaaaatgactgcacatatgagagcaggggaagtctttatatgtgatgatgacatttgagtgggtgttccgttatcaaagatctacttaaaagggaaaaagagtagaattattttaaaccatggatgtaaccaggcgtggccaccctatatgtgaatgtcctgggataattttgtccccagatgtctctctttttgagtgtcattttcatttatgtattcataatataaagaaattgaatagaaagaggtaaacattggtggcaaaaatcccttcctacccataaggctcacagaataatgttgtctaaatgccataacatttttggtaagttttggttctatgggctttggaaattttttatgtaggaactcctccaaggtgatataagcattcagtgtatttatctagataccctagttaaagctactttaagcaggatcaaagtcctcttttaaacttttgtatttgaaagctattcccatgtacaattcccatgattcttgtacaattcctaggagacctttgtttacatcaaaagagtttgtctctctctataagttagaacttgtacattgtagtaatggaaaatccatttcaaagtagcttagacttactcagacaaaatgtattgatcagtgtcattaaacagttgaaagatagacgaggcttgattcaggaattaaatagcatgaccagattctagttttccttctccattgcatggctctgctccccagtatttgttccgtttaattcctcttaattgttctaagatggatatcaggatactgcagaactacgtgctttctcatccatcttaaacaagaagcaatgggttttctcttttagaatcacgaacaacaacaacaacaacaaaaatcctagagttgtttcattggttctgattgaccttacttggaaccataagtccatctttgaattaaccactaaagccagggagatgagttaaaactaagtacacaccatccacagagcaaagagaggtctattgtgggaaaactgcacaaatggaaaaataacaggggaaacacaggagaaggaggtagttagttaatgttcaatacacgcaccttctcagggacttttcttccatctggcatcatctttgtcttttgaccattttccccaatcaatacctatattcatactcaagttttccatatttgggaaaaaacttctcttgacaccaaactcccctctgacttccttcttataatgatctatggttggatagtctacaatttactgtccttactttttcataggtattttttaatctcctacagtaagatttctaccactgcactgaaatcattttgtgtatggtcttcagggaattccatgtggccaaagccaatggatacttttggcatgggctttggaggtctaacttcttgaatccaagtgtcggctctaacaatcactatctatgtgaccttagaccagttatttaacgctgtctttatttcctcatttgttaaatgaggataattgcagcaatagaaaaagaacgtaaacaattatacttataggattgtatgatgattaagtgattaatgcaaggaaagaacaacacagagcttcagacagtgtagatattcaaataaatgttagttatgatttttattatgtcttgtgacatctatgagatttgaaagtgttaatcactcttgtgtttttgaaaatctttcttttccatgttctataaaagtacactttcttgatattcctcctccttctctagtctttcattcatcttatttgctctttgtgttttatttattctttttacgttgtattttccaggagtccattcccagcccggtgttgggctcagtctatgtgccatataaatgagaatgcacttgcatttgaggctttgctttttatttctctgtagtgacggccaatcccagatttctgtctctcccaaaatacacagctatgctatagatccttcagtcctcctgactaaaatgttagttttatgtgtgtgttcctcacaacctcccagtgaataggtccaaaactgaactcattatcttctccatgctcactctgcattctttggataggcagtgaatagcaccactatctaacaggcacctaaaccagaagccaggtaatctgtcttaaacccttttgttttccaagttcttatcataatggctggtgtctaacagatggtaaataaaatagagactagctggctacatggatggatgtgtggggatgcacagagggatagatggattattgagtgagtctctagcctataaatatttttaattaactaataaattatgataatgtacagttgaaggtcaagggtgaaaaagcataccctcagtgggatgcacaccccaaggagccattttaacttgctacataacacacatatgaccacttttttgctgaaagccttctattattgagcaagcattcaaatcccatgtttgcctgaaataatggttcaggttataaaagtttccttctttttccaggattaaaattatcttcctacataataggaagaactgctttatcttttcctaatatctagagatggccttttaaaaatatagactgttttccctattgaaatgaactgtaggatgtacaaaatatttactggcatgaatcaaaagagcttgctatgtttatgtgaaaaccactaggcattctaaaaaatattgctagcatagtaaaatgttagtaattaagactaacgaaagcgaaggcaaattggaatcagagactatttttaaggaatgtcaactgtattattttcaaatacacatggtacataacagtaggatatgagaaaaagtcccaagtatgtgtactaaagtagcctgctatgataagttgaaaaagggtttgtaattggaatatccacagaatatttcagaacacttaaagacattttcatttacactttatacagctttcttataagagcatttacaccatttattttataaaccaaagattaattagaagactaaacaattacaaggcctcaactacgaaagctgttccactacctagtggaacaacaacaatgagacacacaaaacaatggcgttcaaagattagagagagacttacggttaaacagaggttgacatgttaactgaagttgcaatataatatgtcgactagttttgcaatacatagcaaacacccaaacagaaataaacctgataaaaaaacagtagtctataatgtgtgccacttactgagttttaattattctggggactatatttttgatttcatgttacaatcactagttttgtggggtctttctagtcctgatgcttatttacaaaatatctgaagtatttctttctatgtatttatttttgagatggagttttgctctgtcacccaggctggagtgcagcggcatgatctcggctcactgcaacctctgcctcccgggttcaagtgattctcctgcctcagcctcctgagtagctgggattacaggcgtgtgctaatttttgtatttttagtagagactgggtttcagcatgtcggtcaggctggtctcgaactcctgacctcatgatccacccgctttggcctcccagagacctgggattacaggcgtgagccaccgcacctggccatctcaagtatttctttaacttataacttcacataactttgtggaggcaacagggttaattaaaaaggactttacttacataacaaaataagaagcatagttttatattcctgtgccatatacattttgtttgtccatctgtagccattctttgaccttctctcccttgctctttattctgggaggctgacctctgtcatcattgggctcccatgccctttggcttccagttggtttaggcacccaagagccctagaaggaaattgaagacaggaggtaaagtgaggtcaagatatttattctcctaattccctccctttgaggttgccacaggctgactatgtcctttgacaaaaggttattgctcttctcagggtggtttctcattccaattctctgcttttggccacttttccctcccctcatcccttgggcctagatgtagtaacagctctactgttgcaaggttcttgtattatctgtgatggtttcttataccctgcttatcttgtgatttgttgctttgtagataaacctctcagattatctaggcaagatcatagaagaacacgtatgtccagctaagatattccagaagacagtagggaaacattgaagggttttataagagggagtgcagtgatcagatttatgttagttttaatctttaattggggtagaatttacattctaaaacagagatttgggtctgggaggatgatatagagcctcttatggatgtgagggcaaaaaatgatagaggtttgcagtgccaatagaaagaggaaagaagttatatatgagagaaatttgtaactaattatatgaggtgttgggtgacgcttaggaaagaatctagaatgtctatcaggtttcatgcttaagggataaagtagatggcagttttattacttgttttctgtattatttttatttcataaaaccagcttagagaagttgcatagaaaaaataatgtagtcctgtttattttaatatttgaaaagaacatatttcagagtagaatctatatagtacctccctcttggacttccaatgataccagtgatagcctcaatataagccagtcttacaaaatgcacccagcgtgaattcttaggtattgttaaaagaagttggccaggcgcggtggctcacgcctgtaatcccagcactttgggaggccgaggcaggtggatcacctgaggtcaggagtttgagaccagcccggccaacatggtgaaaccctgtctctattaaaaatacaaaaaaaaaaaattagctgggcatgatggcacgtgcctgtagttcctgctactcgggaggctgagacaggaggatagcttgaacccgggaggcggaggttgcagtgagcggagattgcaccattgcactccagcctgggttacaagagcaaaactccatcaaaaaaaaaaaagaaagaaaaagaagaagtttctaatacacttatcttcccttgggttcactcagaagacccttggaaaaggttttaagagcaagtgatttatttggggggtaaattaatcagtagaagagtggaaaaatgagacaggtgaggcaaggcagccagtaaagagtggtgcattatcaagccagctgctgttgtgggtcactggagctttatcccttgggaaactctggaacccttgtaaaatacatgcctcagagttatttcccctagcatcaagggagctagtgtaacaatatcccaattcctacaattagtcattatatacaggctgcctctgggagctggaggggaggcatcagttgcctggtatgtctagcctgtcacatggatggcaaagcaaactcctgtggcaacagaaagccttcaggcaatgaaatgctggcactgggaaatcaggctgatgggtgctgaagtggcaaggatgaggggatatggatattctgctgtagtgcttttctaacagatgattcatatttggttctagggatcaagaattgagttaaaattttatatatatgttgatgttctatgtcaccttcaggaaaataatttaacagaaactaatatttgccatcaaaaaagcaaagaatcctgttgttcatcatcctagccataacacaatgaataattttttaaataagcaacataaatgtgagataacgtttggaagttacatttaaaatgtctcctccagactagcatttactactatatatttatttttccttttattctagttgaaagaattcagaatcagtgggatgaagtacaagaacaccttcagaaccggaggcaacagttgaatgaaatgttaaaggattcaacacaatggctggaagctaaggaagaagctgagcaggtcttaggacaggccagagccaagcttgagtcatggaaggagggtccctatacagtagatgcaatccaaaagaaaatcacagaaaccaaggttagtatcaaagatacctttttaaaataaaatactggttacatttgataaaattataccatagattgtaatttaatgatgtttaatgtaaagttattaacagaaaatcacgttaaagctgaaatgaacagtagactttgtatatttattttcttagagacagagtctcactgtcacccaggctaaagtgcagtggcacaatcatagctcactgagccttgaactctggggctcaagcagtcctcctgcctcagcctccctagtagctgggactactagccaggcgtgtaccaccacgcctggctaattttttaaaaatttttgttttctgtagagatgggttcttgaactcttggcctcaagcaattctccttccttggcctcccaaagcactaggattacaggcatgagttagcatgcctagccagtagacttttgagtcaaggtagagaatagaggaaaattgacagctaatgtcaatgttaaagttaattttgtttagtaatctggatatagttggctggttttctgttgcaccatctttaagatcacttcaaaattggtatacgtatttatgtagttgcatgaagtcaaccattcgggcttaattccttcctagaaaaagtaacaggtctactctttcatatcttatttggaggccctggatcaagaaatgggggtgagtgggtatcaggattggggaggaataaggagtactctcactttctccccccattctcttacctccagcccagctcattcttctcttctttctctttcctctgaaatttcctcaaatatctgtctgcttagtagtctataattcctcaggataaaagaaaaaggaaaaggaagaaaattgcttaataactatgttttatcaagcagcatgcatagtgctttgcatgcgtttaatcccttcaaacttagtatttactagtcagtttgaaaagcccttaaatgttaaacaatggttaagctttagggtattttgagcagggaagtaacatggtaggaggttgatcagattgggcacttgatcaaaaccctctatagatattttatctgacagaaaaggccttttgctaaaccagtatctgattctcaaattggttatgtcatctaagaaggaaaccgtatcattttcttggatgaaatggcttccatttccaaattagtcaggttaggctatgctaagctatagtaagaaatgaactctgaaatctcaatagcttaacacaataaagactgctttcttggttatatcatagtccagtagaggttgacaagccattcttaggagctgtcccccaacatggtcacttggaaacccagacttttccaattttgtgacacttgtcattttcaacacactgccaaaagccactgcagaaaaggaagacagaatgtggtcagtcaatccatggtgttttatggccaggcctggaaattatgtatatcacttccaccacatcccatcacacagaacttgttctcgattgaatttcaggaagagttaatggaattagtgagcttttagccaatctctgtcatagccattttatcgaagggacctgagctgctatgaggacaaggttttagtttatatgatgaggatgttagaaagccacatagaattttacagtcttatcattagctctgttggagtcaaaatctaggtgaataaaaattctttcaagagacacatgttaccactaatggttttttcaatggatgagcatagatgaattaggaatctccaatggtcattttcctaattcctggtctgactatgtaatatatagaatcatgtggttattcttgaaagctctagtcatattcgtgaggtagtcagcatgttatgctacttctttttcttctctataagtttcggatactatgaatctattggatcacaaaccaaagtagttaactggtaagaaggtataagcagaaaatacgaagtttggactggatccttgagttagatgagaagaaggagagatgagaggcatacagtgatagatttgactagggcaagaggactctggtagttagcaaatgagaaataaatttaacctaagaaaatcctaaagtgatggtaagaatggttagggtttaattgctcttagaagagcaagtagctttaaataagagacaaaaatatctgcagaaggaaatatgaaagtagaaaacaaaacaattgcattgtcaaaacatgtaagatgttttaatcacctaaaataaaaccagaattgtattataattgctatcctttgtcaaacttttgaaattaaaaaaaaaaaacgctttggaatggtctaaaactacatcataaaaatggctcagccactatctatagagattgacattttttgtttgtgctctgtgtttaggaatttaatgatgtgtattgctgcagattcaatgtaagttcccgatacagataaagatggccaaagctgtaattttttcatccatttcttgaatgatgtatgctaaaattaaagtaatcctaatgttaataataacttttagtgaatgcttgctgtgtgtcaaaaagtatgctagtcactttatatatattggtttatttcatcctttcaaaaacactctttgaaaagtactcttattattcttagtttgcagagaagaaaactgaaggctagagaagttcagaatcttcttttgaaagtagtagagttgtgatgcgaatgcatagcaattactcttgtagatgacctcacaggcttcctcttccaattgtctacgtggctaaaacaaagcaagaaaaccccataagaatctgaaaaagactcatgtaattattaattgacaaataagattatattacattactgataaaccaacaggtagaaaatgaaagcaatgaaatagtatactgcgaaaaaaaatttcatattatattctttgatgaaaaaataaaacaataattgcaaactgcatttcatttttaatgaaacgacaatgtttaattcttctaaaaggtagggagcaaataaaatggttatctggtctttacatcgaatgtgtcatcactactaagtgatattagctggcttattacttaaaattttcttttaggaaaaaagtgtgaaaatagacaggaggagacattaaatggctaaagcaacacccccttgctccgtaagttctttctgagtctgtgtgcctaagattaacaagagagcctgtgagcctcacaaggcaatcacaaagctatgtctacagccttggagagctgtgattacagcagccagcctcctttgcagcacctcagtgatgactacactaactctcactactgagcaacaatgaaatgtttcaaacccaaccaccaacactgttataactcttaaaatttgagccagtcaccatacctgaacgtaaaaagaaaattaccaaaaatgcttgataccaaaaagcaattaatgattcataattgctaatctttattgacagtctcttctagttcttatctacatatattttaattgtctacataatgtaaattaaattttaaattctgatttgtaaacttaatattgcataaatatttatcaatgttgttaaacatcttttaataattattttaacttctttatattatttcattaatttccatctttatgtccttgctggtctgacatttagaaaaaactcctccttttatttagaaaaaaagaatggtgaggccgggcgcggtggctcatacctgtaatcccagcactttgggaggccgaggcaggcagatcacgagatcaggagtttgagaccggcctgaccaacatggtgaaaccctgtctctactaaaaatacaaaaactagcctggcgtggtgctgcatgcctgtagtcccagctacttgggaggctgaggcaggggaatcgcttgaacccgggaggcggaggttgcagtgagccaagatcacgccactgcactccagcctgggtgacagagcaagactctgtctcaaaaatacataaataaggagaataaatggggacaataacaacctattcacagaacagaaataaaaccggagatgtcatgtggaaaaagcttatcttgaaagcgtggtcagagtggaaagaaacagcaacaggagagtcttgatttggtgaaaaaacagaatgcagatggcatagagtatcaacaattaattagcaggccatcaagagacggccataacatattggtaattgttttctttcacccttaattttttctaaaacaaaaacatgaagttagaaagtagttaattttgttagccacatggcttcatggtttaattttatcttctctatgggcctggtacaacaataaagttcttttgagatagaaagacagatgttaggcaaaaacatacaagattttcattctaatcaaaatctttgccaataggctatgacagaatcctatgagagatgatgccatttagaactttcacaagaggcaaaaatagtatgccattggcacctaaaactgccaacagtgatcatcataggatttatttcatttggcggattcttggttgagttcataacctgttccctaggcttttaagattggtccaaacttggcaatggattctttggaaaaattatttcttgatcgttttaaactttcttttccagtgtcaagagagattttcccaggctccgagttttcatttattttttcccctgtcagtttttgaaagagaaatcccctttttgtcggctttgtgattgcttttgtgtcaaattcagcgtaaaagcttttcaaacgtgacagcattagctgttttgtgcttggctgagctaagagtacatgaattcaatagagaagtgaaatcttgtttgagcctggctgatttggctatataatattgaaaactatctgaagcaagaaattcaatacttttcaaattattgaataaacatttctaaggctgcaaaatctctgtgtttttgaaggcattctttaggaaacttgaaacacagacattctataatcacataattaattttaaaagttgaacttattgtatgtagtaactaaggcagctatttgagtgtctcaaattattttactaaaaagggagacatttttcaaatatggaagtagtgccttacatttttagttatctgtggaaggatcgatggcatcatatatctcatccaccataaaaatatgtacggtagtggaaactgaatttttcttttatatattttgtgtattttttggagttgtacaaaattaaatcagcaaattgacccacactagtagtttgaggtttgggtttctggtacaataatgaaaagcattattagaaatcttcttgccaggacctaccatttcttcatgtattttctttattcccttttgttctcccctaaagcttctatgtgattaaagagaaaagatcaataacccaatagtacttttccttctaaagtatgcatgaaactcttaaagttctcaaagcatacaaacagagtgctctctacattgctgatagaacacaggtagtaatgggctagtttccccaggtaactattatattatataaatatttaatgcagagtcaccaagccttgaataactttatgctttgattgtaccatattttctctagtttgcttttcacaatttaacttatcccgtgcttgaaaatataatgtggtaactgtgtaaatctgctcctcaaaaaattttcgaaatcatcttttcttttttcttttctttctttttttcctttttttgagatggagtctcactctgtcacccaggctggagtgcagtggcatgatcttggcttagtgcaacctccacctcctgtgatcaagtgagtctctcagcatcccaagtagatggaactacaggcacattccaccacgcccaactatttctcgtgtttttagtagagacagggtttcactatgttggccaggctggtctcaaactcctgacctcgagtgttccgcccacttcagcctcccaaagtgctgggatacaggcgtgagccaacatgcctggccccacatcgccttttctgaaccctgggaattaaccaaaggctggcaacaatttttgaaatgctgactctcaataaaaatggcaaagtttgaggttttttaagttggcctttcccgtcactttctcccagctccacagtagccttgaaaatcagtagccttgcaaccataatagctgtgaaaactagcagccttttagccaccagagagtgtagaccaggattggaattcttcaaaaaggccaattttattccaagaaccttgccactgtttgacctatcttgcagctccctggaataaacctatatacatggccttgcctttatttggcccgacttagagataactttctaggaaaagccctagctccagggtgttggtccaaaccaattagcagcaattctttaacataacaggttcctaaggctgtgatgctagttgagataaacataggtctggagaaaaacttccagtgaagctctggagaatgaggtgtccataggggattttggcaacctctgacatgttcttgcgggatctagaagcccatgtgcttgtcttaacaaatagagagtatcaataaagagatagaaattgtaaataagaactcagtggaatatctggagttggaaagcacaataactaaaattaaattttcacttgacgtcagattcaagctgcaaaagaaagaatcagcaaacttgaaaataggtaaatgggataatccaatccaaagaaaagaaagaaaaaatattaaggaaatacagaaagcaaaaactgactgaactgaaagaagaattaggtaattcaacaaaaatagttggagacttcaacatctcacttttaataacaggtaaaagaactaggcaaattaacaaggaaatagacacttgaaaaagactataaagactataaacttacaagacctaacagatatctatacagcgtttcatccaataatagcagaatactcattcttttcaactgtacacgaaatattctctagggtaggccatatgctaggtcataaaataagtctcactacattcaaagggattaaaatcatacaatgcagattttatgaccataatggagtacaattaaaaatcagtaacagatgtaaatttgggagttcataaatatgagaaaattatacaacacactcttaaatagccaatgggacaaagaagaaataagaaaatacaaaaatatcttgagataaatggaaataaaaatacaatataccaaaacttatgggaggaggctgaagcagtgcttagagtaaaatgtataactataaatacctatatttaaaaaggaaaaagatctgaaatcagtagcctaagcttctaccttaagaaactagaaaaagaagagaaaagtaaatctacagtaagcagcaggaagtaataacaattagtgtgaaaaaaatcagatagaggaagaaaatataatagaaaaaatcaacaaaaccaaaatctagaaatttagttatttgaaaaggtcaacaaaattgacaaagttttagctgattggttaggaaagaaatggtcaaattactaatattagagaaaaagagggtgcattactaccaacattacagaaataaaaagaagtaaaagaggatattatgaacaactaaacaaatagataacctggatagacctataacaagaaattgaattggtattaaaaacttctcccaatgaaaggctcaggcccagaagtcttcccccgatgaattctaccaaacatataaacaactcttccaaaaaatagaagagaaaggaacacttcctaaccagacaaagatatcacaagaaaacaagctacagagcaatatgccttatgaatatagacttgaaacgcctcaaaaaattatcaaacctaatacaacaacatattaacatgattgctaccataaccaggtaagatttatcacaggaatgtaaggttggtttaacatccaaaatttaatcaatgtattataccatatcaatagaataaaggacaaaaatcgtatggtcatcacaataaatatagaaaattcatgtgacaaagtacaaaaccctttcaagcttgaaaaataaagaacacttaacaaatgaagaatagaaggtattggccaggtgtggtggctcacgcctgtaatcccagcactttgggaggccgaggcagttggatcacgaggtcaggagattgagaccatcctggctaacacggtaaaaccccgtctctgctaaaaatacaaaaaattagctgggcacggtggcgggcgcctgtagtcccagctactcaggaggctgaggcaggagaatggcgcgaaccctggaggcagagtttgcagtgagccgagacagcagcactgcagtccggcctgggcgaaagagcgagactccgtctaaaaaaaaaaaaaaaaagaaggttttgtggattgaatagtgtcccccgctcccaaaagacatactaaaagcctgagcccaggtatctgcaaatgtgaccttatgtagaaatagagtctttgcagatgcagtcaagttaagatggtatttttataagaagaggaaaagaggcatacacagagagaagaatgccacataaaggcactgaccacgggaaaaacaccatgtgatgttacagttagagattaaagtgctacagttgcaagacaagtaaaactaatgattaacggccatcattagaagcaaggaagaggcaaggaaaaattctcccctacaggtttcagcaggagtatgggcctgctggaatcttgattttggatctagcctccagaagtctgagacaatgagttttgtctacccagctacgcaaattgtgacacttaattacagaagcccgaggaaacgaatacagaagaggatttcctcaacctgataaaaggcagctacaaaaattccacagctaatgttattgtgaaacactgaatgctttcccctaagatcaggaaatagtgaaggatgcctggtctcaccacttctattcagtattgtactggaagttcaggccagggaaattaggcaagaaaaataaataaaagacatccagattagaaaggaataagtaaaattatctctacttgcagacaacatgaccttgtaattagaaaattttgaagaatctatgaaaaaatattagaaataataaaataattcagcaaatttgtaggatacaagatcaatatacaaaatgaattattttatacattaaaaatgaataatctaaaagtgaaattaagaaaatatttacaatggcatcaaaaaatgttaaaaacttaggaataaaagagatgcaaggcttgtatactgaagaatacaaagcagtgttgaaagaaattaaagataaaaaaatagaaaaatatcacatgttctcagatcaaaagacttaatattattaagatatcaatatccccccaattgatctacagactctatggaatcattatcaaaatcacaactggcttttttttttttttcagaaattgacaagtggatcctaccatttctattgaaatgcaagggatgtagaatagtcaaaacaaccttgaaaaaagaacaacattggaggagttaactttccaatttcaaaaactactacaaagctacaattattaagtcaatgtggtactagaatgtgaatagacatatagatcaatgaaatagaattgaaagttcaaaagtaaacctttgcatttatggtcaactgatttttgacaagggtaccaagagaattcaatggaaaaagaatagtctttcacaacctggtgctagaataactggatatacacatgaaaaataatgaaatttggccccacctcacaccatacacaaaaattagcttaaatgtatcataaaagaaaacaaataatctgattaaaatgggcaaaacacttaaacatttctcaaaagaagatgtacaaatagctaacgggtttgtgaaaaatgctcaacatcactaatcattggggaaatgcatattacaatcgcagtgagatgtcaccttacacctgttagaatggctgttataaaaagagaagaatgataacaagtgttgatcaaggatatggaaaaaaggtaacacttgtatatcattggtgggaatgtatattagtacaaccattatggagaacagtatggtagctcctcaaaaaactgaaaacagaattaccataggatccagcaatcccacttccgggtatatatccaaaagaatttaaaccagtatgtcaaagagatatcttcactcctgtgtttattgcagcattagtcacaaaagccatgatatggaatcaacctaagtttccatcagtggatgaatggataaagaaaatgtggtacatatacacaatggagtattattcagccttaaataaagaatatccttttgtttatgacagcgtggatgaacctggaggacattatactaaatgaaataagccaggcacagaaagtcaaatactgcgtgatctcacttatgtgtggaatctaaaaaagtcaaactcattgaagtagagagtagaatggtggttaccagaggctgtggatttaggggtggaaaatggggagatgttgatcaaaaggggttaaaaactttagtcaggaggaataagtttttgagactttatgacacaacctggtgaccatagttaataatattatattgtatatttcaaaattgctaaaataacagattttaaatgttcttgctataaaatatgataaatatatgcagtgatagatacgttaaattgctcgatataatcattccacagtgtatacatatatcagaacatacatgtaccccataaatgtatataattatttgtcaaagcaaaataaaattaaaaataaaatgttttaaaacttttgtaaaataaactttataataataatatatttttaatgaatcatagagctaaatatattaataagaactaaaactttaaaactcttctaagaaaatgtaggaatacaatggattatgcagtgttttcttagatatgacaccaaaagcaaaagtaaccgaaaaatacacaatttggactttaacaaaattaaaacttttgtactgcaagcaatattgtaaagaaagggaaaagacaatcctcagaatgggtaaaaatatttgtaaatcatatatttgataagatacttgtatcaagaatatataaaaactcataattcaacaacaaaaaggataaatgacttaattacaagtgaagaaacagtttgaataggcatttctccaaagtagatgtatagatctccataagcacatgaaaagatggttaacatcattgattgtttaaaaaatgcaaatgaaaaccacaaggagatagtactttttacccactaggatggctaatacaaaaaatacagacaataacaagtgttgagaagatgaagaatgcttggaattttcacattactggtggaaatgtaaaatggtgaaacaactttgaaaacagtttggaagttcctggaaatatttttttaatttttaatttttgtgggtacacagtaggtatatatatttatgggatacaggaaatattttgatataggcatacaatgtgtaacagtcacattggggtacctggcctatccctcacctcaagcaattatcttttctgttacaaacgacaatctaataataatcagttatttttaaattcacaataaattttttgactgtagtcatcctcttgtgctatcaaatactagatcttattcattctatcaaactatatttttgtattataaatttcactacccattagccatccccccctttccccctaccactacccttcccagtctcctggaaatattaaacatgaagctaccatatgacaaaaccattctactcccaggtgtatgctgaacagaaataaaaatacatatgtacacagaaaacctttatacagatgttcatagcagcattatttataatagccaaaaagtagaaccaacccaaatgtccatcagctaatgaataaattttaaaatgtcctctacatccaaaaatggaatattatttagcaataaaaagaaatgaaatactgatatgcactgtaacatgagtgaacctcaaaaatatgctaagtgatggaatccagtcacaaaagaccccaaattgtatcaatacattcatataaaacatccagtaaagactgaaggaggaggagaatagacaatagaaagggactgttaattggtatgggtttcattgggggcaaataaaatgttctcaaattagatcataataatggttgcacaaccctgaatacattaagaaccagaaaattatgcactttaagtgggagaattttatggtatgttaaaaagtatatctgcatgtcattgactacagatcttttcttattttttcaagttttatgaacacagttttagaaacatagtctccatttttctctttcatgaagctgcttgccagctatagaaatgaaaaaatagccatgtctgtggaacataactgctacctagatgggagcctccatcacacaatggatagggagctattttcttttatggtcaagataggcaggttctgtcctatagaatatattctgagatgttacctgtagttcagaaaaacagggatattgttgttctaaacatttcctcaacatttatgtggcttcctatttattaataagagaacctgttctttatgtgtcattatactagtttattctagccctggtcctggtccaggactgtctggaggtattagaattgccctactctatgtgaaataaggtcatatctgaataggtatgtcagtcagcataggctaagctacagtaataagcaacctcaaatctagaggcttaatagtctatattttactcatgttacatgttcgttgtagactgatgagagcattctacttagcttagtcactcggggaccatggctgatggtatctccatcttggtacattctttcatgatcatagaggcaaggaacatggttcttgagccttctgcctggaagtgaccagtagacaaaaccagtcacatggccattcctgagttcaatgggaatgccgatgtataatcttctggcgtgaaaaggcactggatatttgagaacaataatgcagtctaccacaatatgctcatggggtctgaaaaggagctgaaaaaacgccattttctggggttctgtcctctggcattgtttctggaatcgtttccacccatccatttctacaccctctcaactgacttttctcagatgcctggggtagctgggtgatttgttaattacagtattgcttaagccttttaataaagtcagcaaattaaagagagagcccagataaagagaatgctttcaaaaatgtcataatgaaattaaggtaacgaagcacttggagacctctcctcccttctttttgtatgaaacttattccaaagcagctggaagagaaatggggcctgaaagtaaagaggggaaaaatatattgtatgccattagtttaattataaaaattcattacatgaagccatgtaagacagaaaataatggaactctaatgggttggccgataacacatttactagtctgctctcagcttgtagtcattgttgaaaggacagaaaagtaacgacgttggtatgtagtcttcaaagctattgtaaagattaatcattttcagtaagccggaaaatgagggccattttcttaaatagtatgccctgtatagagtgttaccttctgaaacagagttgtttggtaatgtcagaggtttaatagatgagtcttgaagttaatggtgagaggctttacttttgaaatggctttcttacagctattttaacatttctattataaatccataaagaggttttataggtcgttttaattcacacaaggagggaagaaattgtgcttctcttttcccaataaggatttatagaacattaattcattcttgggaccaaattgtttagtgattttcaaaaataaactatgtatttttctgctgtctttttttcagaaatgccttactttattatacataataattttccagtcatgctataatcatcaagattgttttatattcttcaaagctcagttaaaataaacccagtccttttccttaaatttctttatatggatgcataacttctttaactgaattgaaatgaaacctgaattgagagtccagaaacctgcatttttatgatgactctttcactgactagctatgtcaccttgaacaagtcacttaacctttcagagcatttatattctcatgtggacaattatggaattgctcaaaaaggaagaagatatcaaaagatgaaagtgaatatgtaggtaggggtcatatattcgagggccttgtaatccaaagagagaggttaggactttgtcttgcaggtaatagcaaaccattgaaaggttttacacagaggagaaatgaggttctatttgcattacaaaaagatcatttacgcagttgtatgtaggtggaagggtggtttgagagtggagggagggagccaataaaaaagattattttagtacctgagcaagagatgatagggacgtaaattaaggtagtgtcaatggaagtagaagatttggataaaagttaaaaaaaaaaaaaaaaaaacttatgatacaactacccagggagtatgttccctgcctcctgctccagttgaggaccaacatatcagattgatccagagacagaattttggagaacattaatatttaaaggacaggcaaaaaaaaaaaaaaaaaagcttgaacactcagagaatacagaggcgaccaaaagagtggaagccaagaaagcagagaacttcgagaagagaatagtcagcagcaccagttgctgcaaataaatcaagtaaataagaacttaaatctttccataggcattggcttttggtaactgaatcagttaactattttcacaaatgtgagtggcatatagcaataagcccatattgcctttcatgaattttcagcttgggtggggtggcacttcttcatgttgcaggttgattggggtcgctctgctccatatgtcactcattctcctcctgagatgagtaggctagtccagagcatgtttgtcttaaggtaatggtgaagtgcaaaagggatagccacactgcataaatacatttcaagcctctgcttgtgttacttctagtaatatcccactgggattaggcaaagcaaggcgcatgaccaagctcaatgtcaagggcatgctgtctttcgtaggaagaatttcagagttacttagcaaagggcatggatacagggagaggtaaagaattggggccagtaattcaatttgccatagtgacttctgtcagaatagttttagtggaacgatgatggcagaagcctgattttcatgaattggagagtggcacgaatgtagtcaagttgagataatgagtgaatatctgccttctaaagagtgtgactgtgaaaggaaagaaaatgatagagtgcagattattgttgttgttgttgtttaaagatgagagagacactcatgtttgaagtctctagagaaggtccccgcagagaggcaagaagttggaacacacaaagagagagggagtatgtggaggaggatcccagaatagatgggtgcccagatggtgaaatcaacttccaatagcagaaaagtcgcctcttcctctgagactagagagaaggatgcaagatgtaaagtctgatatttcatgaaatgtatgtttgatatattaaatttccccctgtggaattgtaggtaggatcatttactgtgagatttctttcagttcgtgttgtcaggaattagtctgtaaaccacattcgatatttcaaacagaggaaattcaatacagaggactggctcctccataggaatgaaggagctgacaaacccaacagaggacagtgaggcaacccagagtttagcaacttcaggaaactattaccacctcaagggctggggaaccgacaagttttaccaaagcccagaaaccagaaccatcgggtgctaattcacccaatgtaaggtctgcacagcaggtaatggaattacagagggagcagccgtccagtgggaaacggagacaaaggagatactgccaagacagagagagaagggggataattatcttgtttcaccctttctcatgctcttctgtctcccactagtgtgtctcatgacttaacctagttagaagccagctagcaagaaatcccaggaaattctgacctcctatgggagttagtacatctcaatactgagtggagtaggaaatgggtagagaatggatctaagagcaaacgacctcttggtggttagctaacagagttaaatttttccatgaatcccttggttcatgaatgtaaatacaggatccaaggaaaaataacaaatccaacatgtagaactttttgttcataagcatattaggatcctgttttacaattttccgagcaattgcttgattttgacacttcaggacaagccggaggcatggtcagagcaagtaaccccatcctagtttacagatgacaaaactgggacttacaaggttaatgacttccttaagatcaaactgcagaacaatggacaagcaaaacttcctgggaagatgtcctttcgttactctgcactgcctttcttgaagttcctttgagacacagtcattaaaaatttaagtaatagttcacccggaacaaacatttattttacttgtaggtgaatatcacaaaacacattttaaaaggaaatttaaccaatattcaaccttaaaattttaatgatagagctatgcacttgcttttatcttccaagttaaagggagaattttagagttgcagcatttctagacaatgtccataaaacagcgagctacttgctttgcattcagaaggggctcacactgtggggaatatagtttgactcattaaaattagtagtagatgtgctagcagtagtaatgatgatgatgatgctgatgctgatgatgattaatatttatttaatccttcgggcacgccaggcacctttgtaaatgttctccctgaattctctaagttaacccacctaatcatatttccacataaatactgttaatattcccatttagcaaaggaggaaactgaggcacagaaaagataattaactctcccatttgccactaagcgatcacgccaggattcaaacccagcaggctcattgtattgctcaggcttttagctactctttctcttcctcctctcttttctaccatgtagggtcaatatcactaaaataagttcttacacataaaagaaatgagagaagacaaacaattaaagtagaaaaaaatactcaaaattcttgaaattaattcaggttgtctcatagtccacaatcactttttctacctaagatactgtgaatatatatcaagcacatagtgcagtagcagcataatgggtttgaatgtgaaacatttctttcctggttggggaaacaatcttttggggatttagcattttatattcttcatagaaaacacacacacatacacacacacacacatacacacacacacatatacaaaggcaatctttttttataagctagtgctcacagtattttaaatttcttcacacaccatgatcaccacacaagcaattccctgtggtgtacaccattgtcaatggaattcagaaagagaaaagggtgtgtgtgaagtctgttgtatttttgaatttacactccttctgaggtctggagttatcccagtagtaaatttcacagcagtaggcaaagctggtcaaggtcatggttcctagtgtgaatgacacttgggtaaaacccaaggtgggcgggcagaatattaccgtaggagaaagggaaaacattctgtgtggggaatgtctttaagaagggagaaaaaaaaaaaaggctacctttgagaacctttgtgtttatataagggcctgagccccctcaatgtcagtcaaggtcagtgggagttttactttttaatcctacatcctcacaaaacctgggcagtattcagtgagggttagcactcagtcaagatttccttaggtataacagtcctaactttcgctgtgaatacaattttgcagaaaaatatatggcacgcgtatttctacctttcaagcattaaagtacatcaaaaagttctggtttgacgtcaagcctcactctttactaccttgtttagtaggaaatctgtcatttaactctagcttactatttctttcagagattttggaaaattctaggatatgttataatttataattttaggcatttttatgatctattgattatgtttttagattcattggcaccttctgcattttatgttttttaattttaacagctttattgaagtgtaattgatatacaaaaactgcataaaattatatgggctagaacatgtgcatatacccatgaaaccatccaaatggtataacctcttatatctagacttttcaaacaggaacctatgagtgatgggtggcttccaaggttatttaacttgcttgagtaaaataaatgattttaattatatatttactaaaaattttgtttttattttgtattcctgagcttttacatatatgctctgatactggtccatcataagtattttattaacaattcagtgttttataaaaggaattcatttgaaaaaaaggtaaccaagttattggtctcagttttgtggatgttcatgctattaattagcaatttaatagatgagagataataagctcttcttttaaaatgcaaatagcaccctctggatactaagggccaattacatgttctttcgtatcttggaatacatttcttttatcactttaggtttggcttaagtgaggaggagaaagaaagaagtggtaattttgtaccctaggatatttctagaaaaggcaagcctttggcagaagttccctcagaagggctttcaaatagtgcgaggatctgaaaagtggagaatagaaactgtaatgcttgataaaaggagtatggaagaaaaggcaggcattccacgcggataaatgttaattgttttgtaatagcagcaactatgctctgtgcctttagacactgtcctctgctttcatagcaaaagtcagtgatattggcattagcttcttgataatagtttggtaatctgggtctatttgctatatgcagtaaatactattacttggtttgattctaggatgttttagttaactgagaaattacattatatatagattgtatatgttcaataggagttcaccaaacacgctgaaattatgctaagaacactgtttgatttttattctgtaaatatcatactaacgcaaaagaacaaatattaaaacaaaaatgatttttctcctcagaagcattattttcaatttcttccatttcgtgttcagctcatgattatgtattcttagagataaacacagtgtagttaaaaattgtgttctgttttttacacaagaaaattgtgctctttttacagtgattactgtgcacatttgctacatattggaccattggaatgatgtattatgttcttttaatgtccctgcattaaacatcgacattgtttctctttttttttttttttttttttttttttttccgagatggagtctcactctgtcgcccaggctggagtgcagtggcgtgatcttggctcactgcaacttccatctcctgggttcaagcaattctctgcctcagcctcccgagtagctgggattacaggagcctaccagcacacccggctaatttttatatttttagtagagacggtgtttcaccatcttggccagactggtcttgaactcctgacctcgtgatccacccgccttggcctccctaagtgctgggattacaggcatgagccaccgcacccggcctgtttctcatttttttactgctttggttaatgaagattttaagtcatatagtatattgatcttcttttgaagattttatcaggataaagtaccaaaagtgagattattgagtcaatgggaataagcatttgtatgtcacttggtatctattgccaaattgtcctaatagataacggtccccagcagtaatacgtgaatgtgctagttttactggtcttttcagctttggattttattttttgttaatttaattggtgtccaattgtaccttttcaatttaatactctattttttattacttgaaagttaacttttttctttttaaataaaatcatcccactctttctcttgtttgaactacctgttcctattcctgtgtccatttatcaatgacttaacccatcctattgaatttgatataactatcttaacaattagtattatcttaatgcttagaagcctcctctctgcacttgcagaaatgtttaatagaaatttcaggttgatatgcttcgagataaaacctaccattaattgacttctttctttgaaatatgtttcaagtgatgagatagcaagtttgaaaacactgaattgccaaagacaaacaacgaagaaaatgtaggtgatttggtttagtaagattcttatattttgactttttttctaattttaaagtaaggtattctaaaagtattttgatccttcaaaaaattcgtgactagaataacagtactattcttttgttgttcaatattttctgtatgcaggtttagttgaacgccagtagatggcactaattacataaacaattcaacaagttaatgaagagggaaagaaatgtatgaggtttttttcgttcaaatgttgttatatgtcacatattcaacaattatatatgagcttatttttgtagtttttttctcttgtgataaaaacaattaagcccactttattgccaattaattgctactaagttgaaatacttgatactggttattgctcaagatgctgcatttgaaaagtttgtcctgaaaggtgggttaccttatactgtcatgattgactaaatcatatggtaggttaaaagcaatctaatatatgtattctgacctgaggattcagaagctgtttacgaagtattttaagacactccaactagagatttcataaaaaaaactgacattcattctctttctcataaaaatctatagcagttggccaaagacctccgccagtggcagacaaatgtagatgtggcaaatgacttggccctgaaacttctccgggattattctgcagatgataccagaaaagtccacatgataacagagaatatcaatgcctcttggagaagcattcataaaaggtatgaattacattatttctaaaactactgttggctgtaataatggggtggtgaaactggatggaccatgaggatttgtttttccaatccagctaaactggagcttgggagggttcaagacgataaataccaactaaactcacggacttggctcagacttctattttaaaaacgaggaacataagatctcatttgcccgctgtcacaaaagtagtgacataaccaagagattaaacaaaaagcaaaatactgatttatagctagaagagccatttatcagtctactttgataactctatccaaaggaatatctttctatctcatcatggcgcacactgccttacctgttatctgataaataagtcactttgggattcatgatagagttatagctgtacatggtctcatcctagtatctcactccacacacccaatgggaaaatttgtggagggcaatatgactcgtcacttcatttcccattatatatgaatggaaattaacagcgcttatagacagtatctcctcaaactaagccttgtatccttattatacctctcttgatctctagtgcttttttcactagcatttattccaatcataaataaaaatataaattatgtaactaattgttaaatatttgtcctttaaattaatctaaatgccatgagggcagagattttgtctttctcatttgatacatccccaggtcctgaaccacgtgatataatagggagctagtaaatgttttttgaatgatgactccctttgcagaatgtacaattaccttgtgcaagctgaaaaaatagcacctgtacaatatgaggaagaccacggtgaaaaataattgagttccaaaatatgacatcaattactgaaaaaataagctcggtgatttttaacaagaagtaaaagtcaccactggggccaaaacagattttgaactaagagtaggaagtcttaggagaaatgagataatgatatatggaaattaagcggccaactaaattttgaaactgagctagacattagagagtaaaaactcctgtgaagctgaatttaagctggtcaccctggggaatagagcaactctaatcctgaattccagacagtaggtgtatagatggaaaagaccatggaaaagaagattcaacctaaagttgggaagttttaattggagccctatgaaaaagaccctggtggagaaagggcaaacttgaatatggagctgatatttggaaaaattctcatagtaactactttttctcaatggcaaggcttggactttcttctcaaaatacagatcttatatgtgttcaattaaacagggacagattaggttcaggaagaattattcacatggaatcaattggtatcagagagtcaaccattagatcttagtgggaaatatctgcttctcaaagagaagtcttttggggaaagcaaattaaagtcagagattaatttgatgagtttaggtaatataaactaaggggccaagaaaaaagcttgctcatggtatgaaactagagcttgaggacactgatctagtctatctatactactctttctgacagacccctctcttcattctcatgctccttgatggcccaagccactctctcagttttttaaaaaattgttttatcaaggtctctggattcttcatgggaatgacttccagtttatattttttggcttggttccaaaaagctatcagctaaggaatgcatatacttacttcccctatgggtaaagtaaatgagaattttagaagccaactcacatttttagcctgtacagaatctgcaattcaccaagctacttctgactcatgtctataaagttcttccctgttcttttctcacttcacatgtactctttgcaagaattcatccacttgtgtagtttcagtctgttgatgactacccatctataattccagctgagaatgatcttttgagttttagacatgtagatcctgctgctttctttcgatgttaatgtcccacaggaacttcacattgaagaggtccaaagctaaactcatctttgccttcttccaatctctttctccaaatgcaacctacttctgttgtccttgtcttagtccttttcgtgcttccgtaacaaaataccacagactgggtaatttataatgaacagggatttgttggctcatagttctggaggctgcgaagtccaagatcaaggggctggaatctggtaagggccttcttgttgtgtcatgattccatgatggaaggtggaagaccaaaagagagaaaaaatggggccaaacttgtccttatatgaaactcactcccacaataatgatgctaatccgttcatgaaggcagagccttcatgtcctaatcacctcttcaaggtcacatttactactgttgcaatggcaattaaattttaccataagtttgggaagggaaaaacattaaaccatagcattctgcccccttttccccaaaattcttgttcttctcaaagacaaaatacattcatttcatccccaaagccccaaaaatcttatttcagcataaactcaaaagtgcaatctaatataaattagatatgggtgagactcaaggcacaattcatcgtgaggcaaattcccttccatctctgagcctgcaaaatcgaatcaagttcatcccctcaccccctacccttcccagcatcaggtaaccaccaatcacagaaagttttactgatagtcctgctctagatcatctttgtctatgttcactttagctatttatcctagtgttccattattggaatactaagcatgtgggaattatttatattctactgttcaaggtcctcaccaaggtctgattgcaaaaattcaaaaaattgcaaccttaggcataaatgggttaagcagtttagggtacatttataataattatttactgtgctacttcaaaaatcttattgcctctatttataaataaaaagtgttgtctctacacagtggcttgttgtaatgcatttacttgtttctgcctgattttttctatttatacattttcttttttatttttatttttattttttcacttttaagttcaggggtacatgtgcaggtttgttacataggtaaacttgtgtcatgggggtctgttgtacagattatttcatcacctaggtattaatcctggtacccgttagttgactttcctgatcctctcgctcctcccaccctccacactctaatagtccctagcatgtgttgttcccctctacgtgtccatgtgttctcatcatttagctcccacttataaatgagaacatggggtatttggttttttgttcctgtattagtttgataaggacaatggcctccagatccatctatgtccctgcaaaggacatgatctcattctttttttatggctacgtagtattccatggtatttgtgttggtctcaaaaactacaactatgacaggatggcattttcacttttgttgttatattaaactcatcttaaaaaggaaagattaataatgtcaatatttgggttatggagaaaaagtatctcatatctttgaaaaagttctgtaactatagctttttaggtaggagggattctgtggaaagttttctgattacatcatttctcacagttcaggttagacaccattttactatgaaacactaatgcattgcctgcactgagactttcagtcacatggagaaacctaggcaaaatttttgtacacttggaagaatatttaaattagtaataaaatctttagttttaaactgttgaatgttaaataagatataaaatgtacttgaaagaaatttgctttgatatcagacactgccatgttgcagtttcaagacataataaaaaagtaaactaatgtttatattttgctgtttaagtttattaatacatcagatgagtcttcaaattctacagtggcttttgatatgatcatttttacttgccattttatatagaataaatataaataggcatttatgcttaaaaggaactaatctatctatggaaaaaagagaaggctgcttctcaactaaattgtacagtttagaaacccagatctgaacatagattattgttgtgacctatgtaggaaaatatgttgttttccttatcgtagtccttacagagtccatgataacatataaagccagaaatgtgagcctctgcaagttcatttctttgtcttcaatctctgtgaatagatatgagtttgtgaataagataatattagatgtgatattacaaattattgtgagaagcctctaaggattagatttcaaggactgccatctggctgatgactttatgatgacactgtcatgagatttcatttccttatttctgttccaggatcactctttaaacaagaaataagcattaactctgaattgtctgcttgtagctgtatgagggcttccacaactgccaactagccaggtacaaactcatcaagcagaggagatggtccttgcatcagagggttaaacatgcctagaagttccttagctaagctcccagatactaaaaaatccctctaggttctaagaaagattcagcatgtacatgtgtgtacatgtatgtgtgtacatatatacatatacgtgtatatgcatatgcatgcatatacatacaaacacattttcttccataacatctcagtattctctgttctttataatactgttttgtattttaatgatcaaaattaatagttgatcatctgaaaacattttgacctgttttctccgtctttgacaaccttgaaggcacttgtaagtcactctttgcttctctattcctaggtcctttctcatcttcattgcaacaagaaaagagaaaacaattgagccctattttgtgtgtagcaaggagctactctagttaaacactagatctcttttacattctccaacatgttgttttagtaattattctactttcctttttttgggatattcaatttcttctttctttttgctcctcccctttagcaggccaacatactcaagtctccctcatcctaagagaacttttttagtatatcattttttttctatccagctgtacttgcttctgcttactatatcatttttaagcagtagttggcattactgtttcctgttctttagctactagttgtactttgacccactccagtctcacttccccagcaccaccactttatgaaaacaaggacttactaagatcatcagtgactttgtaatagctaattagtgtattttaattcgtccatcttcttgactatattttaacattgatcctgttggtcaactctgctaatcaaaactttatcctccttggttcccagaacaatattatcttgaatatctcatttctctaatcatataataattgtgaggtgcttggcacaatgcctagtgcgtagtaagaactcagtaaaatatcatctgccatcgacaccataaaaattaatttacttactcaacaaatacttttgtatgaagtttgtgctaggtaggcccagtaattggtacttggtatagagcaatgaaaagccctaccctcataaagcttatattcttggaagcagaagttggaagacagacattgacaaataaaaattaaatacatgatgtgtcagatggtcatacacacagtgtggaagaacaaagaggaaaacaagtggagagagagagggaggtggaagaggagtgctgccatgaaaatgtggtaatcaaaaaaggtcttactgaaaaggtggcatttaagcaaattctaaaagacctgaggatgtgggccatatgtataattgggggggaaaaagtagtccaggagagtcctaataagttaaaatgccccaaagcaggaatattcttggcatgttgaaggaaccttaaaagggagatcagttaggcagaaaaggatcaagcgagcaggaaggtagttgacaataaatttagaggggtaactggcatctgattatattggccttttaggcctgtggactttagcttttaatctgaatgagatgggagttattggagggttttgaatggaggagtgacatgttttgtcttatctggctcctctgttacaatagactaaacagaagtagtgagaccattaggaaactgttgtcataattcagtcaagagatgactgtggctgggatcagaatgggagaggtgaatgtggtgaggagtggttggattctactatattttgggtacagagcacaacagattttataatggaataaatttaggtgtgagagaaagagtcaagaagactcaagaatttttagcctgagcaacggaaagatggggtcatcatttactgagatggggaaggctccaggagtaacatattttgggaggaagatgtggatatgttacatttgaaatgcctattatacatctaggagatgtgtggagtagatagctggatatatgaatcttaagttatggggagtagctcaagatacaaagttgggagttgtaacaatgatcagtgcaagttctctgtcttcaatgcaattttaaatgttgatgttccattcttaattgtctctcttctttctctctgcacattttgagtagctttgtctgttggcttcagttaacattaagactcctcagtgtcaacttccatcttacactcttctcctgatctccagaactgtactttctgccacctaacctacattaccacctggatatgctacaggctgcaaaatgtgtcaagtagaatgcattatcttgcccctaaaagaaagttaaattttctgtgttttcagtgtagtgtaattgtctaacttaattgtctctaaaactggaaacctaagaattaccttctacctttctcttgatctctctttcccaatctactgacacatgtattaaactggcttccaaattctgtgaattctacttcaaaaattgctctagaaacaattccctctctttatccctattgtcacctcatcctaaagcctcttcatcctttgtagatttctgggagattgtaaccaacttttctctattctgccagttatcaagtctttacgctcatttgacattcacaacagccttggatctgtcttccttgaaatgaatcttcttgcttccctttgattccagtgctttttttttaccctcctgagacttgatgcatgatatttacatgtatgacatgtttccaaaagcattctcaaatttttctgaaagtaaaaacaaatgaaaaagtaaaacattttcctgggaagaaaagcaaatagtgttatacatttttgcttgttcatttgtttgtttatttaggagagggacaagcattagaacttcataagagtcttatatgctgtatctacaaataccgtcccttggcaatataattttagagttccttttctggaactacttaaggactgttttatgatcctcagcagactgttatattattttatagccataccttttatttgctgagtaattgtactcaataattgtttgtaattgaatgaaacaattcatcagatgttgggcactgaatggctttggattatttccaaaaatttaaaggataaagatttgctgccttcaaagctatgtacaaaaatatgatagaatgctagcgggatatttgtttaaaatacaacctttattacattggggcctgctcataatatatatgtggcacattttatttaaaatattaaagttcctggtgggacatgtccccataatcccagcactttgggaggccgaggtgggggtgggaggatcactagaggccaagagtttgagaccagcctgggcaacatagtgagataccatttctacaaaacataaaaaaaaaaaaaaaaaagccaagtttgtagtcccagctacttgggaagctgaggcaagaggatttcttgaacctaggagttcagttcaaggctgcagtgagctatgatcatgccagtgtactccagcctgggtgacgtagtgagactccatctcttaaaattaaattaaatttaaagctacaaatgaccccaaagccaccagttcaaccctctcaattttgaataccctattttaaattcctcttatgcgaaatgtaccttgtagtccattttaaggactgagaggatttggtatgttaaaaaattcaatccattatcaactcctttaggtacacttagcagtatgaaaatgtgtctttcggctcttcaggagagagtcatatgtatagttacaagacaatcccatttttatattgctgagacccaaatcttcccaactgattatgaagcataagaactcttcggaggtttaagtgagctgagattgtgccactgcactacagcctgggcgacagagcaagactttgtctcaaaaaaaaaaaaaaattctctgcattctacagtagggtaatataacatctatgatgtgaaatcttggggctccgggccagagagtgtcatgatccatatggatctaaaaggttcatagtggtaacagcctgcttcattttatgtcatctcctttcaagtaattagaatgtttctagcttgcagggattgcacacaaagggagacatttggaaccatgtcattggtgatttactggtgtggaaaattacctggtgatgtagccaagtagccattttcattctaacccagtcctacagtcctgaactgggctgaaccaacgcaccaaaatatatgcttagaaatgctcctatgtatcagttttcccaggaaaaacaatagtattatcgaaaacttaccattgtttcctaataaaaaattataggataccaacagactgttttttgttcataaatttaatattacagtatcaaatattaaagcaaatgggagaaagtttttcttatttggtttaattgaaccattaatgttagctacaatacccatcatgttacttttcaattatatttatattttcattttatttctatctgtatcattctcagaaagacttctttaaaacattcaataaaaatagaatttaggtagatttatttttagaaagttgagtttttttaataaatgaatataatcatcacttgacttaatttttttctgcacaattctagaaatcttatagttttgggatcctttggctttattcagtatgtaacagggatctgtttcctttctctaaatcattaattcaaatgatttcttatattaaaaatgtttggacatataggtattaatgagttttatgaaatctaatctttccaatttccccctaaaaagggatgtcatttaatcagttctaggttgtgatcaatagcagatttttttttttttttttttttttttttttttttttttttttttttttgcagctccctttcaccccgtagggaaacctgatatcatccttgactaattgcagcaaagagcctggctcaggtcctttgtcttataccgagtgtttatagattcttgagcccagcagaatctgaactcctggctactgctacctacttcccagcccaggccccaaaagccctatgtctgcagccccgtgcaccactgtgtgtttttgtggcatttctgaaacacagagctacttaacttgtttctaagcccagattgtgcctttttgattttctattttggtattttatctaccatttttctgtgtttggatgtttcttctatattttgaaataacttctttcctttagtacaagtgattcttattgtagaaactatcaaaaatttacaaataaagaatcattctcaacattcttagcaattccttctatcatatttttgcaaatatatttttgcctatttttattttacttactccctgtttattaacagttaaaagcattttcagatagttttattttttcatttaaaaaaatcttaccacatttttattaggaaggaaatggacaggtgtttatcttttcaataaaaaacatgggggaaataatttcttgaagtacatagtgacattcttccagccaatgttttatgctgtggtcattccgtctgtcatcagtattcatagaaagagatgaaaattatttaaattaactaggaaatcaattccccattcaaagcagtagttgtgtgtttcaaatatcttctaatagtcagtttcacacttagctttatcaaattcctaattatgatactcattacatcactctgtgtccagtcagtgtgtttatgccacagagcaattaaagcaaatcaggtgaaccaaattcaatcacctttgtagataataacctacgttgcttaaacttatggccgctcatacaattactgatggattgcctttttcttttatattgccagtattttaaatgtcctagtgaagttggggtagctgttgaacttcaactttatcacaacctcttttttaaaatgtgtaaacgaaaaaaccctccatgaaatgaccaaatacagttttcatgctgggacaaattagatgaataataatcataaattcataatgattatttatgattttatgtttttatagtgagatatgttttgttgaaatgtgttatataagtgatacttaagtttcctattaaaatagaaatgctaaaatggcattgttctctttagctgtgagtctagcttttgacctctgcttaaacggaactgttgttccatcccaaatctgcaactctgaggcctatgctcccttcactgctgtctaatggatacctatcaatttggaaggaggtttcaggcagctattcccggtaatctaatctcagctctgtccttttcaatattttcatcagtggcttggatgaagacatagataacattcttatcaaatcaatgccacaaagcagggagaaatagcaaatatagcagacaagagtatcaggagccaaaaagttttcaacaagttggactggtaggctgaatactgaaagatgtaatgtaaatgcaaggtgctacatgtgggttcaaaagaaacatgaaacaaaaaacccatctaacttagactgggctccctggaaatagactaagatagagagttgtgtgcataaggtttgttgaggagtgttcccatgagatacatgtgtaaggttgtaagataggcaagattgcacagacgaagaagtgcagtgaagcctgcagtgcgttgcggcctcatcagattttcaggggagttctggaaattgcatggccctttagagacacgctgaattgaagcaagggatctggacctttgaacccaatactagagagttaatggtcctgggtcaccccatgggaaagagcagactggagtaagattgttacctacagctgaaggcaatttccagggagggaggcagctgtgagctgttagtagtcaatattccaaccagctagggcatgaggtcttggcagagcaacagtgtacccaagaccgcagtgttacccaaagtatggtcctctgactggcagcattggtatcacctatgagctcactagaaatttaaatttgtaggtcctaccccatccaactaaatcagaatctctggggatgggacttggggaacttttaacaagctttcaggcctccaagttatttctatgcatattaaaatttgagaaccactgcctacaccaaccaaaaacattccaaatatggagataacatagagtttttagcaacaataatctccttctgtttcacttctctctttacacacacacacacacacacacacacacaacacacaacacacaatgtgatagaacagtgggaaaggaaagccaaaggggatcttaggccgaataaatttaagcatataacctagtcctaagaacgtatatttcagcttaatagagagaggaatattgttataaagctgtccaaagatggaacaggctgccttgtaaagttgtagaagtattcaggaacaggttggtgataccttggtggttgtatggtataacatcctgatcttcacatactcatcatctagagtgggagttttctttttccaaatggggttttggcagaactagttccactgtatcttaataagtaataactcaagaaagggttctatggatgaaaaaatgattaggtaatatcaagttaaatcaaagcgaacagacttctttcccataggagtaatcagacccttattacagtgcatgcttggtgaatcaacaaagtatgtgtatttatgaaagtatggggggaagggataatctatacagtatgcatcccttctaaaagtttgaccatgaaaacaatttctcaagaatcttatacaacactacagtatctggtccaatactatgcatagaacatgcactcagtaagtgtttgtaagatagatagcatagcatataggccaggccactgaagggaaatcatctcaccgtgagttacctgaatagtattctctagtgccattagctcaattcttcacgtaggcataagcctatacatttgccatgctaaccaagggaatttgtgttacgtgaattttgactctattcagacatttttttctatgactcctccaaggctgttattcttacctcatattctggtagaagtttaaggacttttttctgggaatattgattaattagctagctagctagagacagagagaggatagagattgattctctggcagagcctatttgaatcatattgaatctttttttttcctgagacttcccacaaggaggatggaggagaaattttttagaaatccaccgaagtaatcagggatatcttcagtaaaagaagctatacttaataaagtctctattttagcagatggcaatcaacaatagaggcaatagacaatagagtctattaaaattgctgggatctgctaataacgtttttcttttccctgaaacaaatgccattaaccctccttgacactctgtcttcatcaacattctaatagaatggaagtaactcataattttgaggatttttttcccacacaaaacctataaaccacaccacgctagtgattacttttagcctagttgctaggttgctgctggtaacagtaaaacttatcctgacaggtaggcaattccagaagcccagccaagcacttggtgtgtgtgagtaaacccccatacacttctcatgtagagtaaccctggccaacccataactcttagcaactattcctggtggacggacctggtctactctaagaagaggccaaggttctttaatagtgcagttgcaagaaccagaattgaaagtcaaagttctagcaagattttgcagactccttggcaaaccagtggcttgggactcattcttgacttcaagcccttaattgataatggtaggacagcttgcttgcgctgggttctgctccctgggatatgcactgtttgccaaatgagtagcaggtggacagacatctttacaatttgctgtcccatattctaaatgaacgtgacattctataggtctgagttaacctatgaagtcaccaatttcaatatcaaaatatttatgacagagaaaaggatactgaggcacagagagtctgtgactttcctaagctcaaaacaccagtttgtgttaattctgacacagaaattcttgtatttgctatcagtctcctttttctgtgtgtgtgtgtgtttttacattgcagcatcacctatatgatgttaggttctgtaactttttgagaattttctcacatacagtgatgtgttactttttgatatttcaaatagttctagtaagtcttttctacttttattagcgtattaacatactggctctaagagggcatctcaccacatctttgccattcttcctggaaaggcaagtttctctccatcttcttttttgtattccaaagttttgccaaagtttgcttttgaaaatgggttacctggcagagctttattattctaactttgaaagtacaagtcagaatcagacagtggcagttatatatgcactactgtgattactatataatgaaagtatctatggtgaaaatactgatactgacatatatttgccattttctaattaagtgcttcagtaaaaattaagcactcactctttgccagatactgcaatagatattgagcacattgaacaaaattctccatatacatatatatgagtccacattctatgaaagtataatgtttttctgagaaaaggcataatattctattaatatcagcttttgcttcttccaccatatattgaaagaattctgaatactgttataatttaatgggagaatctagagaattctgtatttgctttcactgcattgatgaactaagatttttaaaaaatgtattcttcatagaactacttttccatatttacctaatattattcttatatcatttgagcacatatttcactaacaaaacaaatgtgcaatgttattagttctaacatcaaaattacactgatactttaatttttatcctattatttttcatgcagattaaaataattatagctacatcacatgttgcaagttttaagagctactttaaaaatatatgcttcaggaaagacatgattagatggggaaatggatgatgttcatattttcaaatgaaaagttttaaaaaagtgcctatcacaaacactaaatttttacataaattatcaactactaatatatctacaagaaataccatttttccctacaaaaactcttaacaataattgttaaacttagtcctggaacctgctaatataatcggacaaatgttgtcaataagaaggtgaaaaagaaagcatatatagtttatcaaactataaaatatagtttatcaaaaccaatttttcctattgacatttattcaggaaggaaaatggatgagtgaaatgaacaatggtctctaagagaggtgggagatagcaataaattcagaccacgtttcctgtcattacagcagggaagtaaaagagctacagtcaactctcgaaagtacttgggggaactaatgattccctgtagacctgtgatgtttttgaaatttaattcaacaatttgatatacaccgcaaagcgaacagatagtcagatcaaaatcggaagaacgattgtctgaatggcatccatttttcctagatgtgctgtcccatcctgtgtcaattaaactttcaggtgatcttcaaacatatttccaagtaaaaggtattgcagttatcctataaactggcctcttccccagcactgcttttgctgtggtcaactttatttctttgggctcacaaaactgatagagcaaaataaggaaaacggaacattggattaaaataaattaattcccattctgtgactcactaaaaaaaaaatgataactatgcttctgtgagcattaataaggaaatgaataaggaaatgaccaaattgttcagtggacaacttgtatgggatttttaagtattgtgtcatcatcaatgttgtcaattagcatatactttgaaatcaactaaagcaaatcagttgactaatcattaagggtctttttaaatgacaacatctaaacagcaaatgttttattttggaaaatcatgacagcacaagaatgagccagatgttttacaacatgatatccataatttaaagtatgtagtagtcactcaaaggatttctatttcagtttccttatgatttggctaagctagaatttggaaaaacactttaaggtaatgtgagaaacagcaaaattcaacatgtggattttttcactaaagcttatttctgattattttttacaaactttactaggtatatgttaacttcatgacacttatagcagtggaccgtagttttaataaaatgtgaatgtatactcttttctcaataatattaaagaatgttgactttcgtgaggatatttttatttttctcaacattaagaactgtcaaagatttaattctacaacagaagacgtgaattttgttttctaaaggagaacagaatctatagaagaagtgttgctcatagtactcagattgttgaccaatcttaaaggagaaaccgtcaattaatttaccgagaagtaataacattatctttttcttcaattatgcacatccacaaagatttggggcaaaatccacttaaatgatattatacataatagatgagtattcatatgttgtaagagtcctggcttctttcctgcaaaatgattaaaacttggatcagaaaccaattaaaaatccattctaattcccaaatgtatgtaactgtactataagaaaaataaatatttcttcttgagggatatccattagttaaggatattcataacatggtgtcttgtaggaaatgttaatctttgggtgaatagggatgtttgggaataacaagactcaaagagatgttgcacttactcacttttctctgagttgttatttctgtcatttccccagtgcgcctgtcctcaactttgcctctctccttattcctttttttttttttttttttttgagacggagtctcgctctcttgcccaggctgtagtgcagtggtgcgatcttggctcactgcaacctctccctcctgggttcaagcaattctctgtctcagcctcccgagtggctgggattacaggcacccaccaccacgccctgctaattttttttgtatttttagtagagacagggtttcaccatcttggccaggctggtcttgaactcctgacctcgtgatccacccaccttggcctcccaaagtgctgggattacaggcgtgagccaccatggccgatccctccttatttctttttatctctacctctgcctcaatggtatttctctattactgttagcatttgctttctgtgagctcttgcacactgtcagcttatatacatgttcctgttcacatgttttcctgtccccagtggttacaacatgtcttctatctcagcccactctagaattgtcttacttttccaggtctcctgctcctcagtatttttcccacttttctagattcatgttttcccatctgcatatttctcttccatgtctgcactgtcatccgcttagaagacagcgcataaggacactgttatctgagcaaatcttcagcacagccaccatgaagcatggttaccttgtcactttccatttttcccatagtgtgtgcaaactgccctgatctgcatagaaaggtatcataattgaggaaacaaaatgcacaaaaatgtccttggttattccacccctcagaaatataggagagaagtaatttacagaattacacagaataacgctatgtcacatggacatggagttatcgggttagcatataattggaaaatatttcctaggaccttgacatttactcactttttgttttcaaattacatgtccctatctattagttgcaaattattttaatgcaccgtttaccaaagaaaggctgtttcttctgaaagctttcatttgacaagtaacttgtaaaaatattcacattgtgtatctgttttccccttctagtccaaactctagttatcttaaactttgcgcagttataaaaaatcataacaaaaaaagcttcctcgttgtcattcttgtcaaaacaggtttaccagacttaggtaaacttaaaatagttagtgtaaaagttaaaaagctgatttgctccttccagcgtgtttgttgcctttttgccacagcaaaattgtaaatgtaaacgtattccctaggagatgagctgggctgcaattttcagctaattgggagaagcagccctgagttgagcactgtcaggctgatttgagtcttaagatatgatgatgattattgtgtcaaatgtaatcaagaacgtgggctctgaactgactcaagggctggctgtttttaattcaggttcgtatatgaagtagacctccggttcaccgatagtcacagctggttgtagaagagagcaatttttaaaatgctatttcattctctatggagctctagggatcagagattggatgcacagggaggggacacatcctcattctctcctgaaaaattctattaattttcagtataataaactttctcttgagattccccagtggctctgtatcggtggttttcaaacttctcagacccaatgccacccctcttttcttttttaaataacaaatactttgtaataccttctttacgattataagccaaaatatgtagacaacataccctacttatacaggcaatagtttaaatgatgccgtaactctattttaaagagaaataagagtcatttataataaaataatatgtgttgtagtatgcagttattcaggcaggatcacactggaacacaagtgaagtttttagatcacgagactatcaatgcagtataaacaaatgcagaatgacaccattgtgttgtatggagactcaaataccatgaggggcattggtcatccatagcgtaattttccaaaatgctgaacaactcttggcaaaattcctaacaccatgaaataaattttttcttggatcgttatggcagttagttgcatggctgaaaaattcaatgtcttaaaatcatgaggaaaatatcttatgtttacgtgtaaaattgagttacgttccaggtttaggtgtttataaacagggtttccacatacatgcatgtccagtgggatattccaaagtgctgtcagacttgggagagttctttgttgtataagaagtctaccatcttcattccctctccacagaatgctattatagtaacactcttcaatcactgtgatagtcaaatgtcctccctcaatttctaggatgcctcttttttttgtggtctgtataatttggttaaatatctttccagacaaatactgatttgtgaattaatgaaatagcagtattttcggagcacctaacctatttctgagtgatacagttgccatttttacaagactaaatgaaattaccatttcagacctgccagattgtctagcccagtcttttacaattctgtgattatcactgcaattataatctattttcaccacttgaatggcatgatctctataaaagggtggtgataacactcatctattctccttcccctcacatagctatatcaatcgccccctaaccagttgttgataaatgcagttgaattttatgtaaaaattataagagatattattgtagctgtccaagacatttaaaatgctaaatgcaacttacgtggaggctataagagaaatatgaacccatttattgaagagattagctaatttagtaaaacaacacagatatacctgcatacagggataaatccctattgtctaaattattgagataaaataatgttttacaatgaaaaacttttagacaagtaggtaagtaaaatgcagcagtctatttgcatttcatctgggcatttgacaaagtctttcgttatactcttgtgaataagttggagaaatactggctagatgcaagataaattggatggcttagaagccacttcatgattttacgcaaaggatgtcgattaatagaccagtgtcaggtggtgatggaagatctctggtgctatgtcacaagcttctgttctcaaccctgacacactggatgtttttgacagaacatgagtagaactacagagaggaggcccatcaaacttatgggtgataaaaagcagggagggcaggagtattttgggtgacagaagccaaatgggtgtctggacaggatgcgttttaaggcacttttggtacttgatgtctgaagaccaggatcaaacttataggcaatctgaacatttgccaaaataacaggttaattttgacagaagttattatttgtatgctgtctatttctttaatacacctagaaagtattgaaataacattttttgcagacactcattttgaaaattcagaaaaaaaattgttaactttcgtggaagagtaacagaaactcagtcattgacagctaaatacaatgtgttgcccagtaaaatagtccaccccttcactttcatggctaatataaaatttgatgaaagatacaaattccaaagattgaatatctgtacatttgcaaagcaaaacacaattttgggcacagaattgctcattctcatttttaaacatcttggttataactgaacaatagttttttataacaaagataatattttcaaattattatgaggttcaactgaaataatttatgtgaaagcaatgtctaaactctaaaattctatataaatataaattattattcaataaattcacatcaagaaaattttaagttttttaagaacaagagcctatggccttgtttttagaagctgtataccttatcggtagtaggtttattgactttaattaaatttattgagtatctattaaattgccaggaactgtggtgtgaatctttgccctcaaataatttacagtaagttgtggttgatgaatggtgatgacgatgatgaatatccagactatagtaagtggtatattcataagtcagaggattcttaaaaccagatgcaccctcagattcattcctttcatgttgtacttctaattgaaaaaaataaatcctaaattatgactgttctttataaattttaattgatcttataaaaggccatcaatacatttcaaagtatctaggtcttttaaatgcaatttttcaccctggtaattaaaagtacgaaagcaagaaactttaaatctttattttgataagttttaattagctcaagctacttgtaatcccacatcttgtcttgtaaatcatatctgagccattaaaataggtttacaattagaagggcaattcttttagaatctacttaaactaagtcacttcgacaaattaattcatcgttcagttggttttattaaaatgtatttatttcactgtaaaatgtctagtaaagcaatgtatgaagtattttattttcatgttagaaattttatgtaaaagatatcccaaaatacatagacattcagatactctctgtatcattaaccaacatttactaacttatcatttagagaaggccaaaattgtatgtactataactttgtataatttcataagaattaaaatattcgattaatgcctgtaatgccttctttctaaatcaaatcctcaagcttacctcgagttcaaagttcagtatttattgtaacacatctcatagatgacggatgaagatggtaagcaaaggaataataatttcttttctcttttcacacatatatacacacataccccataatcctaattcatataataataacagaaaacaaagggcttttgagaatagtgacatattaatatccattatatttacttcacagggagactggcaagtctaccttgagaggtaatgtcttatagtacagtggactagattgtttcaagatttgtcatttattttggcaactcacccagcttccctgaaagttaagttcctcatctataaactgttcatgataattacaacctgcctcattagcctcatcaagctatttaaaatatgaaaggaggtgctatctgtggatcctgtcaaaggagcttgaaaactgcagaacattattttagtgtaaaatactataacaatacatgttgaatataaaatggctttttcttaacttttattttaagttcaggagcacgtgtgcaggtttgttatataggtaaactcatgtcatgggggtttgttgtaccgattattttgttacccaggtattaagcgtagtacacattagatatttttcttgatcctctccctcctcccaccctccccactccagtaggcttccacgtctgttgttcctctctgtgtccatgtgttctcatcatttagctcccactaataagtgagaacatgcagtatttggttttctgttcctgcattagtttgctaaggacaatggcctgcagctccatccatgatctctgaagaatctccacactggttttcacaatgactgaaataacatacactataaccaacagtttataagcaatgctttttctccagaacctgttatttttgactatttagtgatagccattctgactggtatgtgatggtatctccttgtggttttgatttgcatttctccaatgatcagtgatgttgagctttttttcatatgcttgttggtcgcatgtatgttttcttttaaaaagtgtctgttcatgtgctttgctaaaagggccctttcaaatgtgtattattaaccacaagagagtactgagtaagagactaggtaataaaagtcacaaatatttcgatatcataattcagaatttagatcagcggttatgaaattgttcgtatttccaaattccactgacaggactctactataagtttatttcatctgttgatatgtttttagccacttctttcttttaaagtgaatctgttgtgtgtttgccatttgatattagaaaactgaacctgcctgctttgctgtcttctgaatattatgtatcaacaactaacaagctacagttagttgttttgttctgtttttctctaagttattgtggatgaggatatatataactgcacagtcttatcaggtttgtaagagatgatcttaggctcatcttttaaattggtttttatactattttaaacaaatccttttaggagagaagaaaagctgcttagtctatcaacattaggaaatatatctttaaagagtttatcactgcaagtaaccaaagccaacttaaaaattcgcattatacaaatcattgagaatttatttagaacagaaatgtgtccaactataggtcaacaccaattttaagtgtgtaattatctgggaagtagtgttaactgcatttttttctaaagatcccttacagttgtataaatgcccaaaaggatattttgagtctctgtatattaaccaaaccaaatgtaattcattactcccaacattatatttcaacctctccaaatagtaccttttcgtattgtatcagcagaaaaatataaaatgcagatcttaaagagtatcaatctctttaaaaattcaagaaagaaaaaaatatgtgtgtatagagacgtgtatttcatctgctcataacactgtgtacatttctttatcaactaatttttttcagtgatttatgagttgaaatacaaatcaaatgaaacgggtaatgcaaagtaaagtagaaaacacattttctactgctgtctcctaatgcaggtcttttcaggaaagtactaatggttttagggaaagtgtataattatggttgtttccctaatgataaattcgcaaatctctattttaaaaacattcataaggttaaaaaaatgagagatgaaatgtgtctttcaaaattccttacgtgattgataatgcctatactctcttactatctaaagtctaggtgatatgtatattttttttaaaaaataaaatgtctgtatcagtgaaggaagtttacacagatagcttcaaagctgtggtttatctttggaggattaatctatttctcatgccagtgtgttgctactgcacatgttaaaaagtcatcctgtggtgtctggggtgacaaaagatgggaatgagttttctgagaactaatcagcaatactttgggaacatttaggtcatggtttccaattaactctggagagtttgagtaatttagtaccagacctcaagagagaggggatgaaaacctcgttaattcatatgttggtgaacggcaaaccagcaaatttgcattaaaaatggatttttattttaaagcaaagagcagccagatcttttctgcaatagtttgggtaggagaatatctttgtatgtatgtgttcccttatgtgtaggtatttgtatgtttcaacgaccctgcatatggcaataacagaaaattaaatttgtgctctaaaatgaagaccaggattcagtgacataatcttccttgtgcctttctttcttttagtacaatgaatatatcagagaggagtgtattccaatatctgtcttcagagttacaaaaacttcttttctagaatgcaagacttgggctatacccccagctctgccacttaacttgtatacaaccttgggaacatcattacaattctctcagaatcaatctctccagccctaaaatgaaaccagcaaaagcctgtactgtatatctaaaaggttttttatttttatgaaaattagttaggcaaacttttgttaagcatccatcactctattttgagataaagccttgctggatgatctccacctcttttgatggaaagagtaaaacatgtttaagatacatttatcacttgtttggcaaattgagatagaagtttatgaaagcagattgatatatgttacatttgagctactgggaaggactccagatggtttatagccttaattacattgtaactctagttaaatgtttacctatctgtaccctctgttaaacttgaatatgttaaataccaaagtccatgtattattggattttctgtcaccatcatcaggcacagatcctggtacacaataggtacggaatggatgcatggatgaattattgaattagatgttggtaggcatgtggaaataagaatgaggttcagaattaaagataatctgtatcgagtgtaaagccattggcagagaatgaaatatccagctgagtatacatagaaaaagaaggtaggtagaaaaatggaaaatatcttatgaagtgatgatagaataactctgaatatgtttgaaaacatataaagagttatgtggatgttagctttaaaaattatcttccatgctgtacattagatctgccattcttcatgctgtggatgaaaagcaagcatcagaagttaaattaaaatgatgtcatatattcctcgccttacagtttcataacagaggagaaaagagaaacattctctcattgccaccacccttctccagtcatatttctaggtagatgttgcccaaaaacagataaaaccacagagttggttttgctaggaatggactactaatccaggcaatgttgacagcttttgcttctcattagtgcacgttactaatagaattgctagagattaaaaggaatcctttctacaaagtgctgtatatccataggtgacaaaattctagcttcccctcacaagtacaatataaagttatgttttaaaatcaaaatgcaatttactagcaaactagtaggaactgttatggttacaggaaatttgaatttcagattaactctggttctatgagtagcggttgatatggcaagaatcattttgatcttacatccaggtgctactaaggtctctctgacctatatctcaccaaaaaaaggaacaaaataatgatcctttaatctttctcctaaaatatcataggaaatgatagtggctaaattgcaaataaactaggaaggaaagattcagagtattttatgtgattactctataacaatgccaggccatagtgaaagtgttatttagcagaagactgagttctttgaatgttcctaatttatcacattttaaaaataacctgggcaaaataacctttcatatcagattgagcctttttctaaaaatactcaatatgtttctgtaattatacctacacacttacaattccacagtataatgcaccgataaagtatttttcatccatatatctaatagtagaatggtgtgtatacaataattaagctctttaggcttaccccggaaagcaacaagtttcccttcctttttcctttttatgtattatgttggccataagaaattgatgatattcaactcaatgcagtcttagagatttattcagaaataccatggtgtgtgtgtgtggcgggagtagggttctaatgacaggtcagaacttacttatttgatttcttcattgataatcaggtcttaaaaagaaaatgggtatgctgaaaacatgccttctgtgattctttaccttcatgtgcagttgtctctggataaacactttctttggcacgtatagggttgcactaagctttatagctccaacactccgccccttcagtagattcttgcttgtaactgatgataatgcaaacctgtattatctataggtctccttaaagggcaaccaaaagttcagtagcaattcaggcacaattactgcatgtgagaatcctccatcttgttccctttggagaccacatatatttcttaggcaagtatatttttaaaatccttgttcagcatgacaattcaggaggtcaagttctcccagaaagcagattctgagaaagtgattagcatgaaggaattttattggagagtgctctcaggattaacacctgtgagcggaggaaaggaaagggagcaggattgggcagaaggagaagctgggctaccatacagtcacaactacaacacaatcaaccctccgcctctccttcctagccttccccaggaggatctctgaagtctgaaggtagaatagcccttcagaattgtcctgagttgcagcaagggacccaggattttataccccacaactctcccatcaaccaatacgtgcagcccgtctcggggacatagtgggtaactttgggctaggcacctctctttagctgagtccagctctcagacaggaataacagctgaggactgtcagccagtagcactaccagcagctggggtcagaagtatttcagtcctgaaaaggggtccgggcagcccagcttagcatctactatgccagtcgttctcaaatctggttcctggcaactgtgattctcaagctttagcatatattggaaggcttgttaaaacacagcttgccggattttacccacagagtctctgattcagtagagctaggctgaggcctgggaatttgcatttctaataacttctcagacgttgctggtgctgctggtccatggactatgagaacactgtttcatgctgcccttatttacatactgagaatggtacacagtgctcttatgaatagaatgaaaaccttttgaaatcacattattccttactccatcaaattctcagctatttttgtgcaccataaagctggaatagctgattataaaactttgttatgtaaaaaagtacttaaccaatacagtagattctgtttgcaaagcattattacagtttctaatatctggtcattgttacttgtaaaattcagccaaattttctccagggcctgtagtttgataacttggacaaaggaatttaaaaaaaaatctaattcaagacctttggttttttttctgaacatatcttttttttctttatgattcttatttttacattttacttatcatataagccacttaaacccatatggttccggaaaatttaaaactatatgatacatttagagcatgttgaatgcacagatatggaaattaagtattcttgactcattctagactagacctggcacaattaaaatttagggattcaacgtacacacacatagattccgagagaaatgttgaagccgtaaaacccccacacaagcaggaaacaacagtcttacctattattcaagaggcacgtaaaggagctcatttgaggagattttctgctgttattgccatcgaatttttaacgtattttccaaattagaaaatattcagcctgatgttgtcaatatttcagaccacaagggtatcatttaggaaaatggtttcttactgtcctgaaagagttactgttcttccctaagggcctaatttacaaagcagcaaacttgctggtaggatttggctgaaaatcacattgtctcggtagaactctttcatctgatttatgtgcattgcattttgcaaataactcttggaaagttatttactagttactttctctggaagcagagggtaagcggcatttctagtttaaggatagaggagctaagatgcatcaagcgcagctcatcatgaagctgatgctgataaaatgcacaatattacattctctaagtttcactctgccatgggagaatttcatatttttaaattttgtttgaaattggactacattagaaaatatgtcaaatgtctaaccctgcatttatattctggaatgtgacagcttatttctgttccaaattttgcactggagatggagtaagtcttaatgcaaactgcatgaaactgccacttttataggtcacacccagtcaattgtcagcagttacacatggttcaaactgtaaggtgtatgcccaattgtagcattgagattcgtggagttgttgcagtggttctgaatttttcaagcatgatacataaaaagataaatgactcttttgatatttctccttgcattgatagtttgcctgaaaactagataagcagggagccggcagtccacgttagcccttgaactacatgaggtttaatttatttgcccaaccagaaccctacactacctttcagctgtgcagtattaaagtttatttaggagttgataaatagcttagtgcaatgcttccttttttccagtagctacatcctcataaacctattctaccctccaccagttaatgcagacagaagatttttatccagtatgagcactgaaactccactgtggaagactgtgtgctcagcaaaaacctcacccatgatgaataaacagctcttccgggggctttgctgccgctggctcggcaggagttgtttattgcctggtttgcacatcccatgataaagttgctgctgaaataaattgcagttttgcataattattgacaatcacatcttaacaagcaatgtgtatcatattcaagtgttcaattttttaaaatccatttttagcttatgtttaatcccagaaagtgtttgtgtagtaatagaaggcaaataagacatttaaatagagtactaatttcctcattgcagacaaagtttacctgaatctttttccataggactgttactgcctaaggcaattttcctttctaagctattattatatagatatttgctgagggcatatgtgtgtgtatccacaatacatgcattttatatatatatatatatatatatatatgatcaaaaatatgaatacatttttagagtttttgtcatgaaagagtttgtttcatctttttaaaatattacaggaatggggaaatgggatatgggtagaaggaactaatgtttttgagtaactgtaatgtataactgtataacgtggggcactcaacttcacaggaattttttattttaattctcatcacagcaatagatattgcagatgagaaactgagaatcagagagggaacttgccatatcacgtaagtggtaaagaacactgggaattgaactcagatctgcctagtttttaaaactctactctttttcattacacataacatttttattttggaaaatgttctcagttgtatgatcaagtagttaaatatgaaactaacacaataattataactgatgtcatgcaaaatgatagtttgcacaaaatgatagtttctatgaaatgttatttctttacttgttaagtctttcttcctttgccctccaatccccttctttttgtcttttcctctagtcttttccttttgattctaggtttgtattttcttgacttttctccttgcatatcaaatccttgttttctgcctcagagcagcatcaaagacaagcatggtacagggattttagggttttaactataaaggtttgtctcaaatttggcagtatattaaaaataagctttcaaaattgaccaacaaaaactacaaaattgaaaaaaaggtactttgaactttcacatgttcaaatatatgtatatatatttcacatatatatatgaaacctcctctgtggagaggggtttatagaaatctgtaattgtcattcttgcatgccttcccccatacaaacgcctttaagttaaataaaaatgaaagtaaatagactgcacaatattatagttgttgcttaaaggaagagctgtagcaacaactcaccccattgttggtatattacaatttagttcctccatctttctctttttatggagttcactaggtgcaccattctgatatttaataattgcatctgaacatttggtcctttgcagggtgagtgagcgagaggctgctttggaagaaactcatagattactgcaacagttccccctggacctggaaaagtttcttgcctggcttacagaagctgaaacaactgccaatgtcctacaggatgctacccgtaaggaaaggctcctagaagactccaagggagtaaaagagctgatgaaacaatggcaagtaagtcaggcatttccgctttagcactcttgtggatccaattgaacaattctcagcatttgtacttgtaactgacaagccagggacaaaacaaaatagttgcttttatacagcctgatgtatttcggtatttggacaaggaggagagaggcagagggagaaggaaacatcatttataattccacttaacaccctcgtcttagaaaaagtacatgctctgaccaggaaaacatttgcatataaaaccagagcttcggtcaaggagaaactttgctcagagaaataacttagggattggtttattaaattttaaaagttgacatttttgagtgtttatttaatattttacagggaaagcatctgtatgaattgtctgttttatttagcgttgctaactgaatcagtttcccttcattactttcaaatatgttttgaaatgttaatctggcattttgtagctttcttcctaacatgatctgtgaaaataagaatgagatggctgaatttgtcgtagttaatgatcaaacaattttcagacaattgtttttcctagaaacaaaaattatttccataaagttccatatgcataaacagtgaaaacagaacgtggggtagttttgtttaaatgaagtcttggtgagaatcatattctgtagtacaaggaggctcttaaagtttattctcaatacctgatataattttcctgaactattatggagttttgttatgtatagttggtttttctgacttgatataataactttactagtctctcaaatacaatttggatataaatcattataataagatgattgattttttagactaactttattttttgatatttttaaactattatgaaaaactattatgaaactattatgatatttttaaactattatgaaaagtatattctagtttgaataattccagaatcaaatcataataagcagaagttcttctcctctccctcctatcgttctccttctcctgtttttcttttttgatatgatagttgatctactttgctgctctgttgcatagagtacgtaacagtggcaatgtatggctcctgaatttatcgttcttgcttcatcatcctgctttgaccccactttctcctccaaaatgcgtgttgagttagtttgatcatttggaggtaatttgtttggaacagtatcagactttatagatatctcccatggcttgtgatagaatataagggcaatgcaaatgtagagttttttgctcactcttcgatgtatggttagacaatgtaccactgtaatatatttggcttaggctatttcataaataaaattttattataaaatattataaatgctgataaagctactccagaattttaatagatatgtgggtttcccggccagatgcggtggctcatgcctgtaaccccagcactttgggaggccgaggtgggtggatcacctgaagtcaggagttcgagaccagcctggccaacatggcgaaaccccatctctactaaaaatacaaaaattagctgggtatggtgacctgcgcctgtaatcctagctacttgggaggctgaggtgggagaatcgcttgaacccaggaggcagaggttgcagtgagccgaggtggcgccactgcactccagcctgggtgacaaagtgagacttcatctcaaaacaaataaataaataaataaaaatacatgggtttacattttacccatcagctatggtaggtaaataataagctttgattaagtctattttagtctatttttagcagattactttgaaaaataaagaataacccaatgactaaaaaattattttatgtcagggatttaataaaacatatctttaaatctagttgagggcaaaaatacgtctattttctactatacaatttgtatttatatctgctgtattatataatgaaaatttatctctatttctaatctcaagaaactgcaagcttctgaatcattaaagggaagattcaccatgtgtcctaactatatttactatggaagcatggaaaataaatattttatgtttagatttctgatctctctttcaaaagcagttggaaattatgctgagaaaatgtcttagcttatcccatgttactcaagaaaatgtatttattcgtttttgtccagtggcttaaccaaaccacagtttatttgttgctcacataaagtccagtgtcgatcaggctactcttttccatctttgagctaaggcacatattacacataactttcagtgtacccgaggtagaaaaagagagagcttgggaataaggcaggggctttttactgtctcaaccccaaagtgataaactacatttattctcaaaatccagataaaactcccatagagcctctgaaaacctcaacatttgcgtcttaactataataaggttaactaagattccaaaattattttaaaacagagacagtttccctcttccctggcagctaatattgtattttctataaatccacttgcccaaggtttaaactacattttatggattgaaatgacatttatagccaactcctgatttttagttagatggttggataatgatcttttgatgaaagactcggagatgtcatggtaaaacggtgaactactgaaactattgattattgttaatggcacatttcagctgattgaattgagtcaagaaactggtgttgaagagcaacaaatggaaatgccgagcttgaaaataaataaagcagcataccttaagagattacatgcaatttcagtatttcagctaaatggaagtgtttgctttttttcctctatgaatttttattttgaacaaaaggaattttctataatatgtaggtaggagaaaagtgaaatggcatgctttttcacttcatttgaagaagctggtagcattgtattcatagattcatgctgtatagcaatcatagttctcatatattaaaaaaaaaggaaatttgaaatgcctagccaaagcaacagctctgccaacagattttgatatatctgtctaccccaaaagtagtgatgatttacttcatacaaatgctagtgaatgaagagagagggtgaaaaccttcacaaaatgtgtttttctctaagactgtcaatccgtttttctatatatggagactccagctcttgctagactacctatcactttcgtctatcagccacttcgtaagatatttattctctcagcaataatcataattcatagattctttaaacatacatgtaatataaagcatatacattctgaatggaattaacatgattaattcttctctgaaagacattagaatttcctcccgtattataaaaaggtgtaactcactttccttactaaaatcaagaactttaccgtcgtccttgtacttcaggataagggggtgtttcttataaatattgttatttctgatatgctaactggaatttttaagcaaatgtatttttatagaacgccatacaaagcctttaggggtgaaagtttcaggatttttaaattgcagatttatcctttaaataaaaaaactatattcgtaattgaatcggattatttctctatccaaaacattttctgctttgggcctaagaagagttgacaaagctgttcatggttcaaagtactaccataaaaccctgggtaactaactgaaaatggaaagactctgtctttctgaatatttcacaagagtttcacaaatattaagtggttctctaagtacccctgagagatcattgtaatattagcttgtaaagacaatgtgggggtgtgggtatgtggtgacctttatgatgttcataaaggtggtgtaattaacatatttttctcagcaagacaaactaaggagcaataaatatatgagataccttcatctgtgatctgggtcatgtctcaggccatatctttcaaatcactcccttccctaatctcgtgttttacctacgtctcctctcaatccccccattataaaaattgtcttctgatgaataaaacatttccagagagacaagtttcataaagtttgaattgtacatctgagtacacctatgaattaagatatctttgatttctaatatgttattaaaattgggtgtggtggctcacgcctgtaatcccagcactttgggaggcagaggcgggcggatcacgaggtcaagagatcgagaccatcctggccacaaggtgaaacccccgtctctactaaaaatacaaaaattagccgggtgtggtggagtacgcctgtagtcccagctactcaggaggctgaggcaggagaattgcttgaacccaggaggtggaggttgcagtgagccgagatggcgccactgcactccagcctggtgaaagagcagactctgtctcaaaaaaataaattaaaataaaataaaataaaattggagaagtttctcaccaaaattttggcgcacggattaattctgaagaaagaagaaagaatgcaatcttagtagcacaattagtaccttgaataaattggagtatcgtatttcttggactatctgagaatgcagaggcaatttaaggatccctaattctaaggagaagaaacctttagtgtattccttcctgttgctttagtttgaattgagttttatatgtattttttaatctttctattttgattgttgtctaaagagtgtgaaagtgaattttgatatttttattttgcctggcgatgaatgccttctgctctggatatttaaaaattatatacacatatatgtgtgtgtgtgtgtgtgtgtgtgtgtgtatatatatatatatatatatatatatatataaaatttttctgagaacttttattaattcagcgtatctttgctaaacacctgccatgtgtcgtggtgttaggtctggtgatacaaacatgttcagagagatgattttctttcttttttggggggtgggtaagggaaagaaggcttatacaacagaatcttatttctcacagttctggaggctgggattccaagatcagggcctggtgagggcccctcttcctggtttgcagatggcttccttctctctgtgtcctaacatagcaaagagagacagagctctgatgacacttcctcttgttataagggaactaattccatcataagggccccaagaaaggtgcttttcaaaaacagttcagtaaaagtactgggttgtataatcactttaatgagtatcaatccatatttttaagatagaaatgaatgaaattagtaaaatagaatagaaataaggagtccatcacttttaagtaagtttcaatattgttcgtaaaactttggttcggtggtttgtgtgtgtgtgtatttgtgtgtgtgtgtgtgtgtgtctgtcggtgtggaaatactggatcactttgtaacatatattcaaaagcctctgtattttaacattatttctgcctttgagaggttcacattccagaggtgaagacatacatcctaagacaaaattataatagcattatgagaattacagtagagagctggacagggtctagcaaaaacagaagactaggctaaaccttccaaagaggccaggaaactcacctagaacggtggattttaaccttgcttatgcactgggggagattttaaaaatatctctgcccacaatagataccaactgaattgagcatagcatgtcctacccatgaatctattgtccagtgagaacctctgtttagagaaagtcaccttagaagaattgttaggagttatttaggttcatggggttgaaaagagcattcgtgatagaggaaacaccatatccaaaggcttagtcagtgtggtagtgtgagaatctgaaggaacttggctggggtatggttgctacaagaaatgaaattagatcaactggggctaaattatgtggaaagacagcatgatgtagcagctagagtatggaccttgtaagcaggaagaccccttatttagcacttactagcttattgtctgacctctgagtcccaattttactcttctatacaatgagtacatcacaggattttatcaggtttaaatgataagatatatgtaaaatgcataccagagaggcagactattggactcgaagggctcagtaagtgtaagctggctctctctgccccttgccacctatttttcagactctggacttttatcactttaagtcatagcctagttctaagcaaggaaatggactaatcagacatgtttttaaaagatcattctggtagtggttaggagaatgaattggaaagatatgagacccatgcagggacaacagttaggacattatttctgtaataagccaagcaagaattgatgatcaaagtggtgaggttgaacaaacaaaacagatacgtgagctatttggagataaaatcaacactgtcatatgttttgtgggaggtggaggtgagcagaaaatgtgaggtaaaatgagaaatcagtgcctgcttaccacttggcatgattgactgaaggtagtgtcttcactcaatcatgagttgcagaattcaagatggcaaacagttgtgaggagcaaagtcaagaacgtgtttgattttgaggtatctgtaagtgaaaaatcagaggtgaaaaccttacctctcttgaagcagttgtgaatgtaaatctaaggtttggaaaaagatctgggttaaagatttaaaattgaaggacatcaacatggaagccatagaaataaattatattacacacaaatttatgtcgttatttgaatttctccatggtccactcagaaatatatctaaatgtcaccaaaatgttacttactgtagtacagaattggtattaagtgatactattgtccatgttattcaaaaagacagttatagggaccctcttaataaactaattgtgaaaaaggcaaagaattagcaaagctttggcataaaattcatatcatgggccaggcgtggtggctcatgcatataatcccagcactttgggaggctgaggtgggcagatcacctgaggtcgggagttcgagaccagcctgaccaacatggcgaaaccccgtctctactaaaaatacaaaaattagccaggtgtggtggcacacgcctgtaatcccaactactcgggaggcagaggcaggagaatcgcttgaacgtaggaggcagaggatgcagtgagctgagatcgtgccattgcactccagcctgggtgacacagtgagactccatctcaaaaaaaaaaaaaaaaaattatgtcatggaaaaagtaaaagtctttgcataatgtatccaagatcatgaaaaactcttttcaataagataattagttccttttcttatataaacatggaaattttcatttttccttttattctcatattgatactataaaaaccccatcctcattcacaatactactgtctctaccctcgatagataccagttcaattgaacgtagcatgttctacccatgaatctattgttcagtgagaacctctgactataatgctcaggaatactcaagactcacatgattgtcttcttgctatatttagttactttattattttccattttgggaccctgaattcctgtagatctcagagaaaatccgaaatgaaataatgaaaataattaaaagtttagaaaagggagtcaatggggacaaatgttcaggactggtcttttatctcctgcaggaagaaagactgaatgcagaaaattagaatccatttttcatccagtcaccccaatttaatgcaatatgagtttagctatttgattttaagtgttgtaccgttttggaccatgttaccatggtaacatgaaccatgtctcattcatacgtaaacatgttaattgtattaaaacctttaaaacctacttctggatgttgccattacattaaacaattatctagaatgatacaaagtaatgactaaattgaataactttgtaaattaactattggattttgtaattttatatctataaaccaaaagaaaagcccacattggtaagaagacactgtgcatactgaaaagtcaattttgttagcctccaataaccattgtgttttattcctcgcagagcttttgtgaggatcttataagggaataaatatgaaagcactttgaaaaagctttcaagtgaaaggtccttattaattttatgaattaccattaaacaaaagtcaaactgaagatgtaaatctaataggatgctcttaaaagtcaatggatcaaagttatattaattaataaagaataataactaaatattttatgtttcataattggcaaagtatctttactgtcattttctaatttgatccttagtgaaaacctgtgatgttggtactcctattatttccattttcatttgagaagaataaaattggagaggttaagtaatttatctattgctacttgttaaaataactactaaattttattactcccagttaggagggcaattatataaactaaaagcttgtcacaataaatgtttacttttctgggattaaagtcatcatgtatttttcaattattaaggggggtaataataataatagctacctttttaaaatagttactatgtgccaaggtgtgtactaagtgctttgcttgcatgatgtaataccatcgtatatttagtacagaggaaaaactgagaggctgggtaacttctactaaggtaacacacaagtactggttgagtatcccttatccaaaacacttgggaccacaagtgttatggatatcaatttttttctgattctttttttggatttcagattttttcagattttggattacttgctttataattatgggttaagcatcccaaaccccaaaattcaaaattggaaatactccaatgagcatttactttgagaatcatgtcggcgctcaaaaattttcagcttttagagttttttggattttggattttcagatttgggatgctcaacccgaatatatagaaaagtcagcatttgaacctaagtttgactttctgatcttctaccaactctactgtcctacccattactctacattgactcagcattacagggaaagacccaagatcaccaaaagcaagcttcaaatcactcatctaatagaaattagtggaaatatttctacttcctaaacatccatctttcctttacattttaaagtcaagtttctacatctgcctcccaactgaaacacttctctatgaaatcaccataactaccaaatgcaaatatttttatcaagtcctcattgccctagaaatctactcatattttgttattactgctcactacagcctactgaaaaatgtctcaccttttgacttgccagggtgatatattatactaattgtctccttgtctctctaagcactcattccttcctctttctttcttctttttttttttttcacttttattttaagctctaggggcacatgtgcaggtttgttacatgggtaaattgcatgtcatgggagtttggtgaacagattattttgtcacccagataataagcatggtacctgataggtagtttctcagtcttcaccatcctcccaccctccaccctagagtagatcctggtttctgttgttcccttctttgtgttcatatgtactcagtgtttagctccacttataagtgagaatatatggtatttggttttctgttcctatgttatttcacctaggataatggcctccagctccatccatgttgctgcaaagaacataatctcattcttttttctggctgcacagtattccctggtgtatatgtaccacattttctatatctgatctaccattgatgggcatttaggttgattccatgtctttggtattgggaatagtgcagcaatgaacatacagctgcatgtgtctttatggtagaatgatttatattcctttgggtatatacccagtaatggcattgctgggttgaacggtagttcagttttgagttcttagaggtatttccaaactgctttccacagtggctgaactaatttacattcccaccaacagggtataagcattcccctttcttcacaacctcaccagcatctggtattttttgactttttttttttttttttttttttttttgagacgaagtctcgctcttgtcccccaggctggagtgcaatggcgcaatcttggctcactgcaacctccacctcccgggttcaagtgattctcctgcctcagcctcccaagtagctgggattagaggcgccttccaccatgcctggctaattttttatttttagtacagacagggtttcaccaggttggccaggctggtcgcaaactcctgacctcaggtgatgcgcccgccccggcctcccaaaacgctgagattacaggtgtgagccaccacaccaagcccacagtatcaattctatgcattcttttctgatttcattaatctcattatcttcatttgatatttagtcaatagttactgtcagttatgtgttagttattatactagaaacagtcttttctccatctcctttaatccaatgatttgaacatttttattcctttccaatgtctgtcccacatttcttactgtatgtaggacatttcttactcaaatgtctcacaaatgacataaattcagtatgacccaaataggccattttttataccaagtcttatttcctatcctgctgttcatcccggtaccatcttttcagtcagagagttcagatcatatagtcatttctaaatctcccacttacttgcctcactttcaagttcatttttaaggtctgtagattctgcctccctaattctttatgaccattcctttctcactagccccttacctccactctcattcacactcttactattttttaccctcctccactcattcctgcccaccagtggctccaatccaacttgcagatttccatttaaattaagcttcctaaaacatagcttaggttgtaactacaatgcaaattccatgagagcaaagatttcatctgctttattcacttgtatatatccattgtccaagactgtgtgtgtcacatgaaaagtgttcaataagtatttgtcagtgaacgaaaataatatatgactcccctcttcaaacaccttttttgacttcaaagcccttcagaatattctacagactccttcacctggctctccacaattgcccctgagtctcgtttccaatcttatttcttattttacctctcaatgcaccttcaactcctactaaaatgaacagctagccagcttacttctgtgtctttcgatgatcttgttttttgtcttgagattcctttttttcatctaagcttacccaaacattacctacttttcaaggaaagccattttcgaatcttccctttttccctgagcccccaagctggaagacatcttgtctccatctcaattcctataggcatttctctgcactttaaatgacgtttagtacttctgacattgcattagagagaggctggggtggatagtgtttcatagtgtgaactttgaagcccgactgcctgagtttaaatcgtgattctggggcttactgaccatagacgcatttctgaattgctctcagattatggagcataaatcaaaagtaatgacagctacctcttcaggttgttgtgagggtgatgcgaattaatgtactgaagtgcatggaacagtttctggcacacggtaagcacccaataaacatagctaatattatgttattactattttcaggcttatttttatgtatacatatagtatgtaattttatgtcaatatgtataaatagactttggtattgtttatttcactatcaccttgagagcacaattctcatttgatttgtgtgagaaactacttagaaagaaatagacgtgtgaatgaaactatgcttgaaatattggttactgtgagtgttgaaaatccattttgtttaaagaaagcttcaattgttaatcttccataaattttagttcttaagcgttcatattgactcgttttggaaaagctctttaaagtcttgggatataaacaaggctgaataccctcattcatgataacaaacatattatactgaaaattgtaagagagatattttatctttcataatgccctccttgggaaaatacattgacttggcccttctctttcaatcagacaccaaagttgagattgcctgaaacacagtttggtaaaaggagtttctttttcccaaacatcctgagtaacacaggaaatcacaccaatgactgatagataacgttaataaaattaataaagttgttttaaatgcataccatggggcagtggcaatgaaaacattgagaaggctgggactatttgccaactttctttgatctccattagaacctggacaagatccacataatttcagaacttcttctccaaacaagaattgaaaaggtcaggaaaagtttgaccacagaaaaatgtcaaagaattttgtgtcactttctcctcctcccttcctctaaccttgaataattttttagggttattggtctttgggagcagactttctagaccaaaacaaaaaaaatgatattcctctatgtgataggtaacaatcactacccatcctactggaaaattctcaaagtgtaaattgaggggataaaaaaagaatcttaagtcctttaaattatttttaagatgaactacattagtgcctctcttgtgcctttcataattctgataataaaacattccaggtattagtcaaagattaatggtattgaaaataatttaggttatcagcatgtgattttcattccacatgaggtccttttgcagtttacatggttttctaaattatattaaaataaaatgtcagaaagttcacatttttttcatgtttaacagcatcaatctttaaagaaaagttattgcacaaaggtctgtgcataaatcagccattctccgaagaggtaaaagaagtcattacgcctggttatgagagagagtttcatgaatgtaagagacataaatcatttcccactggagatcatattagtctagatggaagaatgtctgtttcttgatagtgagaaagcaacaaattacttttgtttgctcctgagtctgtggttgtccttgagaggtctgttagcatgttgactattgactattcaatattagcattataataacttacaatgatctgagtcacataaatataatctttcagttctctaaagattttactttttcctctctaatatctattcacctccaacacctttgcaaatatattattctctgggagttacaaagaaagttattctctgcaggaagcagcatttcagttgctctcaggagccaaccacatttcacctcaattctttgctcccaattcaacaattcaatattggattaaattcaaggctgtgaccccaaatagaatgagacctggatatttatgaaccacttgaccaggcattcttcccatgatttactccataaatcctttttagtttttgcagtagctttacaaatatttggaaaatggctgtgcaatgcagttttaaaaagtgcaatgagtagaggtagcttcttcacctggtatggtaaattgttgattctcttttggagtggaaaacaagtgttcttatttggatgcaaccattgcattgattagacaaccctaaattcatctttcatccatgacctgaaagaaattttgaaattcatgcaatatatacccgtagtggaaaatgtactttttgaatggattcctgaatgtgacttttaagaagagctattaagaagtgggatcttctacagaacagtaaacaggcatgaaaatatacaagttgataagatatggaactaccccaaaagaggaattaatagtggtggggcttggggcaggaggacagagagacctagccaaggaaggaagggctatattataatagagtacaaagtcctttagtcatccaagagaaggggcaccttctgcatcccttatgagtaagatcagagaaggtattctagttaacttttgctacataacaagccagcccaaaacttcatggcttcagtaaaaattacttgttttgttcatgaatctacagtttgctcaaggttcaatggggcttgcttatccctgtttcagttgatatcagttggggtagattgcctgatgctggaggattcacttccaagagggctcactcacatgcctggaaaataggtgctgactgtcagtttttcttcatgtggacctctccatggagcagtttgggctttttcacagtgtaagagttgggtcccaagagcaattatcctaagggacaagaaattaaagctgcaagcttctcaaggcctgccctaaaagcaagaatggttttgcttctcccatattctatttgtcaatcagtgacagagctctgattcaaggggatgagaacataaactccacctttccatggagaagtatcaaaaagttttgatgccatttaattaaagctgccatacaaagtttcttataaatgacactgagctgaatgaatactaaacagcaagtagtcattatcccagtcaagagaagttatctttgctcagaataccctttctctccttgtctacctggaaaattcaactcttggccaaagccctacctcttctcgaaagcattaccaggccttgcctctaagtgtacaattggagatacaccagtatactgatgtttttaaaactttaaacttttttctacaataaaacataaattaaataacttcccttctgacttaaaagctgcaaaatgctcatgacagtaactatataaattaaaattaaatcttaagcacgataaatacctctcgaatagcaacatagatgcttacttctttatttcacttctttatttgcttttctttgtctatagtttgccccaaaggtattttaataatatcgggttccatgtataccagtgtgtaccaattaatatttagaatatacctgttaataacctcatttgcatagccctactaatctgagcacagcgcagccttaagaaagtcttagtttttctcagtttagttcatctctcttctcttctcctcctgtctctcttatttcctatttctttttcttttcaagtgactttcaactaagtagaaaatgcatttcacatcactatgccggcctccaggctctgtctatttcattcacccaggaatgccctttctgaatgctttctctcatttagcagctatctattgaagttggacaaatgatagaaattcatttcttaaagagccagaacatcatcttgaacaagaagttaaaagaattcagcaaatcaaaagatgagctaatatgggtgaatcttagaggcattatgctaagtgaaataaaccagacacaaaatgaaaaatattgtatgattccactggtatgagctacctacaacagtcaaatttatacagacgtaaagttgaaggatgttaccaggagctggaggaagaagagaatgagggcttattgtttaatgagtacctgagtttcagtttgggatgatgaaaacattctagagatggatagtggtgatggttcaacgataataataatataatattaatgtacttaatagtactcaactgtatacttaaaaatggtcaagaaaatggtaccccgttatcctgatgtgattattacacattgtaggcctatatcaaaatatctcatgtaccccgtaaatatatgcacctactatgtacccataaaaaaaatttaaaggctaaatggccaggcattgtgggtcacttctgtaatcccagaactgtgggaggctaaagcaggaggatcacttgagctcaggagttcaagaccagcctgggcaacatggcaaggccccatctctacaaagaattcaaaaattaactgggtgtgggagctcatgcttgtagtcccagacacactggaggctgaggcaggaggattccttgaacccaggaactggaggaagcagtgaatgacactgtaccccagcatggtcaagatcccaaatcaaaaagaaatgattaaaatgatcaattttatgttgtgtatattttgccacaatacaaaaatggggaaaagcctattcgcttttaagtatccttaaaaaggcacagcttcttcagctaacagactctaaaactttttttaatagaagtattaaggtatttagagagtgcaaaatatcttattttaagtcaagaagttagggtcctgttcctaaacactagcctctgtaatcctggggaagtcagtgctgttggagatctcaggttgatcttctgaaaaatgatggatctaggtaaaagatatgtttctccaggtttacataccacggacaccatctttacttggaaactttattaaaaatgcattgtgtcagaagctctctggggatgggtcgtggaatctgcatatgtaaagagcccctaggtagttcttgtgcccacttaaatttgagaaccactagaccagatgttttgcttatggccctttcagctctgaaatttgaaaaaaaaaaaaatgattctgcaagacagagtctctgtgcttttgcaggataaagaaatgaagaaaataatacttcctgcttgtgttggagcatttttttcatttggtatccccatctccagtggctagccaatcaagaatagtattgtttattcttcccactgttttgaagatacaaaaggaaaagctaagccagatgacacctaaaggcttccattaccattttcatgtttttccctttgcataaaaactgtccatgcctccatcagagccatgatcactagtacaatgttacactctaatgactcatgacattaaattatatcttagcctaatatgaccaaattacaatatcagaataaaaatttcttttttcaggttgaatcccataacttaatccaattataatactggctgaatttttcacaattatgtctcagtcttgatttagggaatcttctctttatcataaaaatgcattttgttaaacatgtttcattataatcaatttctcaaaagtaaagttaatcaagagaaggaaaaaaggttttgttttgatttgatttggaatgtgtatgtgtgtttactgtattgaaatagattctgtctgaaagactgtatataagataaaaagtacagaagagtagtcagagagttattacccacccctgactgatggtgaatagattatctaagtatcccgtaaaaggcacaactccttcaggtatattttacaaattaattagtaactttctagccaaatttgtgtcttaaagacaccagctagaacttggttagttctagcaaagaagattattttattctgaaacaggtttttgttgtcgttttacttatttgaacttttttcttgaatatgtatttctttgcacataaaatatattgacttatgaatgtgattaaaatggaaaataattagttgattttagagagacagagagaggagaagagaagtgtgaaggagagagggaggatagaaaggagagagggagaacaggaaggacagagggagaatgggaaggagagggagagagagagacagagagagaggaatggagtgggtaataagcaagagaaaaatgccaatcatatgctttgctagtgtgtaaagtctgataacccaagggagagaggactactctggcctagtgaaacaaaggaaagagaaatatggtagaatattctcctggtgcttcaccaaatgtgacaccagaagtctgacagaagtcatgtcagcatttgagctccataaaactcaggctatcgacctaccatgtgagagtctcaaaatgagtttaggtaggggcagaggagttgaaatccagtaacatatgcaacagtgatcacaccaggattgcacatagaaagcaaattagtcctctaatagagacgccaatttgaaattcaccctctgagcaggtttttaagcacactcttcttttacttttctatttacaaaaatggaacaccaccagaaaaacaagaatttgaaagacgagatgagaaaagtaagttgtaattggaaacagacagaatgtgtacacaaacacacacacacacgcacacacacgtgcatgcacaggtgatgagagagtagtttgcctacatggtgtatctgactaagaagactttttgctctggttgtcttacaggaagtgactaaatctcatgatgtgaaatattttcttgcatattgtattggaaaagaaaataattttcccaaactccttaggggcagtgttgtcttataattcccatatagtatatgctcttcaagtaagtaactccagagttgagtaagacaagactcgtgactcagatggcatgctctgctccctagactagacattgcatcagtctgcctatactcacatccgctgttaaaggattgcctccagtaaaatatgtcttttaattccttatacaagaatctggaaaaaaaaagtaagattctctatttcttaaatttagcagcaggttaatcactgataacaataaaaatacataacaatcatctagcacgggtaaatattgtggcaaaaattacaccctgaagaattcagtcaaagatataagtaagtacacatcattgtcatgttccacaatatatcatctgctttaaagaaactgttatgtagctgtagtagatttaatcattaatcccatttcttctccaccttctgcaatcacaaccttaacaatgcctccttatgagtggaatgtacttcccaacccctagtcttaggggttggccatgtgatttgctttagcaaatggtaaatgagcaggagtgagaggtgacagttttcagcctaggccttaagagatctatacattcctgtttgtgcttctgctatcattctgagaacacgtccatctaggctgctggtctcaggaaaacgataaaagacatgaacagcagggctgcactagccattcacatccaggaaaagaaatgattgttgcataaagccattgagctttattctacattactgtgacaatagctaattgaaatagtaaatatactttggtttttcctaaatgcatattgaaaattaataatattagccatctgtatgataaaaatataaagcctatgttttattttttaatggttcactgccctaaataaatttccaaaaagtagatgttcccttgtctagtgatgtcattatattttatttatacatcataaacacactgtttatttctgctcatttttttgtaagtaacatgtgttaccgccaatcttgagatgatacacacacttctgtactaaattttggaaaacatattagctacccactccttatatcaaaatattgcctaataatgtgttttgttttaatccttcatgaatttccaggagaactgaactgatacttgggtttgtgagatatatgaaaatagtgaacatgaacttctggtttaacccttgtgatgataatggaatcatagctctgttaattactcttgtggtttgtcttcctagagataatcatgtacaaaattcctttccaatttgttatataatattagaaatacttccaaaattggcatggatttattgttatcatttgttggcacaatcattaaaacgaaacccataaagctagataattaaatgtttacaaagctatagtactcaaaacaaaaacactgtgaaaagagattttttaaataatagtttttgcatgccttttgaataattggattattctgaatttcttcatgtttagtccctgaatctaagtcataccgtctacataaaaatagatgtcagctgaagaaaaccaggcaatggatttgtcttgacgacaatctttttatatgttcagacttcatttaacattagacttgtctgtatttgaaattggtatttctttacatttctgaatttagggaaatggcacaagagaataacattaatttcctctgcattttggcctaatcaaatttgagcctttcaagagacacagccaagtcaattcaaagagacatatgaaaagactactgttaatgtatctttaaaatgaattagcggcatgaactgttgctaggtgagttaggtatagttgtagtttttagtaaccctaagagaagatgcagtgcattctaaaatgtcacaaggagtttgattgctcaaaattctgggagattggctctctgcaaggcttcttgatgtcattgttcctagaggaatgttgttccagtacctatagcgattgcagccataactatttatgtgtcattgtagccattgttattactacatgcttcacatacctctactgaggtctaaagaattagtggacttcatattctggagagaacacttgaagaaccaaacagaagtttgatgtgaatctgcatatccaccattattgttcataggttctcaggattagttgagtgatgccttaaagaaagaaagtcagatgataggtcttcctgctgcccgcaccacatcatgagtgttattcctatagaggaggagtaaagagtgggaagaaaatgaaatctgtcaatactgtgaatatataaataataaaagtagcagtaggactgattaattctgaatcatctttatgaaatgactggagccgtgaaaatgctcagtctgcacagctgattgagaaatgtatgcaatctgttgatcggaatttatttgtgaatgctctcttccagagatttatataccagagttcttaaaacgaattttgtccccatgaaaagaaaactacagatctgtaagactgcaatttaaaatggaagaaaacatgttcccacttgaagaacaactttcaaacaaacaactgatacaaaaaagtcaaaagctgttttgttttatataatagtttcagaatacttccagtcaatatataccttggtttggtgaaaaaataaaaagctaaatccttagatcattaactagaaatttttgtaaaataaataaaagccgtgggttttagtgcagtgatcccatgaagaggaatatattcaccattggtctcttaatctcagatagaatgtacatgttactttattttataacgaaagcaactgtgttgtgatattatgtataatattataacaggagaagtcctcttagctaactcagtaatcaataacattgtacgttgtgtgttattgtaaccaaaaactatgacagaaccccatttcataagatcagtttatccacctatatgatttatatttgaatattcatttcagtacttatgttgcttaaacaaagctactgtattagtccattttcatactgctataaagaactgcccgagactgggtaatttctaaaggaaagaggtttaattgactcacagttccacatggctgggtaggcctcaggaaacttacaatcatggcagaaggtgaaggggaagcaagcatcttcttcacaaggccgcaggaaggagaagcgcccagcgaagtaggaagagccccttataaaaccatcagatcccgctatcatgagaacagcatgggagaaactgcccttatgattccattacctccacctggtctctcccttgacacgtggggattatggaggttatggggattacaatttaagatgagattgtggggtggggacacagccaagccataccaaaaactctgttttttgtttttgtttaatggaaatgatttagaactttattttctgatgtttctttttcataaaaccacgacaccaaaatctacttttcactgctccattcaactagtagagaatatctaatctcttctcaagtatttctttctcaattatggtggttttagctaagaacagcttatggcatgcttttctaaataatattagaacacataaattatctgtacctggtattaccacattcattgctcattttaagatctcaattgatacattcaattcatatatatttaaaattgattcatttagagcaagagatacaggcattttaatgtattacactgctactaaagcttagcaaattattcttttttgtgcccacaaattatcatccattcatgtcctaaaaataaaattgaatttattatactttcccatttatccaaaaaaaaggttttttttaacaattgatgcagatacacattttcaagctaaaaatatgtgtgaaagtggcctctttctcatagtatttattttaggagtctagcaataatttttcttaggttatcagcacatgtcttagcctgaattatttgaattcagtctgtgtcttcaagttcagatggttatgtgatcttgttaagatctcaaagtagtgggaatgatggagtatacaacaacctcattgttttttatggcaactgtcatttactgaaggacataaggctagcagaacatggtcagagaaggaatcaaagtttggtcagccaactctgctccacagctacaagctgctagacaggcataaatttttccaaacctacacaaagggacttagggcccttggctgagagcgacattctaaccacttccttatttatggctggtggggtttgtacattttctcatttctgtataacatttcttgactgtaataagcaatgtattcattctgctttaccactttcactaaccttaacctcaatatatactcaattaagcaattgaaaacagcagttttaatcttttgacataaatgatttcctccgaagcaaaatgctggaaatcccctcaaatgcaccttttattgatgaatacctataagcaccacctacagtcgctggaggctgacaggaaccaaacttgatgataaccactgagctgagaattttcaactcactctttttccctgtatggttcttctagctgcattatttcccactatttaaagctacagctggtgaactattcaaatatttaaactttggagaagaaaatatcaacttatcacaaccctctttttatattctaaattcatatacctgtttggtacttaaaggaaaaatatgctgaggaacaggctggtcataagactgtatagaacgtgcatcttccatcctattgaggtgactcctagacaatgggaaaaatgccttcactcgacttgctcattaaatgtgaccgtagctgctaatcttttggcgctgtctcgaactttaattagatgtgctcttctcttgaaggttggaactacagtatccagagaccatagaatcacagagttgaaaacaaaatcttggaaatcattgaatccacttatcagatgagaaaaaaaaaataagcccatggagatagccattttaaaacatatcattctatttagcctccaatgtaaaacaatgagttactatgtttcaataatgttgatgttaagaaattatttgatagcttcctcacttggtctcctatattcctccaaggttactagttaggaagactgtcattcaaatttggagactacataagaagcagaaaaagcatataaagaggcacatgaaattggaacttttctggtaaaatcttctttcttaaactctcctcaaataagctgttggtggcaggaggtgaaagacagcctccaccctttagcacagtccgtacttgtcagcatttcccaggaagggtgatgtctggaaatgatagagattgtggaagcacattgcattatgggtcaagaatgcgaaggtcaaggagtggagtcttcctttacgaagtagtgttaactgcttggcgtggcattgttgtaaacagaagccaccaggaaggatcatccttaggagggaacctgtagatatgactgaaaacaagagagatccagttttaccactctggaaacataggtaatagaaagcccaaaaggtaccttatcacttgtttgttcctttctgtacaaaaggacttaaatcctttctgagcaagaaagatatttgagaatccaattttgttttaaacttgagcttagcattttggaactattccaaagaccacagaattcacagtcattagcataccacagcagactcttttcaaatattgcaaaccagaacagtctgcttgaaaacctggaaatacgacctagtgggttcaacttgactttttttatttctaacccttacccctaggcaattattgataactcattctggtacctggtatgtatatggactttgttagaagaatttgacaactttctaatcatctgttttttttcttttgcttgatagacatacatttagtagaactttactggattgtattgattataaaccacatttcagttcatatcagtccattttgctgcacaataaacaaccaaaaaaatttaattcagtggctaataacaacaatattgatttattcatggagctgcagtttggtagggtttggccaatcatggctggaaatggtttagctatgcttatctctaggccgtcggttctgttcgggtctataccacatattttcttctgagactcaagctgaagggacatcagctactcggggtatgacagagtagcacaaggcaatgacagaagcacaaacaacacttttcaaaatctctcctcttgtcacatttgtttatagcccattagacaaaacatgtcttgtggccaagcccaaagtcaaggggtaggaaaatactttccacctatgtgaggccatggctggagcgtgaatgtatgatactactagggatgtgaaaggattgaggccaataattcaatcttctattggagacaagctcaacgagttagttaaaatggaaggctaatatttactaactttgcaacccaaggaagagaaagcaggatctctctgacgatgacggaatttcataccctcatctttgaagttatactaaagcttaggaacaaccgtcagataggactgaattgctcccccttccagattcagcatgtgaagtatgcagcatcttattatagcagtagccaaaacagccgttttcttcaatttgggaatacaatgtaggtgtgttaattttcaattaagagttctaaacttattatctgcttggtagctcttccatgtgacagtcattccatctgactcttcatgttggcttttgaactaaattttaaaggaaccgccaaaatttaagggccatgtactttttataacctgtttgtggtctgggtaagaaaataaaaattatacaactgttctttttgaccagccacaagcatgtaatgaaaatgactgttttggctagcagatgtattagaagctttcaaggtgtttaaaaaaaaaaaaaaaaactggagaaaggagccagtgaattgacctcaaacaaaacaagaacaaataaacaaaacacttgtctgcacttccaaggaagggtgatatctagaaaagatagagatgatggaagcaccttgcattatgggtcacaaacgtgaaggtcaaggggtggcgtcttcctttatgaagtagtattaactgcttggcagggcattgttgtaaaaagaatccaccagaagtgaaacaagcagcactaaaagttaaaagatttatgtgtaaacctcatctaaggcaacagaagccatttctataaaatagtataggaccttttattatatatggtcctagagtatattaaaataagtctgtttgggtccatttgcagctcatttgaagatttttataggaaaaacatcctcaaaaatatcatactacagtgccttgatgcttttttctttttataaggtactgccagcccaaatagtaagaaaccgatatgatttttgtccatgtgaggtgtttaattgcttcccaaaatatggttattgtgtagatgtcactaacgaaatatataaagagcagtatttgggaaaatttattttaataccacctttttccttttttaccctaaaagtatttatttttttcgtagcatacactctgtgtctcagtatcattgtttttcataaaaacataaattcttaacagaaaatttcctgcaagctcccctaagcttgaagagacaaaggagatttgtaatgtagctcagccccaatcagggtaaaagaatgcagggctgactttatacttataactcagaaaaaggttatgcttcccgtctcttcacagagctagtctcttaattgattccgaactaggaacatgtacaagtggcccacgatctggaacagactggcggataatggaatattgagaccttgtctatggtcagccatattaacactggataagtctgataacactgtgattacatatgtatcaatatagtatgctgttaatatattaaaaacttatttacaacatgattattggacaactgttacagtacagccacatcaatcctatatcaagttagaccatgtcaactggttttgtgttgagacacctgtgtatggacatagtctgaacttttcatagtttgtgctaaatgatagcaatcaacatcggtatggcacttacagtttactgataactttcatgcccattaacatagtaccgcaataactctgtgaagtgctgaatttgtgtcctgtttcatgattgtatttgtgttgatatctcagtcagtcagagtcccaacaagaaacagatggcacattcagattagggtaagttgaggagtctttatttacaaggcactacatactcaggattgggcagggtgtagggaaatctcacaagatagcacaagactctaggactagcagcagcagagctgtcacctctcctagacctgaagccgttgttggggagagaggtttctcagagcccagaaaaaaagaaaaaaaaaaaaaacatcatgcagattttaatgccttgggaggagcagtggctttctcttaaggacagaatttgcctcgaaatgatactcagggaaaaagagatgaagggaatcaatactctgacccaagactctcccttctctgcagtggtttgctagtcctctccttggtcaaacccaaacagaaaaccatagggcataggagtctaatgatgtaatccaagtcagccccctggaaggtggaaaaagaagggaaaatggatctggatctggagggataccaaaaaaaaaaaaaaaaaaaaaaaaccatagttggcatgcttgtttattgatattttcttgcatgatataagaatccagataaatatagtaagaggtctattttactaacaattttaggcacctaataataatactccttctttgaatgtataacctctagaattggttcagaaatgtaactgtgccgttacaatttctattagtattcaacagtagattcatatccattcatctatgactggagtatctgccatttgctggttagttactgtgtaaggtactttgtaaggtatagaaatacacttggggtgcgatggctcatgcctgtaatcccaaggatttgggaagctgaggcaggcagatcacttgagtccaggagtttgagatcagcctgggcaacatggtgaaaccccatctctacaaaaaatgcaaaaagagtacctgcgcatggtggcatgtgcctgtagtcccagctactcgggagcctgaggtagaaggatcacgtgaacccaggaagtcgaggctgcagtgagccataatggcacaactgcactccagcctggatgacagagtgagaccctatcaaaaaaaaataagaaataaatttgagctcagtgacctacattctagtgcagaaaaaaatgaccatagttgattatgagattttaaagcaataaaccacatgagacatactaatgagctcataagatcattcagaaattgtttattatgaacacatagtactttcagtgtggcattaaacagagatcactgtccttaaacaagttaaaagcagaatcaaatcatctgcaaattaacacaccactaaactttaagcttcttgagtgattctgtaatttttaaaatgtcttcagcatttcagtgtcaagatagtgcaaactcagtaaaagcttgtggaattgcattaaacaaaaccaaaataaatagattttattaaaactatatacaattgtctttctaatcatatcctctccatgaatagggaagaaataattttaggaatttaaatatcttctatcttaatagttcctcttatttccctcttaagcaatgttcactccttcaaaaatatttattgagcatctaatatgtacttaacactgtgccaggtgctgtgaagaatgccaaggaaatagaatgaacttctaattctttggagttccaattaaataacctaaagttaaattggtttcggagagaacattatgccttcgagactgtaggcttctcttgattagaaagtcttaaacattttaagtaactaaacagattaaggagaattcaaggatgcctctcactagtaaatttggattagtctggcaaacttcagaccttaaatgcaagatttttaataattaaaagaagagagaaaatgataattacatttctagagtctatgtttaccattcagccttcttaatcatttcctaagtatatctggtgatcaggattttataactccagaaaatctttctatacatcgcataaatctcttcttttaaaaagctcttcaattttgtattttgttaaaacttaaaagcctccatgaaaaatgagacaaaagtcagtgagaggctgtagcaataaaaatcagatgtgattttcttttgaataacatctgtttttacagtcctttcatgttaaactttataagaatttattataaacagctttattgacagttcaatcctatttctaaaaggatttattttcccccaatggtaagagttttcttttcttaaacctaactagttgcagatatttcagatactacatttctcattgtgtaaggtaaagtttctgaccacctgaatatgacttgtagctcctgagaacaatttgtttagtaccgatatcatgcagtgacattggtacaaaggaattttctttatttcactgtactgttttcagttttattctatagttgttaaataagaccattaaatatttttattagtcttatttcctgtttaactaggtgggtttttgatctctgttcagtaaagcattgtgctcttcagagcaagcaattgaaaagcaaatagtgagtatttctactgtaaaagtttaacattaaaagatatacacacagccaggcaaggtggctcacgactgtaatcccagcaatttgggaggctaaggcaggagaatcgcttgagcccaggagttcgagaccagtctgggaaccatagcaagactccgtctctaccaaaaaaattttttaaaaaatagttggatgtggtggaacacctctgtaatcccagctactcaggacgctgaggcaggaggattgcttgagcctgggaggtcaaggctgcaaggctgcagggagctgtgactatgctactgtactccagtctaggtgacagaatgagaccctctctctctcaattaaaaaaaaaaaaacaagatacacacacatatatttgcgtaggtaactctaatttcatttcaagtatgttatgtaacaaccatttgtgtagtgcttgtaacagtcaatatgtaaatactgactcatcttctttgacaattctacctagatacttattagagtcccccttagtcattgaaaggaaggttaaaatcaaaagacgttgtttgccaaagtaatgaaagaaaacttataaacacaatgtatcatgtctggggctgaactaaaacccttctgatatgtggtattaacagatcatctttcatgacagtaccagttattagaaataaaatgattggagttattattaatactaacaatagtggtattcttaaaatgacttccttatttatcttcacctttatacattctactactgcttcaagacccatcttgaattcttcttccacagaacattctgcattaatttcagccaacattgatttctctttttaaaatttgtcttgcacagtgaattagaaaaccaggaattggaaaaccagaaaagcttattaagtaagaagcagagaggagagagtttcaacaaagggccattctaaagtggtctactgcggacaccatactgattatagttggtgattaaatcttatctttccaactgattataaactcctccagggcatactcttatattccacaagatgcttatctgggtgcagagcatgcatgcagttggtatttgctgatttatcaactaactaaatcttaacatattattattaacaatttaaaataaagttaaatgtatcactctccacccctcaaagccatttctgttctttgttttcatagcaccattattatttcctgcatagtattttttaaaaaccgtatttttaaaatttatatatttgtttatttgggtatacttcactagattgtaagcgtcacaaaagcagaactattataaccccagccactaacacaatgcctaacaaatagtaggttctcaatatttgttgaatgaatgacctacagatattacttcattatgaaagattttgctaagttgttttacatctattttatccaaaactaaagttcttgaggcaaagcctagaatatcttctatgttctcacaatgctctgaatcagtgcttctcttaatatgcatagcaattgcctggagagcttgttaaaacatagattacttagccccaaccccagagatgctgattcagtaggtcccaggtgatgctgctgctgtcagtctctggcgcacactttgagtagtagggctctaggatgttatatgtacagacacatgctgaatagtgggctatgtgcttacttgctggctaaataataaatgttctcactgagtcatagaactttgaaatttgcaaggacttttgctattatctagtctatggatagcaaataacctgataccgtgctatagtgcttgactgcatttaacctgcagaatcctcatgagcagcccagcaccatcactccaagtgaaactactctcttcttgaggttgtccaattctatcaattaaagatgaaaaccaggttctgagagttgaaatctctggacttcaaaggtccaacagcccaggtcttctcaattctcgttagtgtttcagcagctgaatacaaatttattaagctgtatcagagtagtatctgtcaaattggagtgtccataatatgcttaaacagagaactccattccaataacatgaactttccttatgctttattcatcatcgcttgaaattttgaattttgcccaaagaagtttataccagtacatgttaaattacatcatagccttctttgtataaatcttagagtagtttactgaagtacatcgcaaagttttgttgtttcttaggtgattttaattatgtatgtttactttcagtaatgcatcttttctccttcatcaatattatgttatgctagctgtaagtacaaaataattgagaacaaattatgacaaattgaaccaagccacaaaaaaaggagaaaccaaatacttttgtgatttgagcttttttcagtccttgaaactttaagaatatctgtctttattaacttttgctttttgctgatggtttctctcattttattatagcttatagcattgtaaattaatttaacatgaaaggataaaaacgttgcttttgaaatgtttctcattaaattatgaaaaaatattacactaaataaaagaaaggaatgcctctggtaccagcttctgtttgctcaattattgcagtacccaaagtgaattattacacagttaactcagaggcaatattattgtcattatattataaaatagatgagttgcaatcttcaaaaaaaaaaaacagcataggtcctttgaaagtgaaataccttttttccttgtgcttcatttaaatatatactgaccccagttttgtttttgtttttcctttttagagttcttgctaatgatgggcccaaagttatattaagaactgcaaagtaaatttcaaccaattactttattcaggggagtcattaaattgaggtacctctgaaattttggaaggaatgtactgccaattagccgaaagcactactcaatgtcctttctatggttataatctctctagtgtatttttaattgaagacaacctctatagaggaggtgagaagttgctatttattggtacttgttaggatggaatcaagggtgtggaagatattcatctatttctctctccagctcccccacacaaaaagaatggtgcttaatccatctgaagcatttggggagcgagggtaaagatgtaatatttaccatgagccgaaacagatcttcagaagtggaaaatggaagcatattgaagtccctcaactaaacagactttcttccatatggaattcaatgcattaatgttttcaaattctatagcttcaaattcttaatattttcaaattatgtgagcttatgtcaaaacatttaagtgagcttttaacaatgaggcaaatatttgaatcatttgtctacataacaaatactactataaagcatattaaatgttataaaaatcctaatatactaatgtaagctattataaagtacaaataattaaacaatatttatatgatcaatgttttataatacgataaacacattaaataattaaaaactcttccaccgtgcaaaaatgactaaataaattgttaatttctaaggctttttgagattactgtgaaagggggtatagtttcaggaaaggtgaaacttcccttcaatgtgtaaaccattaaagaacataataacctactgagtgtgggtctcaatgatatgccctggaaagtatgggcaactactccacacccaattttgtctttatatgataaggcacagcaaataattataatgcaatggataaatggtaaatcccaccaaagattaaccaatcagagcaggatgaaaattctgagtttggaaatctattggaagatttacagattagattaaagtgcccagtaaccaaactatcaaaattatatggcttcagttaattaatgatttccaaggtttttagtatactgtattacaaaacacattaagcatcttaagcattcaaacaacatttttttgatgattcagaaagcatcacaaattgttatatcagctgataataacttaggtacatatcaattaaacttgtattatagacacgcagaattcttcagaccagaagtcgaaagggcttctctagtttgtttatgctaagttgtttagagatgacataactctgagctaatttgtctattgcaatggttctcaaaatggggggcgggggatatttttacctccaccaagtggacatttagcaatatctggaggcatttttaattattattactggattggagatacaactgaagtctagtgggtagaggccagatatggtataaaatatcctacaatgcataggatagccctccacaaggaattatttaggccaaaatgtcagtagtataaaaattgagaaatgctagtctaatatagtgtttactcacctttcctgaaactatgtcccctttcacagtaatctcaaaaagctttagaaattaaaaaatcgtttagtcatttttgcatggtggaagagcttttaattatttagtgtgttttatcttatgaaatgttgataatataaatattgtttaattatttgaactttataagagcttatattagtatattaattaggattttatttaacatttaatatgctttacaataatattcattatatagacaaacgttttatttttttcactttaacaatgatttttaactctaattacataagaaaaagtatgagttaacaattttttaaattacatgcttggtttgagggccaaatacacatgaaaatgtggactaaaatttaaaatcaaataaaatctataaagtcgaggaaaaagctacttttatgacgaggcatggggaattcttcatagtttttgggttttatcagaagttagctattttttttctttttgctctgtaaacaatcagataagagaggctcaaatgacattttcaagtacatcttaacaaaatacactttgagcatcaattgagtaaagtttcattcttttgaaactttggttttcacaagatttcctgagagttttattttattggtgttctgtgggacttgggcatcataattcttacaaactactcagctcaatctaatgtgcagcgaagctctgggaacttttgttttgtctagtatccagttggaagattctatagctacagagcttgggtttaaaccccctccaagtctttaccagctacctttatgaccctggcaaattacttaaactgtgtgccaccattttctcctctgtaatacggaggcaataaaaatttccacttttagattttctatatgcggtttacaaattgacttactctgaagatcatctggagtaaaatctggagaaatatgatcccttataacttcttcaaccctttatatatttcaacatgagtaaccaatgctctaaatatggatataaattataagaataaaaaatctaggactattataatggtctaaactctcttcatagctaaaagtgttgagtaattaaaccagttgagcagctaaatcatgtacacacttctttgatccctcccacgatcatgtatttggcattgtaatgaaaagatatgtttattttcgagaatagacataactacctttaataatatgatcacccagaaatttttacaaacccctggaaaatttcatgaatatcaggctgtgctcataaaaccttagagatgagatcacaatagactgggtcaacatatagtaatgagcaggattaataaaacctcagatgggcatttacaaatgagtcaaaaccatgagtataattaaataattgtagcaaaaaaagagccttgggtaatcctttcagcaaacgtaatcgaagtgattgcatttagaagacaaatatttaatttggtgactagaaggtcttttattattccattatgtctttgtgtgtgtgtgtgtgtgagacacttttcaaggtcaatttttacttataaattgtctctaattaaaaattgacttggttattaaatcattgaaaattggccatcatcaaattcctcattaaaatatttctatgtgccatatatatatatatatatatatagaatatatatgtagaatatatgtatacatttatttttactttttttttactgtgcctactagagaaatttaaactacatatatgtagaatatatgtatgttttaactagacatactgttaagtacactatacctaatatttggcaatattaataccatctcattgagaaacctggaatatatgcacattttggatgtctattatatgttgggcactggactagtcattgataatacagagattagtaagactcaggttgacttcagccatgttgtcaggaagcacacactctagtttgggacagcgaggagaaattcaataagagaaatatatataaggcataatgctctaggagaatatgcagtggataactgcccaataggaccaggcaaggctttttagaggaggaggtggcatttgagtcaagtgttaaaggctgaatggaaattcactggttgagataaactccttaggaggaactactttaatagaacttgccgttagtcctgaaataaatggtgtgcaaaatcattaccatctgtcaattcactcagtctactttgctcttaacttcagaaaaaaatcagaaatacaattaaaacatttgagcctattttactgtcttttaaaatgagttaattcaaagaggaaattaaatataatgagagagaatctcccccgaggattgggggctggggaaatgctattgattctttgcttgtgtttattttctctcaaaaatacattatgcataaacttgatgatcaaaaattcagattattacatttctaaattggcaatgcaatttattgcatcatacatcaatcacaaaaatgctcatcttgctgactttcataaacttctaaatgaacaaaaatgcaaaaatagtttatactatattacactatagtagatttgttaaactaaaccagaacaatggtccatgaaaaataggcctctgactccaaacgctcacaccacaggatctctctgagatttttgtgtcatttcaagtcagagaaaattgtctaataaattgttggcttgtaacaatgaaaactaagatatctgtggggctattcttgttctcttcattttactacagcagctctgcccagtagaaataaaatgtgagccacatatgtaatttaaatttctctagtaggcacactgaaaaaataaaaataaagaagtgaaattaatttcaacagtatgttgtatataacccaatatacccaaaacattgtcattttaacatgtaattgttacaaaagttattaattagattttttccgttaagtatttaaaatctggtaagttttactcttacagcgcaactcagttcagatcagccacatttcaagtgctcagtagccatatgtgtctagtggttaccatattagaaagtagtttgagagatccacattaaaccaaaaggaaaagaacttccggcccttcactgatgagtcactcttcactgctaaccttggaagcattcccaaatgtagtctacagagtttaaatagtctatcttaacatctctcagggcttcagtcttaatgccatagtatttttaaagaatggtggatattcttttttacagaacactctgtaagagcaattagaagtttatgatgcacgtaatgcaaaatacaggtcatttcccaagcctattttaaaagcgcaaaaactgtagtcatttatcacccctgagaatgttgtcttaaatgtcttggtttggatattggtgatgtgagaactttgtgataagaaagtagtctttaagaataagatatcagactaaaattcatatctagaatgaaagtcttgtttttaatggaagattaagagcaagtctgattcagatcatgcatggggtacactagtctaggaaaacactagtctgaaaatatactaaaagttacttcgcaacttaacaagaaaatgtcttgtgggtgatgtcgttcttgatttttaggcaaacctacctacctttgcaaagcagctgggacctttttgcattggaagaatcatttggagcacaaacaaaattagattatcaacactttggaaaacaactacgaatgagcaatcagaaacctgaccttaagattacttgtgaattgtgaatcagcaaaataaactcgattgttcattgctaagtgtatttcaattatcaagggccttctagattataagtagtcttttttttttacttagtttacaattaagatgtgtggtatttgaaatacatttgccacagggagaaatataaattataattaatttcctaggctaattcaatttatgacatacctatatacattatctgtcatctataatttttcccttattgtttacttcccactggaagaatgaaaatggaatattattacatggcacatggcttgatacttttacaaactctgacaattatgtatttattttgggaggcattgagtttatttgttttatttatataaatttatgaggtacaagtataattttgttacatgcatagattgtgtaatggtcacgtcaggccttttagggtatccatcaccttaataagatgcattgtacccattaagtaatttctcactctcataaaattctaattatgtgaatttaatttaatctatttaatgtgttttaggcaaatatagccggtactataaacagttgattttaagatatcattgcttacattgagactaagtaaaacaaaatgggtcaataaatgtcaatctagataacaatgtcaactaaataagaggtcaaacatggcagtatttttgaaggtgatctgtgaaagtgattatagcgtttacactcatggaaaatgccttcagagtttcaactaagaatgccaacagctcattcctttatcctgatgcatattgtcttccttctcacccccagttccttcttcccctaacccctacccgctttcctttgctgattttgacagaaataggacccccaataagtcagggagatagcaggaaatgggataggatagaacccggaatgatagaatagctgagcctgaaggcatgaagaaaggctcctcctgacatctaaatggagacctaagagatgggttggtcaggtagggggaaggaaacatgaggagtattctctaagccaggcaacatactgtgcacaagtctgaagtcatgggaaagtgattttgagaggattgctgcttggtaaacctagagtttgaattgggagagatgaagctagaaagttagtaagggtcagattttttttttttttacttgcatgacaatggtaaaaaccactaaaggttctgtgttaagcagaggagtgacttcatttaaaaaggtaaattggattgaaatgaagggcataaactgaggcaaaaatatccttcgttaagttattgaagcccagttgaacacactggtggcttaaactggagtattggtataagtgggggaaagaggttaatagattccaagttgaaaaaaaaaaaaaaaaacatagactttgctatctagtaatggattaatatacaaaaggaaaaagtaaagtttctactttttggacagctagaaaccttcaccgaagtagggaacccaagacttagattatgttgggaggggcagggtattttagttgcacagggatttgctttacagaaatgactgaatgacaatatagagagatcaattccattaaaagaagtttgattactcacagttctcaagggaagagtacatactacgccatgcaaagccatgcaggaaaaaagttccagagtcggtcagcaggcagaaaaggaaagcacagcccaaaccctttattgtggtttccaaggaaaagaaatgagtgaggtagaataggcaagtctgagcaagtttaggactggatagttcaaataatttccaaaatttcctggctgtaaaagtggtctctggttgtctggtaccaagccctagggtgaggggaaaaagttagggtgggggaaatattggtttggtgtaacaacagttagatgaagaaggtagttggggatacggactttggattagttggtttgtataacgaaaagcaatccaacaaatccacaagggagcaagtttacaagttatttgctatctttaggaattagctagccctgggaggggcagtctctccctggccttccaaggacctcaagatgttcaagcatccataaaatatggaaattttttaaaaacattataaatacacagagtaaacgctgggcatgatataggacagtggttctcaaactttagctccactggaatctcctggaaaacttgttaatatgcagatgaccgttttacccttaagcttctaattggggaggtctggggagggcacagataatttgcatttctacaaagttcttccatgattttgatgccgctggtgagggaccaggctttgagaacactgatttaggacgtgtcctgtttagggaatatccaaaaggcggacaagttcagggaatattcttgggcagttggctgtgtgagtctgaaattcaggatagaatattaagctgaaataaagatttgggagcttatctacagtcaaatgataattgaaatactgagagtacggggggagagaggtccatgtaccaagaaaagtgaaaatgactaatcccaagcctcgctgaccattgagaatggagctaagtgagaggagttaacaaagctgacccagaaaaagtcataagggccttaggaggccaaggaaaaaaaatacattcactgccaacgagaggcacttacgaatggcttgactggctttgccagcatgcatgaactgcttcataattatttgtattgattacagtaacagatacatattttaacaagcaacttaagtaatacaactgatttttaattatcttgtttaaattgataaaggttgtatatattcatggtgtacaacatgatgttttgatatacccatacattgtggaatggctaaatcaagccaattatcgtatgcattacctcacatacactttatttgtggtgagaacacttagagtatactcttagcaagtatcaagtatataatacattgctgttaactatagtatccatgttgtacaataggtctcttgaacatactcctcctgtctaattgaaattgtgtttccttcgaacaactgatttttttaaataaaaaacttaatacctgtaagttagaattcttaatggtcaccttaggagcctatacaattattcctacgttgttgttactattctgtgtctttttcttttttaacatctttaaaggtatcaaatttttatattttgaaagtagaatttattttttgtcagtctaaaatatttttatgttgaacaaaatgcatgaatggtaaacctagatgcaatcaatttttcaaataaaaaaagtagatacccatgaacatttcttttgtaattgcaaactgtcttgaaaggcagtttcaaaaagagtttagttcctaaattgtaccattactcactgcgttaaaatgcaacattcatttgagcgtataaccttttgatcaatttgtttttgatgtcttgttccctgagagttgtctcaaatagatacatataaatatacacatatctcagattggctctgagaaatgtcttgattcaaacgttcttgattctaagattcatggtacataggaactgtatggtgacaaccttgtcagcctatctttagagtagctttggattctattcagaacatttcccaaagctattctgctatcaagaatataaacaggaatagtcaagggaagctttttaaagggcaacattttcatgtaggcatttttctcacattgaaaactagtttactaaatgcagtgtattaccttctcattacaagaagtctttcacattagtataaatgcatatggcagttgtgccagaaataaattgcctctcaaactagcacatggaaagaagaattctgagatttagcacatatgtagcttttaaatagtatactctgtttcaaacattatgtgttagtccacgttctcttcagccattttcagttgcatttttactttatattcctttgtatatttatctttgctaatcattgtcctgagattcctttagctcttgaattctacgtttttaattaatagaaaactttctttttatttttcccccgacatagttgttttctagaaagaaacagttataggttataaatccaacactttagggccgacttgaacatgcatcaaagctactagaggacttgtagaaatacagattgaatggtcccatgcctagagttttacattcagttacagatagggtaggacctgagaattcacattgctcacaaatttccagttgattttgatggcattggtctagagaccaaaccctgagaaccattaaaaaacaaacaaacaaaaacaaacaaaccaaaaaaaaaactatatacagagattttcttcattggcttttgccactgaagacatttagatgaagagactccacaaagtgtaatcatttagttatgagaggggcctgataatttgcatttctatcaaattcccaggggatactattgttgctgattgagaaccacacttggtgaaacactaattaaaataccattaaaaagcaaaaacaatttaggccagcaaaacctcctaaagaatgaggcctaaagacttattttgttttatttttgccagaagcttcttatgggcaaaattatcaccaacagagctgaggttcaaacttgtgttcatagcaagcaaaagggataatttggaaaaaaagctgaggttagctttgtggttggtttgggagtgggaatgagtagggaggaagaaatttaaaaaaaaaaaaaaaaggaagaagccaaatattaaattgttcacagggcgaaaaaagagaaaaggagtaactagaaatatcttagactggttcggcaagtcgggtccctcgcagctaacagtggtcccaccctctggagtttatatgtttacattctttttttttttttttttttttttgagacagggtctcactctgttgcctaggctggagtgcaatggtatgatcacagctcactgcaacctccacctcctgggctcgggtgatccccccaacctcagcctcccaagtagcagagactacaggcaagtgccaccatgtccagctaattttttgtatttttttgcagagatggggtttcaccagttgcctaggctggtctcaatctcctaggctcaagtgatctgcccacctcagcctcccaaagtgctgggattacaggtgtgagccaccgcgcctcattggagtttgcattctagttgggaaaatagccaataaatttgtgacttattttcctttaaaaaaaaaacttattctggctattgtgtgactataggatatggaaggtgcaagagtatgaggctaacaccctgttctaaattccgtctcctctgagccttgttctgtcaagaatctcctccttctatactttttaagtcaccttcctactgatcctttgctgtcagcttaccactctggtacccttcattttaacaaacaaacaattgtccaagcttaccggtgctgctccttcacccctccacctgtacctagtgtcaattctctccctcttctgatggccaaactttgtgaaactgtagcacagctccatatgtgttcctgcaaaggacatgatctcattcctttttatggctgcagagtattccacagtgtatatgtaccacattttctttatccagtctatcactgatgggcatttgggttgattccatgtctttgctattgtgaatagtgctgcagtgaacatacgtgtgcatgtatctttaaaatagaatggtttatattcctttgggtatataaccaataatgggattgctgggtcaaatggtatttctggttctagatctttgaggagctggaagccattatcctcagcaaactaacacaggaacagaaaagcaaatatcacatgttctcacttaaaagtgggagctgaacaatgagaacacatggactcatggaggggaacaacacacactgaggcctgtcggggggtggggcgaggggagggagagcattgggaaaaatagctaatgcatgctgggcttaatatctaggtgatgggcaatagcaaagacttggaaccaacccaaatgtccaacaatgatagactggattgagaaaatgtggcacatatacaccatggaatactatgcagccataaaaaaggatgagttcatgtcctttgtagggacatggatgaagctggaaaccatcattctcagcaaactatggcaaggacaaaaaaccaaacaccacatgttctcactcacaggtgggaattgaacaatgagaacacatggacacaggaaggggaacatcacacaccagggcctgttgtggggtcgggggaggggggagggatagcatttggagatacacctaatgttaactgacgagttactgggtgcagcacaccaacatggcacatgtatacatatgtaactaaccttcacgttgtgcatatggaccctaaaacttaaagtataataataaaatatatatatatatatctctaggtgatgggttaataggtgcagcaaaccaccatggcacatgtttacctatgtaacaaacctgcacatcctgcacatgtaccacggaacttaaaataaaaattaatcatagaactttaaaaaaagaaaagaaaatgtagcagagctgcctagctcaccttctttacccacagctcacttttcagtccatttatctggctattactcctaccgtgccaggcaaactgctctcactaagaaaatcaatagcctaccccctgccaaattgcctgactcagcttctccttgtaattttctcctttagttctctaacaccctcttccccaggttttcacctgacctgtctccataggacatttgagtctctttcctgatgattcatcctcagcctcttccataataagtatggctgctccccagatcctaccctcagcacttcttcactttccatgccacatctcttctgtgatctcatcttcatccacggctctaattagtatctataagcagatgactctcaaagcatatgctgcctatgtacccctcttggccattctacattgacatctgcaactccccagtgaacttctatatttagaccacaggactggtacctgctgataagcacaggtagggtgtactgagtagtgttttctctatttggttgggcttttgctaaagcagttgtcaaatattttgagtcttactcatggccacagacattttaacattagcatgtcccaaactgaaatcccctactgcctctattctctatttcagaagatggcaccaccatctacccaattatttaagctagaaacttctgattctggtgagacttctctcttttatgcatatgtctacactgacacaaaagactgcaaattttacctcctaagtctgtcttaaagcagatttttctctatgattctctatggtttcaggcccttatcactgtgaagtcaagcatacctgattcgaatcttgtcaccgttggcaaatttttaaatctcttctagcctcagtttcctcataaagttttctgtttcttagggtgactaaagggcttaaatgagattaccatacagagagtaaggtacataaaatgcaattaataaagaatagtcactataactgctgatgatgatgctattactattcgtatcctagaaaactccggtaacttgttcactggtctttctgcatctagcatcacttcctcagccagagttatcttctgacatgaaggctgatgccgtcacccccatactcatgtttgaaattcttcaatacctttaagataaattcccacctccttggtgtagcatgcaaggtcacacatgacataatctctccaaggccccatttcttccactctccttgagtgatatatgtggcagaaaatttaaggctgcctggatattatccaccttacgtcccaatacttccatctgccgcaaagaccttctacccaacttcccatcctcaacgaattcttattctttctttaaaaataacctcaaacttcagactagacctctggtccatagggcattacaaatctctcagtaagttgtacaggatgaacacgccccctaaaactttgtttcagatatttcaatttttattttattttattattattatactttaagttttagggtacatgtgcacaatgtgcaggttagttacatatgtatacatgtgccagatatttcagtgttaaaggtttaataatcacatttacagaaaaggaattagctacaaaatggtggcactggtatacaagtatgtaaagatacagtgcttacaatttaggattattgttgtcgatgttttaatattaaaatggctaatcatacagcaaagtcgaaagaaatttacggtcaacatctgtatacccagcacctatactttgccattgaaattttactatacttgatttattacatattcatctatccatccctctttctgtgatcaatttttaatattctaatactcttacccttaaataataagttatcttttcaaaaaataatgtgtttttacatagatgaagcaaaataaacttgcccttgataaaacaatatgcactgtagtgccttctaattcagtgcattgaagtatccattaacaatataaccagagaatataaaacatgtttattaatattccactgtacctgattagatatagaccattaggaagagttattataattaagaatctaggtttgtcaatatagaaaaaaacctgtgttttttatcccactggaatgtcttgtgaggaatattgttcccctttttctaaaatttaactttgacctttattttgttaatgcaccatgggttaagccacactacgacatgtgctaaatagacctggaagttttcaaactaggtttttaaagtgtatttgacattaaatcttcataacaccttattgattaatttaaatccattaccatggtaaggaaaattcgcagacaggcaggtgaaaattaaaatagaaacaaaacaacatggtaagcaatccttccccccaagccaatcagcatgtagtcagtgtgtccttttaaattagcaaggcgcagcttcccataaagtcccagcttgattttatatgctgcaatagtattgctaaaataaaggagaaggcaacttttctctataatttttttctagaagttttcacgcagcttagtatactgcaatgaccacattactcagttccagaattagcagcattccattgtgaatgacttaattcacattgtgattactcatttaacaacattcttgagggtttacaatgtgcaaagcattacattaagtcgtgtgtggcagaggttctcaaatgcagatgatctgtgaagaagatttcctcaataagcagagaaatgagaactataaggacagaaagagagagagagagaaagagaaattatttaagcttgtagcttgtcatcctcctttcttaggacagcctaccatttaggctgagactatgtctttctgattatttcttgtggttgaaataccccttccttaacaatatgatggtaacagtggatggtaaatcttgttttgttttaatagtttacctggcaaaagtatcattttatgtctgtatcagttatatataatagtatatcagtccattaccaaaccgcctcaaaactcagtagcttaaaacagtaggtacttcttgagttcactaatttgtgggctgatggtttacattgggtagtttatctgctctgactgggctcccttgggaatctggagggtagctgagagcttaagtgtctgaaagtggctgggtcaacacagctctatcgctcacatcttgaacatccctccagcaggctaaccagcccgagcaagtcctttttgtgaaggctgaggtgaagagtggaagtgcaaacatgtaaacaatttgttgagcccctgcttccattaagcctgcaatatccgattggctaaagcaagttttatttccccctgtggtaggcagaatcatgggcccctcgaagatgttaatccccagaacctgtgaatatgctgtgctccctggcagtagggaattaatattccagacggaattaaggttgctaagcaggtgactttgagatggggagattttatggactattcagatgggcctaatctaaccacagggttcatataagtgaaaatggaagcaggagagtgggagtcagagagatgaagatagcccctgctggctttgaagatagagaaaggggccattagccaaacaatgttggtagcatctaatgctggaaaaggcagggaaatagattgtcctctaagcttcttcagaaggagtatagccctgccaacactttcattttaatccatgaaacccatttcaaacttctgacttccaaaactataagataatcaatttgtgttgttttaggccagtaagtttatggaaaattgtcacagaagcaataggaaacaaatatacgctccattgttcaatcttttgaataacacatatactattatttacttaatgtttttcttaaaatcagctcattttgttttctgcttttagccttaagtgataattcccacaaaactgtagtctgatgttgcagtgtttttttccttaatacagataaaactaaatgaatattaaaatttaaactataagctgtttatctgtgtaacatggtaaattggctccctaccactactgttcagcaaaccacattttgggaaacagcgatttaggtggttcaaaggagcaagtgattgtgcaagaacaagaatttattagagaaagaagcatttggccaatgggtagaattgttggcagacaaaggtagaagagaaagacaaattattcagtatggctctagcgaactctttgcacttttatcacacaatctgaagcttgctaatcttgacatgtcttaatgttgttggattgctcattaaactggctgaaatgttcacaaagactctcacctgtcttctggcttaagctgagatttatcacacttcttggaaacatcttctggtctccagatctccctcagctaagctatacagtcagtctgttctgtaagaaagcccaaacttctctgcagtgttcctcagtctttttgatatcatgatgaacagattaagttgatgtgttcatcatgatatcaggtaagctggccgaagactctaagctgcctaaccatcccagggctgagagggatcgatatctgaagtacctataacccaatcagggcatgtgccttagcatacccattggaaagccctgttttagagcctttatcagctgtgaacttattgaaggcaatgattttgtcctgttaatcattctattcataattttcaacaagatacgtggttgttgttaataataattgttggttgaaatgaagttaaataaatagcaattgacttttccaaggtgacgcattgcacagatttatttatcttccctttgctgccctggagtaccagttgtatctaccaataagcttcatttataggccagcctcatcttagtttctgaattagtctaagtggctctggtagcgcatcaaaaatcttgctttctgatggtctttgtaatttgaattctgtgacttacagacttggtattcaatatgtcaggaataaacctggggtgtgcccaaatggtttgaaaaatcccagccttcctgatttcctctcttctctttctcccctggccaccctaatagtctgatagtttttgttatttggatactcctaaactcttggcaatttttcttacatctgttctctacaggctgtcacaagtgagtggaggcaggatggcatgggctgcagtggaaagaccaagaaaataagttaaaagccctgggttccagtaaatgctctgtagtgggatttagggcaagtctcttaacttctctcagcatcaatctccgcatctgtgaaataagattaatgacacctgtcttgcctatacttcaaggttgttttgaggttcacatgcattttccaccccatatagcctataaatctctgatgcctacagataacctataatgttctccagtaagtttaatatttccaggattttaaaactcaatgactagcactgctctgatctaacataacatattgtgtcaatatgtgtgggagtctctctggttgatgttaatggaagtttgtatagtttacctaaaatagaataaagctataatattaatatatatcatcgatgtgttttaggtgatttttttcaatataaaggcaattttggttcaaaattaggtagaacatttaatttttactaatttacaaataaaatgataacatcaaaagggccccttcttttaaagataagttgtaactctcacattgatagtaatctgtcatttaggacagggaatccatgtagtttgaaaattcattggcatcatggagctaaaacagtggctttttaaacatgtcgatttcagttttctttgttttacaagtcaagtagtgatattactgggtacatatgaagcatactgattgaccaaaaaatagtaacaaattttgtaaacccttcacttaaccattattcacctttcccagccacataagaatcctttctctttgtccttagattaattgcctttctttaaccttttcaattctaagtccagacaagctgctgtggttctttaaaaggccacacaaaataagtattgtccagtgctaacactctgaaatgtgatattgtaattactaccaagtgaacattaatcactactagattagaatggaattacctgttatattcacattaatagcaaatgagctttccctgattgatgttgttataatgaatacaaaaggaattaatagtgatctggcactcaccaaaagaggggtagtcattaaggacatgccatcaaaaggcgggtaatactttacaaaaaacaagtattaattaaagtaatatcacaacgaatgcctattgaataacttatatccacattacaaagatattatatggttgcgattaatgtgattgcaatacattttgtaaaaattaataatgactaaccctttaaaatatttaggaagcagatatttgtttatatttgctaaatagctatgccaactctttagcttttgtgagtgacttctagcataggaacagtgatggataatatgaagcactatatataataactcatcggccgggcgcggtggctcacgcctgtaatcccagcactttgggaggccgaggcgggcggatcacgaggtcaggagatcgacaccatcctggctaacacggtgaaaccctgtctctactaaaaacacaaaaaattagccgggcgtggtggtgggcgcctgtagtcccactactcaggaggcagagcttgcagtgagccaagattgcaccactgcactccagcctgggtgacagagtgagactctgtcaaaaaaaaacaacctcatatatttttacttgaaaacatacattttgcctttaggatttttacttgttagaatatcctaaaggacctataattgtaaatgtaaaattgactaatttctgggttttaaaaaaaagtatttgaaagctgatctgctgtgaacattgaaccagatgttaagaaaaatgctagtaagaaatgagacttgggagcaaagaagcagaactaaacttttcatatatggtttctatggagtaattgagaacgtacatattaacagggatacaaagtcaggccctctcattcaagatgctttctgtctttaaaaaaaaaaaaaagtaatttttgaaattttctgtggcaacagtcccatagcagaaagcaaagagttttgaattaagtgatcagaatatcattcttataattttactacactgaacattatttagaaaattttgaatgatattaaaaccgctataaaacatacttgcctaccataagacttaggatttaagccagattaaaataaatatttatttagaaggatgtatgtaagaactggtgaaatataaatgaggtctgtatttgagttaatagtattgtgccaatgtcagtttcctagctttgatgataatgtactatgggtatttaaaatgctatcattgggagaagctgggtaaaaggtgcgtgagaagtctctgtactatatttgcaagttttgtggtcttaaaccatttcaaagtaaagttattttagaaaatatctaaatatatattttagaaagtattatctttttctctgtaactagtggctaattagctcagtctgaaagagtatgtagaggtggaactgctaaatatatttctgatctagacttacttgatgatgcttgaattagtaagtgaatgttatgtgccaacatatgctatgatacatataaatatataagattaaatgataggagctaattatttcttggcatgttgcagtgggtccatttaaaactgtttatgtaggaaactactgtaattataaaaatgagcacagcccaacagcccagtatattagttgaaatataaaaggcgttgtgtccaagatttgaaatgccttacaataagcttggcacttacttaccttcacacaaagcagacacattttattgtgattttagtgttccatattatatggtacagtaccaaaggaaaactctaaaatatgtactcaaaatcctgatgtgcccttctttccaaacaggtggcaccacaatgaatataacctttagagttaatatctgaggacaaacccagcagttacaccagcatgatttaggtcctgctgttacaattattattattgtatttatttcacaattaagttgcagagttgagctcgatatagttccagctgtggcttttttttcaactgtctcaatagttcatagatatggccaaatgttcaataatagtgaaagcttatagtccacatattatttctgtagcaccaattttatgtgaaaaaatgatttatctaaatctcagagaatttccataactagttttgttatacatctacaaaactaagttaaaagaacagagcagactttttaaatagctagattggccaaatccacctcattatcatcaagaagatactgaaacaccgtgtttatacaacaagaccaggcattgtaaaagaggaggaaaggtagagacaaaatttatttagccctcaggaatctttcattctgatagtgtaaatttgacaactttagagggacttattaacatgtatcttatatatcttgataccgaatatatattttgtgattgcattagagccatgaaatattacacaggtcatttgaacatagcattttcatagagaaggtgacatttgcaaaagattaggagaaaagtaactacgattagaaaatcgtagttttattttgtctcttgagaatgaattgatgttaattttatgtctgatttggccaaatacgatgtggaatttgctaaagactgaaaaaagaagagacatcaaatagagggttgcaagttaacagaccatgttataattaaatgagggaaaaaaaagtagagttgttaaactcccagagaagtcatttccccttggtttggtgcatttcactttggtggtgaagtaaatgaccatatgggcacttttctagctctgtccgcaggtagcactgggtatttgtggacaaattacctagcttttcatagcactagtttccttgttgatagacttcagaattctaaattccattttacatccttatttctatgtttaacttaaagataatcctttgcagccgggcacagtggctcacacctgtaatcccagcactttgggaggccgaggcaggcggatcacgaggtcaggagatcgagaccatcctggctaacatggtgaaaccccatctctactgaaaatacaaaaaatcagccgggtgttgtggtgggcgcctgtggtcccagctactcaggaggctgaggcaggaggatggcatgaatccgggaggtggagcttgcggtgagccgagatcgagtcactgcactccagcccgggcaacagagccagactctgcctcaaaaaaaaaaaaaaacaaaaaaaaaaacaaacagatcatcctttgcactggaattatcctgcagtggaggatagtaatgaaagtgtagactctgtttctgaacactagctatgtcactttcaaactgtgtgattttccttcaagtttctcaatcactccaggtctggtttctaaatagaggaataggagtagagattaatattgtgaagattaaatgagaaaacttatataaagcacttagtacggtgccctgcatattgtgaaggcttggtatgttgttagtagattcattttattatcattattaataatactgaaccctggctgttgggggaattggttctatcctcctgtctcatagtcaaaataggttaaagggccttctatctcttatttctggtggtgcattataattactaatagtaatgtgcttcatttgtatatgatcctttatagtttacatggcgctgttttatgtaatcttactaaaatttcaaaaataattttaaaaagccagaattcacaagaatgtgactcggagaagaagtagatgtttttctaagtagatctttcagtttaactgattcaaattttctcatgtttcatatacatgattatcatgtcttttgataaacagaatgttaaccagagtacaaccttgtatgaacatatttattcagcttagaaaagatccagaggtacaaaatctagatcccagtgtagaagttagcatacacagtacaatttctagtatgtccataaacaatatgttaaagtattagtttgagccatataggattgccaatatctgagtgttatagagctacaaaattagtaggaaattttgttgctttaacctaatcattaaattagaattgtgtgacttaaagttacaaatggtttccgaatattttgcagtaaaaaagtagtgaggaaaataaatataaatactaaactagacctgggaaatttaaggctataaagaattctagcttacagagagaggagtctttgtttgcaacctcccactagctaaatttaaattatcacaaatttcatcctctcctttacttaacccttgactcatgcaactagtcaaatgtctttttcttgctaattttttctttccatagatcacttatagggagttctggttaaaaatgatgtctctttaaccttcactaaaatgagaataggggaattaaaatgatatttaccacaaagagaaaaaaatctgggaggaaaaacaataaaataaaaaagataaaaaatttaggaatatgcagagaatggaggagttagcatatcttggaaacctgaattccaagtacttagaacttgggaagtcctagaaatgtgaagcaccagctactgcagaaggcagagatgaatgtgaggtaagatagtgagactgtgaagagaaatcattcagtaaaaaatgcattatcaagccaactgccactggtctagtggagtttaatcccactggggaaattctaaatggattgaagacatgtgtttaagagttagttattctttcaaaggggcaagggagctggggtatttatacacaaaatcctgctagtcattggtttaggactgcttccaacgggggaattattttcctagcatttctggcataccaccttggcaagaaaaattattttgtgtccagagtatgtctaaagccattagggaaaaaaaatgtggatcctcatagttgaaagccaggccagtctgcactaaagtggtaaggatgttttcttttagagatacaggtctaagaaagaaatctgaaggtggttacctcttatgcaagaatttaatttgatggattcaaggtgtgttggttaagagaaatggggaagggttgcttctcatgactgcggcacgattctactatactaaatttttcttttattaagcagcattgccttatgcaatgataggaaacatttgttatatgtgaaatcacttttatttttattttttaatctattcctattcttttcatttttttaacttttattttaggtttgtggggtacatgtgaaggtttattacataggcaaaccggtgtcacaggggtccgttttacattttatttcaccaccgaggtattaagccaactactcagtagttatcttttctgctcctctctctcctcccggcatctcttttaaaagaaaataatttttagcaattctttagaataagtcttggccacctaaaggtttccaggactctagttcagggagtatttatctaagtcagtagttcttaacctgatataatttcatccccagagaacatttgacagtatctcaagaaattcttggttgtcacattgggggcggggatactgctgtcatcaagtgggcagaggccagggatgctgctcaacatgttgtaatgcacaagacagccccccacaacaaagaattatttggtccaatatgtcagtagtgccaagtttcagacatcctgctctaaatcaggactgtgatgtgaattctctgcgatgatgaagatattttatatccgtgatgtgcagtactgtagcatatggctactgagcaattgaaatatagctagtgtgactgtacaccaggtgtgatgttccataccgaggaaagaagtagaaataagatatagtctttgaagtcagagctcacaatctagtagcggagacagatttttaaaaattacaatattttaaaaatattgcaatagaacatggtaatgttagaagattaataacatgctaaatttgaggcatcaggactcagacagacaattaaaaattctctgaggtgaatttccacccttagctcagaatactgtaatgtttaaaagctgttttctatacacacacacacacacacacacacacacacacacacacacccctttaaatcttttatcatgtaactcattgcttcttattttacccttttgtcagagaatacatataaaatactggaatctgatgggacattctactttatttaacaatgctattgagtttctcaaaatagtttcctaagaaagtctattaaagtattgattttttcataaaggataatacaaatggcatgagtctgtttaacattttaatcaagcttaaaattagtcttgcatttgaaacaaacttgcccagagaaattgttgagaaacttaagagaaaaacatcataaaaaattgatgggccagccaggctgtgagaatattaaaatccaaatctaaattatggttaaccattgtcacatctttctttgaagcttaagtaactcgatattccctgtaggatacccagtgattcaaagtgacacatatactgtcagctcattttccttcccagcatgctggtacaatttgtatccatagaaatatatggaaaaacctattagtcttgagtgccagaacctaccaaaaggaatctttgtcatctacaaataaattaataacataagataaacaatcctattaagttatactggcccgaaaagggaaaaaagaccagtttatgaattgacaaaagaaggtaaatgagattagccatatagcaaccactcagataataatgtgttttctctgtttagtaaaaaagcatatttgagagaaaattttcccttatagaacaattcttaataatatacatagatactcctttcctgggatgtagagtttaatcctcccctaagcccctccatgaacttggtaacttacttccagataatagaatatggaaaagtaggaataacaatggagaagaaaccaggcaggcaccaagttaactaagtagtcaagtataacatcgccagtgataataatattgatatcatgtctcctgtgatatgatgtcatgaaaaggacatgttatctctctggtattcttccccaaaacctgtaacttcttctaatagggaaaatacttcagtcaaatcttaagagacttctagaatatacctgactagtcctattcaaaagtttcaaggtcatgaagaacaagaagaaactgagagactgtcacagactagaggagaccaaaaagacccaaggaccaaatgcagtaggagattctggattggatcctgaaacagaaaaatgacatgagtggaaaaactggtgaaatctgaataaagtctgtagttttgttaatagtgttgtatcagtgtttgtttaaatgtttagataaatctctcatgcgtacagaagagttatcattaggggaagctgtgtgtcaggcacttagaaaactttcagatacataggtaccttttgtaagtaaaataatgaattaatgggtcattttatgtctgtattttatataaggctacatttctaaagagacaaaattgtgagtcccataaaaatataaaatgaatatgtgtaaaacattttattagatcattaactgatgaaggaattagtaagatgttagttacagttggttcaaaggagagtctgaagaattggcatatatatatacgtatatatacgtatatatacgtatatacatatatatacgtatatacgtatatatacgtatatacatatatgtgtatatatatattttatatatatacacatatatatataaaaaacactctagaatgctgataggaattttataacagatacaatactgatcactaactgtagggcaggaatctattgcgttccatgagaaaattttactggcatctagtgaacaagaatcatttgtgtcaccatcagccctccacaaattgacttttaaacgtacagaattgcaaaatagcataaccaaagtctaaggtacagactcttagataatcagataactcctaaggttttcctaaggaattaaagggaaagagacattctcagattaaggaaaacaaagaatttcttgctagcaaatctgctcttaaagaatgacaaaaagacattctctaaacagaaaggaaattataacgaagtcttgacatttcagaaagaaaatagtagaatgggtaaaaatgagagtaaaataatagactatcctatttaccataagtttgaagtgaaaactttaacaccacctgatgtggttctcaatgtatgtagagaaaatacttaagagttatattttaaaagaagacatacctaagtggaagtaagagtccttctacacgtcacctgaagtcaattccagtagattgcaatgttaatgcgtatcgtaatgcctggaaagaccactaaaaaactatacaaagtgatacgttaagaaaatacaacaaataaattttgatggaatcttaagaaatgttcaaataacccacaagaaggtaagaaaaaagaaagagaagaatgagaaataaagaaaacaaacagaaaccaaataaggtggcagattgaagccctaatatatccataattaccttaaatgcaaatggtctaaatataccaattaaaagagatttagctgagtggattgataaaagctgagcacacaatatgccgtctaaaagaagtttatttcaaatacaacctaggtaggttaaaattaaaagaatcgaaaaagttacattatgcaacaattaatcaaaagaaagcagcagcagtaatgttaatatcagataaagtaggcttcattgcaaagaaaattactagtgacaaacagggacattacataaagattaagtgttaattcactgggaagacataataatcctaaatgtgtttgcacctaacaacagagcttccaaatacatgaagcaaaaatgaatagagctgaaaaaagaaacagacaaatccatatttctagttagggacttcaacactcctctctcttcagttgatagaactactaaatggaaaataagcaagggtaaagagaactgaacaacaccatcaaccaataggatctaattgaagcactcctcccaacagtagcagaatacacattactttaaagctctcatgaaacattcactgatataagccatattctggactccaagcaacttcagcaaatttagagaattcaacttatatgttcccagaacataatgaaaccaagctagaaatcaataagagaaagacaaaagaaaaacctcaaaacacttggaaatgaagcagcacacctttaaatcattttccccaggtcaaggaggaggttgcaaagaaaaattttttaaacacaaagaactaaataaaatgaaaataaaacatcaacatgagtgagattctgaagcaaagggcaagcatatctactgtctatttttaaagattaagcttccttaagctcagggtttctctcctgtgatgcaatccactgtgtgtacaggtgtctcctgaacttctttgggattactctgtgggaactggctcaataaaatgttggttctttgactactgctttgctgtgagtaatctagtctttttctctggcaaaaaaaaataaagtgagatgtcataaaagcagtattgagaataaaatgtatagcattagattatttagttagaagacaggaaaggtctaaaataaataaatgagcctagagacaaaaaccatcaacaaaatattaaataacatgcgtcaaagtttaaaaaaagagtgtcataccataactaactgggatttagtattgaaggctggctcaacatttgaaagttaattagtgtaatctaccatatcaacaaactaaagaagaaaaaatcatatgattatattgattgatgcagaagcatctgacaacacccagcatccattcatgataaaaactatgagaaaactgggaatagaggataacttccacatcttaataaagggtatctacagaaaactacagttaatagcataattttaataatggaaggcttaatgtttccacccatgattgctaattagggaaggatgcccaatttcactactcttttttaacatagttctggaagttccagacactacaataaagcaaggaaaaacaataaagcatgcatattgaaaagtataaaataaaattatttctatttgtggatggcatgactgtgtacgtagaaaatatcaaatattctacaaaaacaaaagcaaaaataaccaaaaatgctcatggagctgagaagagaggttaacaagatccaaaaatacaagatcaacacaccaaagctagtcacatttttatatacagatgctcctcatcttatgatgggcttacatttagataaacccatcataaagtcaaaaaatcataaggcaagccatcacaacttacggattatctatgttggaaatgaagatgtgaaaagtgaaattaaaaacacaacaccatttataattgcttatccaaaaatgaaatacgtaggtataaatctatcatacatgtacaggatcggtatgtagaaaattataaaatgctgatgaaaggcattaaaaacaacctaaataagtggattatatggcatgtttatagactggaagagtcagcatagcaaatatgtcagttcttctcaaatcaatctaaaggtttaatttagtttctatcaaaatcttatcaaggatttctgtacacatagacaagcatactctaaaatctataagaaaagtcacaggccacagaataactaaaacagtcttttaaaaaggtaaataaagtgggagtaacctctctacccaatattatggctaacaatatagtaaggctatcaatacagtatgatgttgctggagggatagactcatagaccaaatgaaacagaatagagaacccaaaaacagacccatgcaaatgtgcccaacagatttttgataaagttgcaaaagcaattcaatagagaaagctcaccttttcaacaaatggtcctgcagaaattggacatccctagagtgggaaaaaaaaagaacttcaacctaaatctcacaccttgtaaaaacttaattcaaaatagatcatggacttaaatgtaaaacataaaactatcaaaatttagggaaaaatgagaaaatcttcaggctctagggctagaattggcattgaaagcatgatccacacacagaaaaaaatcagttggactgcatcaagatttaaaacctttgcactgcaaaagacctgtgagggaggatgaaaagacaagctacagactgatagaaaatattttcaagccatatagccaaaagatggatgtctagaatatataaagaactctcaaaactgcaaggtaaaacaagaaacaaacaatgcaattaggaaatgggcaagacacatcaagaaacgtttcaccaaaaaggatatacagatagcaaataggtgcatgaaaagattatcaaaaacattagccattagagaaatgcaaattaaaattattatatattcctacacatctatcagaatggctaaaacaaagtagttacaacaccagatgctagcaaggatgtggagaaaatggatcattcacatattgctggtggaaatgtaaaatggtacagccactgtagcaaactgtttatcaattttctgtaaaactaaacatgcagctaccatacaacccagcaattgcactcttggacatttatcttacaacctgtacaaaaatattcataccaccattattcattatagccaaaaactggaaagaacccagacggtcaacaatgaatggttgtacaaactacggtacatccatacataccaggcaatactattcagcaataaaatggaatgaaatatttatacatgcaacaacttttagatcaatctccacagaattatgctgagtaaaaacagctcatctgaaaaggttacataatgaatgattctgtttatatagccgtcttgaagtgacagaattaaagaatgaagaacagattggtgattgcaaggagtccgggacaacaggggaaagagagagagagagatggatgtgactccaaaagggcaacacaggaggcatccttgtagtgttggaactgttctttaccttgattgtgtcaatgtcaatatcctggttatgatattgtactatatttttgcaaggttttaccttcagggagacggggtcaggggtatactggttttctctgtattatttctcacaactacatgtgaacatacaattatctcaaaactaaaagtgtaatttcaaaaaacaaataaaacaattcagaaattttaagacttcaacagtcatttatctcatttgttattttactgttgagaaaacaggcacaaagaaactgaagtgacttactttcatgcttcacctaagtctttttttcttttctccatcactcagttaagagcttctgtaatacagaaagtatgtcttgtattcttttaactcccatattacttcaagcaatgttgaacacatgttaacattgtaaaagttgttgtctgagtaaatgggaaagatagaggtctatgtctatatgcaaatactttgtattaacatgtttcagtctgatataactttccacacagaaagtacaaaagaagatctgttcaagttatctgatttaattaagatagtaaaaagaaagctgataatttagggggtcttatttgattgtttttaattttacttattttccactaggtgatcattttgatgattcaaaaatgaaaatttacaaaaaggtataaaataaaaattatttctcctacctctatgcactgtcgaatcaattcccctacccaccaccaatcagtattgtcagctgtttgtatatccttcaggagatatgtacgaatttcaagcgaatatgcataagtttatgttatgtatatgtgtgtgtctgttttctatatatatgcatctttacattaatggtagcatacgatacacattttcttctgaattatgcttctctctcaacaatgtttcttggacattttcctgtatcagtacataaagaatgtatttgtttcctatgactgcaatagtgaaataccacaaactggatgacttaaccaaaagaagtctgttgtcttacagttctggaggatagaagtctgagatcaaggtgtcaggagggttggttccttctgagggctcggaaggagaatctgttccattccattcccctagtttctgatggtttgttggcaatctttggtgctccttgtcctgtagatgtctgccttcattttcacatggcatgccccctgtgtacgtgtctgtctccaacttccccttttaaggacagagtcatattggactcaggcccaaccaaatgacctcattttaagttgattatctctgtaatgaccctatctccaaatagggtcacattctgaggtaccaggggttaggacttcaacatttaaatttggagaaaatttggacagaattcaacccatagcaaagaacttaaccgttagtttaatgactacatattgttccattttgtggatgtatcataatctatttaagcagtgctctgaacattttattggttttcactttcattgttttgccttaatattggtgtctgtttcatagaatagatttatagtattttaggcttatcaagattttatttaaatcttggaatttaaattccctgtaaatttcaagtgccttgaaggcaagatatattgaggaggggagacttttaaagttcatatgaaataataaataatcgcaagtatctcaggaatgcatgaaaaataataaatgtctctgcatcaataataagggagggggcttgccttatccaatattaaacttgctgtaaagctactgtaatccaaatagtatagtattagcacaaaacaagacaagtagatcactgaagcaaaattgagagtccagaagcagatcagattgtttttggaggccgggcatggtggcttacgcctgtaatcccagcactttgggagtctgaggtgggtggattacctgaggagttcaagaccagcctagccaacttggtgaaaccccgtctctactaaaaatacaaaaattagctgggcgtggtggtgggcgcctgtagtcccagctacttgggaggctgaggcaggagaatcgcttgaacccaggaggcggaggttgcagtgagccaagatcgcaccattgtactccagcctgggcaacaagagcgaaactccatctcaaaaaataaataaataaataaataaatagatacaaattgtttttggaaacattatatggcaaatgtgttattttaattcaaggaataaaggtgttttattcaataaatggtgccagcactctttgcaattcctcttagaaaacacagattgcctcctagcttatgcaatgtaagaatacatttcaaatgcattaaagttttaaatgtaaaaacaaaaattcttggaatgaggaagacgttttctaaacaagacacaaaactcaaaagctataaggaaaaaatataccttgttactgcttaaaataacagaagacaaagtcaaaagaaaaacagcaaatagagtagatgtattcgcaacatgtgacataaagagatgcatatacctaatatacaaatttctcctacaaatttgttaattaaattaatattttttaaaattcaaacaacccagtacaaaactggccgaagtataggaatatgcaattcccagaagaggatatccagatagctggaaaaataaaactatgataatatgcttcctcatagtagtaagggataggaaaataaagaaataagacaccatgtctatctaacaaatagacagaaattaagaatgataatttttaatggaagagagcactctcagatattgcagatgaaacgcaaattgctgtggtctttgaggaaagaaatgtggtatgatctacaaaaattttaaatgcacttaccttttgatcagtcactccatttctgagaatcaatactacagaaataaaagtaccagtatgaaaggctgtatgtagaggatgtgtattttggcattgtctatgatggtcaaaaagtagaaatcaagcaaatacccttcagtgtggaaattattgaatatgttatggaattatttgggcatcccagaatgaattattatttagtctagttagagctgtgtctactgtcctgaaagaatggtgatgatatctttcaaaaatcaaaacaagtttcaattaacatattccatttttaaaataaaaaagataaaattaatcttatgggattacataaccatgaaggaggaatggagagatatatactaggttatcagtatttgttaccttggattttcaaaggagaatgaaagaggaacaaataatgtatcaagtttcacaaaaagtgaaaaggtggaatataaatattactgcaaatatataaccattgaatatgtatatggacaaggacgataagataatatagaaaactgaatatgttggttttattatgaggtggttggattgaagatatttttgtctccaaatactgttgttttaatatgttgtgttttacaaagaaacatgggctgagcagacagggaagccctgataagcatagtacctgccatgtggccattcaataaatgatagttattgattattattattagagttgtagtacagtagtgcctaccttaatatatttagattgatgcccagcagcattgagttaacccgcattttaaggacaagtgttatagctattatatactaatggtaaacttgagtctgtaactagcactgttgaaggaggacaacagagtaatatgatgtgtattggcctggggatggaagggtggtgcttaaggcacagcagattttcactccagccaggtttccttaggacctctccaatgaacaggatacctcccttcctgttctttctaccctcccaccccgttttttgctttttcagtttcagcccaaaggggaaggaagtatgatgactgactccccatcagtccctgaggtgaactgggattttgggagagtgtggcagctgcaaatttggcttcctggagataggatttttgccctcaatctggagaaagttcctgaggctacagctgttcaagcttgtgaagtaggaactttgatcccttttttcaaaagttttgtataattagcatccaacttgttagacagtatgtggctcattacaagattgccacaaattcatgctgggccgtgtctaagaacagggcaaagggagcctttggaaagtgttatacagttgaccctcaaacaatgtgagggttaggggcgctgagcccaacacattgaaaaatctaagtagaacttttcactcccccaaaacgtaactactaataggctactgttgacagaagccatactgataacataaagagtgattagcgtatactttgcattgttatatgtaatatatactgtattcttgcaataaagtaagttagagaaaatacgatgttactaagaaaatcataaggaagagaaaaatatatttactattaattaagtggaagtggatcatcatataggtcttcattctcattatcttcacgttaagtaggctgaggaggtggagggagaggaggggttggtcttgctgccaatctaaatgctgggcccagccaatgggtataagttttaagtgtgcacatattggtgaacccttacagatcacggcactgtctgttcgagtgtctattttgaaatgtccctatccgtaatataagttgcaaaggagtttgtgggcccactgaattctaccaccctgatcattgtgaagcccattcagctttgtgaagagcttatcttggtactaccttagccaaggtatgataactcagacataatgtcttttctttcatggttccttttttagtgatcatagattcagttctgtaataattagagatttatgtgtcctattagtaattgcatcattctttaaagacagtgtcaaccttgctatacagtgtgattgaagccttgacataacttgggggtttgttggcattttgaaatcccaggccccacttcaaaactgttgaatcagaatctgcattgtaagaagatccccaaaagatctgcatgcacaagccttgaaagagaagagaagccatctaacattcctcacctaagatttgaagaatttcccacttatgcaagagtaggggtgtgatttctcaggcaggatatctaacagaaaacaacacttatgaagtgtttcctgtaggagctaagcaggtggccagaaaatggcaggctacaaaggagaagaatgactaggaacctgagcaaggagaaagtctcaaagacaaggaagtggctggcagtgtcagggactaccaggcagctgaaaaagctaggtgtgaacactatttcttggagttttcagcaagtaagaggttcatgatgatgcctcaaagaatttacagtggaaccagagccaagaagtcttattgtggtgagttgggaattagggaaagtgttatacagttgaccctcaaacagtgtgagggttcggggcgctgagccctaacctcaagtaagaggttcatgatgatgcaatcaaagaatttacactggaaccagagccaagaagtctttttttttttttttttttttttttgagacggagtttcgctctgtcgcccaggctggagtgcagtggcgcgatctcgactcactgcaagctccgcctcccgggttcacgccattctcctgcctcagcctcccgtgtagctgggactacaggcgcgcgccaccatgcccagctaatttttgtatttttagtagagacggggtttcaccgtgttagccaggatggtctcgatctcctgacctcgtgatccgcccgtctcggcctcccaaagtgctgggattacaggcgtgagccaccgcgcccggcagccaagaagtcttatggtggtgagttgagaagtagggaggtggaaataaggaatggagatgaagacatgaaaggaatttgagaaatgaggcaatagctagagaagaatataggaatacacagatccagcaacccagcaagggaagggctagattctgatttcatgagcaaattgcctactaattaaattcacaatatcagaggaaactgttggactcacttactgaataatagctgaaaagtatctttgctttatagagagatcactgtagatgaaagtcatcttccagtggtgagatattcttcagtgtcatctcttcatttttatttctaatttttcttaatttgaattatttcttctgataatgggaatgatgtggtaattttgtctctcctgtaaattattttaaagatttgtacgaactcctttggcaggcttgagtgtgttgtgacagcttggcttagatatgcattgaatgtcattgaattcaaactccttaccaacatagttagatagcccataggcattctacttgaccctttcaaggagatctggagatgcaattgtaggggaaaaaagaagaaaagaattcaagaagcaacaaagtgaaagataatttggcttgcagaagagaggtctttctatcacagtaataataatgccaattatatgtccatatatatatatacgcacacatatatatagtatatatatatacacatataactcagacataattctttcatagttctttcttttgtgcacagattcacttctgttataattacatacttatgtgacctatttgttagtaattgcttcagtttcttaaaagagcatcaccttgctgtgcaaagtgtgattgaagcctcaacatctcttgggagtttttttagaattttgaaatcccaggccccacttcagaactgttgaatcagaatccgccattgtaagacaatccccaagggatctgcacgcacgttgcagcttgagaagcactgcagtatcacacatatacacacatattcaacaccaaagagagagaaagaggtcataagctctcaggtggagactagttccatgtatatatgcatagagagaagaacaaactctaccttccagcaacgtaaaattctactcaatcatgtattcaccaaaaaagaaaaggctttctccatataatgtgtattattcatatattggcactcttcagagctcttcattccaccctaatgttatctttcttagataattcacatgacactttgttatcttccaataatttctgtcattgttataagcgaaattattcaggctttatctaagagagtaaatcaaacagtatgcctctctcattccaattctgcaatattttcattctagaatgtctaaaggagccttgaaagagaggagaagtcacctaaggccagctagaggggatatatagcagggaatggtggcaactccactcctcgtagcccagtggggttttttttttttccaatctgtatttgtatgtgagtatcacgtctatgccgattttatgtgtacatatgtaactcaaatctgttcattgtgctagttagaatcttatttccccctcttctactacactctaccctttctctttcccctcctttggcaaccaagacactgagttattaataagcagattggagcaaacattttgatgcactattgtttgatagatttgttggttcattcaataagcattaattgagcacttgctaagtgttaaacaatgtactaattgctagatttaaggatgaaaatgataaaacccttggcctctagagcctagagtgtagttggggagacaaatgggcaaattagtcacacgacaacatattccttgttaaaacagacagttgtgcataagtctgtatacccagactggagatgactctgtttccaatgttgccctgggaaacctcatgatcagtttaataatgatgtttggggtgagaggatactgagacagtttgcttctagcatagtaattacccatagaagtttggggtctttattcaaaagagtttacaggccacatgagccactgtcttgccttttataggatcacatctaagttccgtgtcatataatggccttggccttcttggctttctctgtgctctttgcctgccaataccctaattattgaagtactgtctcccgcagctcctcaaccatgagctgttcccgatcctcccagcagctatgtttctcctttcttcaaacctctttagctttttatttgtactttatttgtactaaattgtatttagagctttggagaacattcttcatagttgtaattagactgtaaagtcctgagaatgtatttttcatcttcgtagccccctgcagtatctagcagaatgcctttaaacaaatgggcagtaaataaatcccaacaaacttaaattaaatttctccaaattgcatatttaattttatagtggcatttactgataacatacattgaaataaaggccagagcataatcctctctgtttctgaatattatttatttaaatattaactttctaatccaattaggtctttcaatgacactttagatctaaatttatttttgcattgttttaaatgtcatcaaatgattcatctcttgtgttttttaatatttttggaacgaacgtgtgaaaatgagcaagtgtcatcagaatatgatgcttgggtttttttaattcaacatttctttgatcatatatttaaagactttttctcaattcctttctggatgtggcctcacaaatcatttcagaagtcaatccatttcaagatttttttttttttttttgcttttttcacttcacaggaagtcaagttcattctttaaaatgtagcaaatgattaagcaaattcaacgaatgatcttcatcaactccgaggtgtttttcccccttgaaaaatttaagttactattatttttttttctttttttttttttttgatacagagtctcactctgttacccaggctagagtgcagtggtgtgatctcggctcactgcaagctccacctcctgggttcacgccattctcctgcctcagcctcccgagcagctggtaccacaggcgcctgccaccatgtctggctaattttgtgcatttttagtagagatggggtttctccttgttagccaggatggtctcgatctcctgacctcgtgatccacccacctcggcctcccaaagtgctgggattacaggcgtgagccactgcgcccggccaattattattattttttttaaacttcacctatcataaatcttttaaaatttcacctatgataaacttcctctgtcatctggggaattacttaaatgcaatgatggccttcaagtatactaccaggcagcctatccaaatcatgaaacagaaaggctcatagaccaaattaaaatacttgaatcacagagtttattaaaatcacagtgagaagcaaacgggaaagatatgtgctaagttaacacgcttagaatagagtgtaagcagactgtgaagattagagtacttgaattctgcagtacacaacattatatgtcttgtctgtctctgtattgcatcagccttcccaattatggtgtgcttacaaggaccaaagttgacttcccaacaagggagtccaaaatgggtggtgcctgattcagtggcatgtggtttatcagagacacagagacaagaatgcatggccacagctgtaacttgccaaaatagcctgatgactagccatgtaattctcaggcagaagacttacggtgctggaataggtatcacctatggatgcctgaattaagaccttgtgaacattaagtgctcatgtgtatttatttgatcttgaatatttagtgcctcttgtatatttggtctcatgtgtatttagcatattatgaatatttagtacccaggtgcctcatgaatattgggtatcttttggtccttctatccctcactatctatgtttagtacacacatgctctgcttgctaactacttatcttctaattaacacattccaagagccaattatgtgtatctctttccactgagttcttcattcaatgacatcaagttagttgcttgaaatcagctattgtgagagcacttacaccacagaaattggcaaatgctacaattagcgccactgccctcccctagagccagttatttgacatttactagcattccactacttacatggcccttcatgctctcactccgtgtgaccactcaagccttatccctctttactgaactctacaatcaaataaaatatctttgtttcttgcttctggccctccatcaaatggctccctctcctaggaacaatctgtctctcctctatcacctttgtttagctagttaataatcccttttcagacagcacctcataaatagattcctgaacatcccaaaccggatctcctgcaccttcaatgtgctacttcagtacatttgtcttaccctttgccatatggtatttcaattgcccatgaatttgtattcctgtttagatcttaagctttgtgaggtctttttgtacttttttgtacttccgtatacctaccacataataaatatttaatgaaagcattaatgaataagtaagtgaatggagtgagtgaatgagtattcaattatgattcatttgtatcaaagtgataacatatacttacagggaaaaggccagagggggaaaaaataaaaaataataatatattttatgtatgaccttgtgtggggaaaggaacatagggccactgcctggcctgcttcttttatgcaaatcctaatgtaaaatatgatcaacgcctggctgggcagaaatacaaaaacccagtactagtgattctcccaaccagataccagctagtacagatcatagccagatttaactactgtgaagtggttaggttagaggtgacctataaggaaatgacgctaatgatcattagcatcatcttggaagcttaaaaaaatgccccagctgtaccccaagccaatgatatcagacttttgtggggaacccagatatcattgtttttaatctttaatgattccaatttagccaaagttgagtctcaacaaaccaagttcttcttactctcatattctcttcttctcgcatagataagaattaacagccagctcttctacatgtttcttagacacatatattgtttcagtggtaattcgttaacagtgcatatgtcagcaaagcatgactgaaaaaaatatctgctcccacacattctgatcccatcttgacactgcatagctgttggcgaaggcaatttcaacaatgaagaagtgggagaaatgactacattttatgtaaatatgtattcattgaaaatcaaaaggacatatgtaatgatattgtttaagattctaaatgaaggacaatacttaagagtcctctgtagtcaaatttctcagcagtaaaaaaacattgtcttttctttacaactattaaccatatggctgtgaaaatgttattctacaagcctttaagatttgaaatctgactttatgttaatacacagaatttaccacacaatcctgtatgatttctaagtagatttaaagagtagctattgctcaccttttcaacataatggtaatgatggtgcaatgtcaattacatgatactctcatgggcgtgattatatgattgttaacacactgaagtgcttatatagacatagatactgatttttatatgtacatatttaaaacaaacaaggacttaaaatggcctgtaaaagtctttctagtcagtctttctggttttggacagagaacaaataatcccttacagctgttaggttggtgcaaaagtaattgtggtctttgccattgcttttaatggtaaaaaaaacgcaattacttttgcaccaacctaatagttatctacttccatctttaacgggccctacccaagactgcatggtatataagtaagaaatgtaaatgaaaatctcaaatgctagatctgcccaggaggggaccactaatgagagaggaaatgttaacgtcccatatgaactaagctcagcttagcatttacccttcctgctattccgctagagcagtgcttctcaaaagttgacctgtaatggaatcttctgaatgcctttttaaaacgtagctggctgggccccatccccagagtttctgtgtcagttggtctgggatggggcctgagaatttgcatctctaacaagttctcaggggatgttgccggcccttgaatcacaacttaaaaacctctgctctgaagaaagggaaagctctctctgctggatttccccaagcctttttcagattttcaggagacttctgtgcggtagcttgcttccttctttccatactactactactaccactactactactacaaatagcaacctctagcatattttcagtactaaatacccagcactatatatacatcacaaaagtcccttgaggaaggtggtattatcatctccattctgcggataaggaaatagataagaaatttgctgaagatcgcagagccaaatgagactcaaacccatgtaacccatgtctgtttgactttaaagcccggaatcttaatttgttccagacaagctcattatgtgctctgatcttcaccactgaaatgttctgaatatgaggctgagggcagcagtgaggttggaaggagcagcccagaggagcaggcactgtgctggtagaatagtagtatggtggggcctgcactccctaataaaagaaggggacaatgactatttcctccttctccaaggtcgtgctgcctcccatttctctgtctgcctggtaagaagcagctctgggccatgtgtggtggctcacacttgtaatcccagtgctttgggaggctgaggcgggaggatctcttgagcccaggaaattaagaccaaccctagcaatctagtgggacttcatctctaataaaaataaaaaacttagctgggtgtggtggcacacacctataatcccaactactcaggaggctgaggtgggaggattgcttgagcttgggaagtcgaagctgcagtgagccgtggtctcaccactgcactccagcttgggcagcagggtgagaccctgtctccagaaaaacaaaaagcagcagctctgaaaagaggatctagcagtttctatatgcaggagagcatttgcgcaattgttcctggggttgaatctgagaaactcacagtgcacattcagatactatttacaatcttctaggaatagtataaatattgtggccagggcaccttcatattgtgaaacacaaaaagacttcagaccttagattatgtgtcgaaagttaggcaccaatgatttttttttccatttgttcttaagtggcaaatctttacattaacatttttggtacttgtctttagggaaatttcttctctgttctgaatgtatatattgtaattcctcatttacaattttgcctgcaaatgcaagtgagtacagatcatccagttatgaaaatgctctgagatttgagtctagctgtttcagctttaagagccctgacctagactttgaaactgacatggttttatatgtatgtggttggaattaaacccaaagcacatcttttaaaactctgaggaacttctgtgccacagctttcgctcagttggtgagattttactttgaaatttaagggatgagtctagtttatatgcaaagaaatgtagggagctttgcaaacccaatcaaatcctttgtgaacagtgtgtgcatctgtttattttgctgtcattttgagtccatgatcctgtatactgttttgtgggcacatattgagggtaatatcaaataccatgtagaacagatgctgcaggtatcctttccatgtcctcttagctttggggtggtagatgggcacatggaccaagcccaaagtgacagggtattaacaggagcaagactcaaccaataagggagagtagatgggtacaaatctcagctttctctcccctcactgggataattttgagatatattccaaagatcctcagagcatccccaacagcattgagccccagttccccagattagtaatctactcaataaatacctcttttttttttttttttcccgagatggagtctcactctgcaccctggctggagtgcagtggcacaatctcagctcactgcaacctccacctcccgagttcaagtgattctcctgcctcagcctcttgagtagctgggactacaggcatgcgccaccacacccaactaatttttgtatttttagtagagatggggtttcaccatttggccaggctggtctagaactcctgatctcaagtgatccgcccgccttggcctcccaaagtcctgggattacaggcatgagccaccacgcccagcccaataaagaactctggattgtttcttccttttcctctcctcctttcctgttccctacagtgtttcctaggatcacctcagtctgctgtatgggaaacccagactgagtcaccataacagacagaggcattgttactttaggactttagtggatatagttacatgggagagagagactgtgtatgtatatataacctttataatattaaaccatgctatactcaaattatttactggccaagatttccaatataaattggaaataaattggatataaatcaagaacagttaaaattggaaatagttaaaatacaaataaaatagctaaaattgggcaaaatacctgacccaatgctttaatatccgattgcataattaaacgagtaaagaggaaaggaaattattagcaactctatatttaaatgcaactgacatccaaggaagtcatgaagaaaactctttgtgttgataaactgaaggcctcttctagcagacttctgtgtttattgttctgttgctgactattttattccaaacaaatgaacttgcttgtcattataccccacccttccctagtacagggcccccattctttgaaacagtaactcattcagttccaaggagaatatgaaaagggagggtaatatataaaagaactgaaatgaaaagtggcctaagtgtggcacatttccattgtggattccatggcaatggagaattgatggcagagcatggtgagagatgtgaagcatcaattggctgtatctccagggaattcctgaagttcagttgccaccctggagggtggcaaatgctctctctcaccttccttgagttattgcttagatgactcaaaacaaaaaactgatgagctataaatgggctgtattatttgtttttacctgctgagtagttcagatatttcaaaataatctcaaacttaacctatggtgtggtttctgtgttaaacaaaataccgtaacttttagttgaaaatactgtgtaagcccacacaatctcttgttcacagataatcttgttgtcaaacattcatgatgacaaaaactcataaacgattcttttaaatatcaagaataacttatgctgtaagtcataatttcataagcatgaatttatgaatgtgttttgtgtttgcaattttcatttaggttgtcttaaaatcatgcgttttagcttaacttaggagaaatatatcttttgtgacaacataggatattcagagaaacgtgaaaactaggtgatgtgttttatgaaagaaggcataaagtatatcaagcataagaactttgaattctatttgtgttttttgtggctttagaaaagattgttctgggaatagagaattccatttgggaaacctagcacatacacagtagcagagttaaaatactgacttggagggttcatttgaagaattctatagaatttttgcatgttgggaataggtttatattcttaaacattgcactcagggtttctattcaaagcaaaaataactttgcatagaccttggccattctttcacattctaaagtaatccatttttttttttcagggtagttgttctcagtcctgattttctgataattcagatcatctttaatttacaccaaaaacttttagaagagtcagataataatttaacataaaatgtaaatgactgaaatatacattttttaaaggagcagatatggaggggtccaatgtacttaactatttgctctctttgtctccttgcattcacgggaatgtttctatgtagttttctaatttcacacaatttcaataatccataccctcctcatttttatgggccttcatgatactaaaaatgttaccagaaattattttgtgttagtctctttgtttagcacattcatacataagttttaacatttaactggcatatttttaaagtaatacatgttttttttttaaaaaaaatcagttatgtttgtgtgtgtgcatattttcttttgtggccaaatgttgcacgccctagtccttctatttaaacaatgagtttacataacaaatgttacatgataaacatgaagacatttagtttgaaaaaaaatgattttctagtttactcatttaaaaaaagctgaagtaaccgggaagaggagtggcagaacatattagtctttttcataatgccatcattaaacaaagatacttaatttccaggcctggtgcagtggcgcagcctgtaatcccagtactttgggaggctgaggagggcagatcacttgaggtcaggagttcgagaccagctttgccaatatggtgaaaccctgtctcaaaaaaaaaaaaaaaagaaaaagaaaaagctacataatttccaaaatgacttcagtgggacctgaggtgagggaataaaggctctggagtaatttcactctctattcctctcctaattttttttctgttcctttataacaacattttcactacttttgagcttgggagttgaggaatcatgaccagaagaaaaggaaagacgggaaagatgttcaagggtgaggatgcttaagaatgacctggcaagcttatgaaaatgcagttgtctggatcccaccacagagattctgatttagcaggtctgtggcaaggcctgcgattctgcattgctaaccagctcccaggtgatgacactcatgctggcaacctatgaaccattgagtggcactgttccagggggcagggcaatgagaaattgaagtcaaaagccccaagacctggtgctacgaaaatactctggttccttccctctcaactgatttacttgtcggtgtgattttgcaaaaatccctgaacttcttaaatcccagttacctcacctgaaaagtatgagtgttgctccagatctggaggctttcagaccatgcaaatcgaattcaaaccatgcaaaccattcaagtcattctagaaagttctgcaaggtgcctcagaggccaaagggagagatgggaagagggattgaatgggctctttccaaggttccctaacccacttgaatactttcatcttttatctctttcatatattccacttttgagtatggtttcatttagaaaataggattttataccaacagatttaaagaaaaactccaagtctgaaaatgactcatttatttaaaactgtatagaacaaagacatttagtgcacaattccaaaaattctctgatccttccacagcatgcccagtatgctgcaagagtgccagcaaacacatgcttactgctcacaaatgtgaaatttaaccccatgcactaggaggtccctagtgtggggtggttttagctaaccagactaagagagtacagggcaacatcgagcctttctctgcggtcatgtctgattcattaaaaatccagctttccccgaagatatattaattaccttctgtttcagaatttgtttttagagcctaattcttaattatatctccagccattgtgtgatttgaccattttggaactaaaaagttatcctatgaaattccacctccaactattgccacactgttagtttgtctatttcatacaccatgccaatcttagcgtggtgctagcatttcattataaccagctttcatttttaataagaccatgtgtatatgaaattgtagacttcagtctttgtatgaattgaaagctattaatcttcccagggttaggttatgttaaacagattgtaatgttcttctttttattatgttatttaaatccccttcatttcatactgcaccaatacatttctactatcttggaataaattaattccagttacgtgatggaaaattttagtgtaaaaatataacctgcagtataattttttctgtcagaataccaactagaactggtatgtttcattctaattggaaatttgagttatcgctttgatttttaacagtgggaaaggaaaatgaagattgatatctttcaatagccgttcattcattcttcattccttcattcattcacgtattaagaatagtctatgtgctaagaacagaaagagtgttagagatatgaagattaataagaccagatccctgcctgcaggcatttcctattctatgtcatagatagggggctattctgtttagaggtaaagcatgacccacattgcctctgacaagaagcataatgtctgtagcagctaactgctggagacaggaggctagagggctgccctggtaattggtattcaagtcttcaagaaaggaaaccagctattccaaaatcagtgggcaagaggaagttgtaaagttaagtgaaatgactaaaatatgaataactaaaggttggaatctggtagaaggagaggagagcatcggtcagcaccttagtttgggaaggtggtgtggccatagtaggctttatttagaaagaagcaattcttaggtaccagctaggtttcagttccttaaggggagaaaactggcaaaatataggcaggtttccagggtgcaaagccacgttctagcttcagctcaggcaaggccctggggtatgaatcaccaccagagtagcccagccaaaatgactaagggatctaagctggttgctaatgaaagaggttgcagctcaaggcagctctgctgacgcccactggatactgggattacattgatttaacacatggaaaccacttaatatggtatgtggcacaacacaattaagtactcataaatatttgcagataatgctgctgccattgctgtttttgtcgttagaagactcgggaaaatcatctaatacaggaatccatctgttggcggggcttgggcttctaatatttgactggttgatttttgtcgacccaatcttaacaatattatacacagccattacttcaggaaaggcagttgtaaagaatggtataaatttcctgtaacttgactgccacattctagctgagtcacctctatatacctcagtttctttgtatccgcagtgaagattaatgacctcatagggttgttattagaatgaagtgaattactacactggacttatttaggacagtaactcgcacatagtgagtgctcaaggaaatctcagaccctgcctgctagtggagggtccagctcctgatacatttgggggcaggtttaaggagttcattgatttagagctgtaagggctgatctttcaccctgcatgtcttcagcaactgtggctggtaaagtccagagcagtcaaaggctgacaaatccttgttagaaatcacaaatgcccattctcacaacttctgtggtgttttccatcctttccctagaatactttctttttaaggcaaaggaaagaataatcactgcagatagcacacagtatttttttgcaacatattttcaaaaattatgatgagaaaagtgtatcattcctgtgaagaaacagcataaggaaaatgatttgagaaagaaacatggttcttaaactgaaacaagtgtcagaaggaatcccagaaggcagaaggaaatatagtaatcatgatgaagtctagagctcacaccggttaacagaatggcagcagcgatattcatctcacgcctcttccatgctgtccctgagtgagcttctgctgaattgcctggctggtgaggattggtttcagcagcagaaggaatgggctgccagctgaaggctctggttctgatcctgggtagggtcagagaaagcaagatgtgaccatcacttttgaccttggtcttgaatttgattccatggaacaacgatattttacaaacccagttgaaggtttatccctttttctattcaacacagggagagtccttagagccccaggaagacttagccctttttcattctaagagtaaaccacatctaggtttccagagatgaaaagaccaggctctgatcttccttctggaagcccttgcctattcaacaagcatgagtattaaatgctattgccttggaatcataattcagttttcacagtttgggctatgtcagaaccattcttgtcaaccccctgttttctgagaacccgaaacctgcttgtttagaattttagaatctacttgactcttacaggggagaaaagatctcttttctcacccatcgctaggttcatggctgaggcacctataatgaaggacaaatcaacaacataaaagcatgcgaatttatttaatataagtttcacatgacacaggagccttcagaaatgacccaaagaatcagggaaaagtgtgtatttttatgctctgatttgaggaaaagtagatgtccagtatgactggacaaaggggaatggtaataaactggggtgaccacagcaaggcctgtttctgcagaacctcctgtgtccctgtgttttcagaggtaaaaattttcctttccttccagtatagtaagggcacctctggtatgatagtctcatgacctgcttcaggggagaagggggaaggggaaggtgagagtgaccatcctgcttctgctgtcttctcaaataccaagctgccatattgtggattttggagtagcgtaacttgaatccttttttttttttttttttgagacggagtctcaccctgtaacccaggctggagtgcaatggcacaatctcggctcactacaacctccacctcccaagttcaagtgattctcctgcctcagcctcccgagtaactgggattacaggcacatgccaccatgcctggcaaattttttgtatctttagtagagatggggtttcaccatgttagccggactggtcttgaactcctgacctcgtggtccgcccacttcggcctcccaaagtgctgagccaccgcacccagccgcatagcttgaatcttatcaataccttaaccaaatgactctgacagttttcctcttcttatctaaattcttgagggtcacccacacttcccaatgtcttttgaaacttgacctcttttctgctgaattgaggaagatacctgatttctttaacctcaccaaattcctacttcttactgttgttcattgctggctgaaaatttactttggcgagttcaccaagaacatacttatcggttcactgtttatatttgcactcaagataacacttgaggccctgctactcaaagaatttagtgacaactttcttcatcactctcatatcttatctgtcatcaagtctttttttcctcgtaaaaatgcttttagctctttaagtatgtttcatatctataatagctaagataggctaacagctataatatattaaacatccaccaaatggactattaaaatgacttaaacaaaatagaaatgtatttctttctcatgtaaacagtctaaggtgaattcatgttagttggtgttggatgtgtgtgtgggaagggaggggtgacacccacataattattcaagaatacaggccaggccaggtgcagtggctcacacctgtaatcccagcactttgggaggccaaggtgggcggatcacctgaggtcaggagctcgagaccatcctggccaacatgatgaaaccccatctctactaaaaatacaaaaaatagctaggagtggtggtgggcacctgtaatcccagctacttgggaggctgaagcaggagaatcacttgaagccgggaggcggaggttgcagtgagacaagatcatgccactgcactccagcctggcgacagagcaagactctatctaaaaaaaataaaataaaataaaaataaaaaataaaaaataaattaaaaaaaaaacaggccagcaagggtcttccatctgcaatagccaattgccgaggttgccctcctgaagatattcagccagcccaaaggggaatgagctagaggactgcacacggaggcgtcccatgtcctttgactcaaccttctactggctagaactctgccctgtggccacatgtaacagcagaggggctggaaaatgaagtctagctagatacctaaaaagaagcagagaaaggtttcaagagcatttagcaaccatatccaccttattcatgccctgccctctattcgcagtggccccgcagcactgctcaactagcttgctgcattggcctcttatctcttatctattgccttagatccatctaaatgctctgctactcttatgcctggaatatgttttcaagatgtgactaatcctctcacagcttgaaggataaaaggtcaaactgctctggtgaatgcatgatgcctggtcacctctgtagccccatcttccctgacactttcacagacagtattccctttactccaacctgtgggagtattttctaattcacaataatagcaggaaatacaatgtggaccagacacagttctgagcagtatattaactcatgcatttcttacgataactttataaggttgacagtagtagtatccctatttcacagagaaggaaagagatacagataagtaatttacatatgatctcacagatagtaagtggtacagcttgagtgcatatgactcaaagggtagaggttctagattcttaatcactgtattgtactacttctcccaatgttatcgtacatgccattccgtcttcctggaatacccttcgtctttcttcatctaacttccactcaaactttaaggatcaatttaagcatgccttattttaggtagccatggttgacatcagcctaatttaattgctactcatctatgtccccatagcgtcctttgcattcctctatatctctctgctatagcagtaaatgtaccaccattccgtaaaatccttaagggaatgtttagttttatgttcccaatgccagcacaatgtccagaacagtgttgtcccatagaaatgagagccacctatgtaatcttaagtattctagtagccacgttctttaaaagtagaagtgaaactaatattttattgaccctgatatatccaacatattattatttcaatatgtaatcaataaaaagtattaataaaatttgctttttccattctaagtctttgaaatctggcatgtgtctttcaattgcatcccatctcaatttggacaccgtattttcattgaaaatatttggtctcacctgcacacgtatgtttattgcggcactatttacagtagcaaagacttggaaccaacccaaatgtccatcaatgatagaccggattaagaaaatgtggcacatatatatcatggaatactatgcagccataaagaggatgagttcaagtcctttgtagggacgtggatgaagctggaaaccatcattctgagcaaactatcacaaggacagaaaaccaaacaccacatgttcttactcacaggcgggaattgagcaatgagaacacttggacacagggtggggaacatcacacaccagggcctgtcgtggggtggggggaggggggagggatagcgttaggagatatacctaatgtaaatgacgagttaatgggtgcagcacaccaacatggcacatgtatacatatgtaacaaacccgcacgttgtgcacatgtgccctagaacttaaagtataataaaaaaaaaagaaaatatttggtctctatttacatttcataaactttatagttgaaaaaagaagattcacattcctaagttgttccaaacatacacaaaagtttttcaataactgaaccaagagtcaatttttaaatttatatttaaatttaataaaatggaataaaaatttgttaaacttcagtctctccgtctcactagcctgatttcaattgctcggtagctacctacagccagtggctcctgtgttagacagagcagcacagccctagaacacagtagatcctaaatcgatgtttattgaagaaattaatcaatgacagtgtagaaaatttgcagtgattatgtcagaatcaatagttctccacccattttctcccacactctcaaaagggccaagttttatatcaccaaatgatattcctcttacttctttctgagcagaaacagttttggaaattaagatctttttcaaattttccagactcggcattttagcagcgtttctatttgtaccaacaatgcctttctacctattttccttgcttcttaataagttaactttgtgcgaaggtcattttgtaggtcagtgtaatattgtgcattaagggcttctaagttttctggtattataagaactccttggtttccttctacttttcagaatggaaaatcctcagagcaattttcatctaaaagtgctgcatttaggttgtttcacaattccccaaccctgagtcaaatataggttggtgtatgagcagcagtgtctcttggctaatcaagagcgtctccttttgctacgctcagtgttagagaaatggagaaagtcagctgggtttagagattaggtgagagactcaggcatatcctttgataagtcataaatcatttcctgtttagaaaagcacatgtttagacacccataaaatctccaaatgaagggtgttttacttttccttcaaaatctcactgggaaaaggtacttctgactttccaagtgaataaaaataatgactcctgattaccatgtatgtttaaactgatttgcaaagcaagtgaaaaagagtctagtgagtagtgataagcatcttttagacatcagaagatgtactgatttaaaggtccgtatcattttataactagtatctattgagattcaaatggttattactctgtgtgaatctgtcttttctaattgtttttacttattttagaatatcgatttgtgaatattaaattcctaagttttccagcaatccagtgtttgttttggatatccagcctggatgcagaatagctgcagaaagttatcacaaattgatctctatattctgtttccgagtggcaattgtcaaaaatttggggtcatcggctacccctcccacccctaagaagttccttgtacttcctctttcaaaacactcacatcattgttcagtgcctcacttctctactaaaatgtaaccaaccacaaagatagggactatgtctttcctgtttactggtggattctcagtatctagcaccatgaccaatgttaatagacgttgaatcaattccagttgttacctcttcacactgggacaaaagtccttgcaagtattctgctgccatttgtatagattcaagccaaatatgtctcaaaacgatattacagatgatctcttcgttgttcctctgacaatttctttcccccctgcattgcttaacttgattgacaatgacccctactacttataacatgtgccttttaggtagtgcacttggcactacattttatgtgatagttttatgatgctaaagactatttgctgtgatgatgctgtgttctcacatggcatatccagatttatttatgctggtgaccaaaggcaggtagttaaccttgaaaataggttaaaatttgaaaggcagcaaatcttagggctagaatttataatttatctttaaggaatcttgaaaccaggtgtgaaggaagggacgtaggctagaagtacagaaacctgggttctgctccagcactgatgttaagagcaagttgcattgcttttctggaccttaattttctcttctggaaaatgaatagattaactggaacaaggaaggaaaatacgtgaatggcttccgtttctgtctcgtttacccctgaaagacatggctagtcagtcagctctgtatcagagcacttctcaaggcaatgctccaggtagctaccactcactaatgagagttagcacataggtaaaacctctttgtcatctctaggctacttcatgtttaagatactctccagctttaaaattctaataactctattagactgaaatttaagaatacgagaataatcatccctcaccatgaagagagagtctgaggaaaaaataatgagaacgaataacccttctcttttactacaattcaggactgccatgaagagccgtccagattgtgaaacatacaactcatgatgtgaatggtacttctttgtttttctcggtgtacaacttgcacagctgttcatggccctctgcttccacaaattcatttctaaatagctgtacctcagttctttgacttctagtatgtctaatttaatacacatttctagatttacgatatataagaaatatctccatgaaggaaaaatgtaatagcccatgcttttcattataatagaattttatgaaacaatgtcttttaaaaacagaaacatatgtactactacttcgcaggacattagcccttgtatataaatcaataatacaaaaaattcaaattaccaaggattagaaaagactgctgtgggatatcttctggtgcaagcatacagttatttatccatttctttcatgaatatttattgatgttccaaacattaggctagacactagagacacatcaataaataaaggaaataggtttgatctctatcttctttgatctgtagtttagtgggggaggaaggaaattaaacaagtaactactacaggttgaacatccctgatccaaaaacctgaaatccaaatgttccaaattccaaaactgtttgaatgctgacatgacatcacaaatggaaaactccacttctgacctcatgtgacaagtcacagtgaaaatgcaggcacaccacatagagtttattcagcatccccaagggaagaaagatcctctcagcccccgttagctgtgatatatcttttccacccacacccagattccatcatacaagcaaacccacaaaaggtacgaaaaatggcacatgtgcgggctagacgcgacaacggcaggtaccctacaatgtccagcatggggccaaaacctacgtgcattaatcactgtgtttgctggtatattctctggtggtgtcaagatattgttgaaaatgccctaaaggcctgcatgatatccatagggtaatgcaaatattccaaaacctgaaatttgaaatactttcagtcgcaagtattttggatatgagatattcaacctatagatggtaagggtattactatgatagtgctacgggtgtacatcaaggtaattgaccctggcttggcaggatgcagaaggctttcccaaggaagccttacctcagctgagacctgaagagaagcaggagttagacaggtcaagttggggatttggaggaggtggagtcccagcagatggaatactatgcataaaggcctggaagtgagaaagtcatgtcatgttatttcaagggactagaggaagcttagcaaactggaggcaagaagatagcttcagcacactattgaaattgtccaggtgagtaatgatgatagtgtaactaagttgtgatacctaggtatgtgagctgaacctatggagaaatgttctaggctagagaatctttaattggatatttaattatcagtatatacgtaattaaaaccttgcaagggtttgaaatggttcagagtaaagttcgtagatgagaagagggcctaggagtgaacccaggaaaatggcaaagtttcaggggtaaataaagaaaaataagctttcagtggagacagggaaatttgcagttcagtagataggagacagactaggttcgtgtgatgtcacagaatccaagggaagagaggttttcaagaaaaagtaacatttagaggtgtcaaatactacaaaagcatcatgaaagataagaccaaaatatatcctattaatttagcaacaaggaaggtattgacaacctttatgcaagtgatttcagtgttgattatggagaactcagtaattacttggtggtaactaaagaaccaagattgcagtacgttcaggcatgattgagaattgagaaagtgggggagcaagtgtaaaacaattattttaagacttttggctgcgatgggaagagagaaagggccatagtagcagaagatggatgtaggggcaggaagaacacactcttaaaagggtagtgacttacacatgtttaaatggcaatgagaagaagatggtagagagggagaggttgaggatgcaggagaaattagagataatcaatagcacaggtacttgagaaggcagaaagatgaaatttagaaattagcttcagataggaaggaaagtacagcttctattacaacatcaggggagaagggaaggaggatgggcatagctactggtagttttgtaagtttggtgaaaggttaagtaggattgttgtattggatttattttttattgaagtggaagctgcagctaaatgcccagtgatgaggaaggtgttggagtctgagatttaaggtgagtggcaatttgaaatagctgctctaggatcctatttaacagagaaaatgttgagtacacaatcagtgagcagttttaagtccactctattctgtttgcagtttcaagtacctttcattgcttctaagtttatgaaaactggttcacaatcttcttgtgcttcttatttctacctcttttccttctgttttctcacctccccagtttaaacagtcccgaattttttacaattaaatatacagcaactgccatgaaatctactgataaaagatactgcaaaatcagtttgggattgggttcattagcttacttattattatcaatcctaggccactaagcaaccttgcataaaatgcataaaatgaggagattctagtggaggatagttttcaattatctcattaatttcaggccatgtgactagtccaaatagatattataggccaagaagagcctatcttgagattttaactcccaggataggttttctacctgatcaaaagaatctaataactattcaatctcttcttaaatggtttggttttctgtgcaaacagttttacccttttagctgattttctaggtgttaaattaagaaaattctctcagatacttgttcatcatgtactaggatccctgatgtgttcagagttgtccaactttcaaagggctttgcattcagagtacctaatctaaaccctgatatcattcttttataacagaaaaccccggattagactgggacagtgtctgtcatgttcatcactgcatctccctcagtatttgtagaatgaatgaagggacaatggcaaactatagtcctaccatcacacttttggtagtgaggagaactgctgtaacttggaagattggagggggaaaaggtggctaaaacaatcatacagtaaactgggctgctatcaagagaaaccatttgtcaattttggcttttgttgccattgcttttggtgttttggacatgaagtccttgcccacgcctatgtcctgaatggtaatgcctaggttttcttctagggtttttatggttttaggtctaacgtttaaatctttaatccatcttgaattgatttttgtataaggtgtaaggaagggatccagtttcagctttctacatatggctagccagttttcccagcaccatttattaaatagggaatcctttccccattgcttgtttttctcaggtttgtcaaagatcagatagttgtagatatgcggcattatttctgagggctctgttctgttccattgatctatatctctgttttggtaccagtaccatgctgttttggttactgtagccttgtagtatagtttgaagtcaggtagtgtgatgcctccagctttgttcttttggcttaggattgacttggcgatgcgggctcttttttggttccatatgaactttaaagtagttttttccaattctgtgaagaaagtcattggtagcttgatggggatggcattgaatctgtaaattaccttgggcagtatggccattttcacgatattgattcttcctacccatgagcatggaatattcttccatttgtttgtgtcctcttttatttccttgagcagtggtttgtagttctccttgaagaggtccttcacatcccttgtaagttggattcctaggtattttattctctttgaagcaattgtgaatgggagttcactcatgatttggctctctgtttgtctgttgttggtgtataagaatgcttgtgattttagtacattgattttgtatcctgagactttgctgaagttgcttatcagcttaaggagattttgggctgagacgatggggttttctagataaacaatcatgtcgtctgcaaacagggacaatttgacttcctcttttcctaattgaataccctttatttccttctcctgcctgattgccctggccagaacttccaacactatgttgaataggagtggtgagagagggcatccctgtcttgtgccagtttttaaagggaatgcttccagtttttgcccattcagtatgatattggctgtgggtttgtcatagatagctcttattattttgaaatacgtcccatcaatacctaatttattgagagtttttagcatgaagggttgttgaattttgtcaaaggctttttctgcatctattgagataatcatgtggtttttgtctttggctctgtttatatgctggattacatttattgatttgcgtatattgaaccagccttgcatcccagggatgaagcccacttgatcatggtggataagctttttgatgtgctgctggattcggtttgccagtattttattgaggagttttgcatcaatgttcatcaaggatattggtctaaaattctcttttttggttgtgtctctgcccggctttggtatcagaatgatgctggcctcataaaatgagttagggaggattccctctttttctattgattggaatagtttcagaaggaatggtaccagttcctccttgtacctctggtagaattcggctgtgaatccatctggtcctggactctttttggttggtaaaatattgattattgccacaatttcagagcctgttattggtctattcagagattcaacttcttcctggtttagtcttgggagagtgtatgtgtcgaggaatgtatccatttcttctagattttctagtttatttgcatagaggtgtttgtagtattctctgatggtagtttgtatttctgtgggatcggtggtgatatcccctttatcattttttattgtgtctatttgattcttctctctttttttctttattagtcttgctagcggtctatcaattttgttgatcctttcaaaaaaccagctcctggattcattgattttttgaagggttttttgtgtctctatttccttcagttctgctctgattttagttatttcttgccttctgctagcttttgaatgtgtttgctcttgcttttctagttcttttaattgtgatgttagggtgtcaattttggatctttcctgctttctcttgtaggcatttagtgctataaatttccctctacacactgctttgaatgcgtcccagagattctggtatgtggtgtctttgttctcgttggtttcaaagaacatctttatttctgccttcatttcgttatgtacccagtagtcattcaggagcaggttgttcagtttccatgtagttgagcggctttgagtgagattcttaatcctgagttctagtttgattgcactgtggtctgagagatagtttgttataatttctgttcttttacatttgctgaggagagctttacttccaagtatgtggtcaattttggaataggtgtggtgtggtgctgaaaaaaatgtatattctgttgatttggggtggagagttctgtagatgtctattaggtctccttggtgcagagctgagttcaattcctgggtatccttgttgactttctgtctcgttgatctgtctaatgttgacagtggggtgttaaagtctcccattattaatgtgtgggagtctaagtctctttgtaggtcactcaggacttgctttatgaatctgggtgctcctgtattgggtgcataaatatttaggatagttagctcctcttgttgaattgatccctttaccattatgtaatggccttctttgtctcttttgatctttgttggtttaaagtctgttttatcagagactaggattgcaacccctgcctttttttgttttccatttgcttggtagatcttcctccatccttttattttgagcctatgtgtgtctctgcacgtgagatgggtttcctgaatacagcacactgatgggtcttgactctttatccaacttgccagtctgtgtcttttaattgcagaatttagtccatttatatttaaagttaatattgttatgtgtgaatttgatcctgtcattatgatgttagctggtgattttgctcattagttgatgcagtttcttcctagtctcgatggtctttacattttggcatgattttgcagcggctggtaccggttgttcctttccatgtttagcgcttccttcaggagctcttttagggcaggcctggtggtgacaaaatctctcagcatttgcttgtctataaagtattttatttctccttcacttatgaagcttagtttggctggatatgaaattctgggttgaaaattcttttctttaagaatgttgaatattggcccccactctcttctggcttgtagggtttctgccgagagatccgctgttagtctgatgggctttcctttgagggtaactcgacctttctctctggctgcccttaacattttttccttcatttcaacttggtgaatctgacaattatgtgtcttggagttgctcttctcgaggagtatctttgtggcgttctctgtatttcctgaatctgaacgttggcctgccttactagattggggaagttctcctggataatatcctgcagagtgttttccaacttggttccattctccacatcactttcaggtacaccaatcagacgtagatttggtcttttcacatagtcccatatttcttggaggctttgctcatttctttttattcttttttctctaaacttcccttctcgcttcatttcattcatttcatcttccattgctgataccctttcttccagttgatcgcatcggctcctgaggcttctgcattcttcacgtagttctcgagccttggttttcagctccatcagctcctttaagcacttctctgtattcgttattctagttatacattcttctaaatttttttcaaagtttttcaaaagcaatggcaacaaaagccaaaattgacaaatgggatctaattaaactcaagagcttctgcacagcaaaagaaactaccatcagagtgaacaggcaacctacaacatgggagaaaatttccgcaacctactcatctgacaaagggctaatatccagaatctacaatgaactcaaacaaatttacaagaaaaaaacaaacaaccccatcaaaaagtgggcgaaggacatgaacagacacttctcaaaagaagacatttatgcagccaaaaaacacatgaagaaatgctcatcatcactggccatcagagaaatgcaaatcaaaaccactatgagatatcatctcacaccagttagaatggcaatcattaaaaagtcaggaaacaacaggtgctggagaggatgtggagaaataggaacactcttacactgttggtgggactgtaaactagttcaaccattgtggaagtcagtgtggcgattcctcagggatctagaactagaaataccatttgacccagccatcccattactgggtatatacccaaaggactataaatcatgctgctataaagacacatgcacacgtatgtttattgcggcactattcacaatagcaaagacttggaaccaacccaaatgtccaacaatgatagactggattaagaaaatgtggcacatatccaccatggaatactatgcagccataaaaaatgatgagttcatgtccgttgtagggacatggatgaaattggaaaccatcattctcagtaaactatcgcaagaacaaaaaaccaaacaccgcatattctcactcataggtgggaattgaacaatgagatcacatggacacaggaaggggaatatcacactctggggactgtggtggggtcgggggaggggggagggatagcattgggagatatacctaatgctagatgacacgttagtgggtgcagcgcaccagcatggcacatgtatacatatgtaactaacctgcacaatgtgcacatgtaccctaaaacttagagtataataaaaaaaaaaaaaaaattaaaaaaaaaaaaaaaaaaaaaagagaaaccagtgctctattatctaggtatataccaaggttacccactgcttgactctcattattagccttctttgatgttctctggtacttgatgtctttcataactaatcaatgtattaatgtatccaatcatttactcgataactttattgaaagcaaaagcagttgcataccagctatcaagctggaagtgggagatacagccgcagacaaggcagatatggtcccagcccttaggagctcccagagtagcaggaggtttccccttccagtgtcttctctctgcttttcttcaaaaggaaaaggctgatgtgtataatataccatatctctttgaagttctctgattatggattttaggtttaaaccagttcttcatccatgactttataaattgaaaatccaggattttgctgtgttgttgtgttcttgttttgttttgatgtccctgttttctctagatacagttagaaatgtctaggaagaaatttttggttagtatgggagccccacaaagccatttttttaaacataaaatctgtattacatatcaggtatgaaatacagggggaatgaatcatttctccgtaaaggaaaatttaaagtaaatttcaggaaagtgaattctttcccgtttgcattaccgacagatgcagaaactttaatcgtcatttgctaagagggatatggcagataatacacaatagatgtcgtagcaacattcactcgcattctttttttttttttttaaagaaatctttctttcaagaagctattctaggatctttctcatgacagtgtcctagttcttatctttgctacacacaggctcacaaagtgttttctttgaagggcattttgttattggccctcttttcatttttcttttccgtagcaaacagaaccgaaggtgtttactccccacggtgagagggcacctgggtgcacaaacagtggtgtgaaccactggcctttctctgctttccgttccctgaatgtaagaaacaggtgcagtgatcaattcactgcgtgcagtgaaccccaggcagaaagagaacgtcgtgtcacagaccttttgttacttggagagaatgagcgggaagaaaggctgcctctgctgctactgagacccttttgcccattttattgactgctataggttcatctatcctaatttgtctccggctgtcccagtttatccctgttattcttgtgttactttactttactatattttattttattttattttatttattttagagacagagtcttgctctgtcacccaggctggagtggagtggcatgatcatagctcactgcagcctcaaactcctgagctcaagcaatcctcctccttcagcctactgagtagccaggattatagctgtgcaccactatgcccacctaattttttttttttttgaaatggagtctcgctctgtcacccaagctgcagtgcagtggtgcgatctcggctcactgcaacctccacctcccgggttcaagcgattctcctgcctcagcctcctgagtagctgggattacaggtgcccaccaccatgccctgctaatttttgtatttttagtagagacagagtttcgccatgttggccaggctgttctcaaactcctttaactgtttttttatttttatttttaatttttaaaacatattgtagagataagagtcatgctacattgcccaggctgatctcaaactcctggcttcaagcaatactcctacctcggcctcccaaagcacctggattacaggcatgagccagtgtgcctgaccctgtgtgattattattagcatcctggacactctcaaaagtgttcaggtttggacaatgaactataggatcaccctaattacatgagattaagagtagagaccttgaccaccagaaatggtcaatactcaccatatattttcttcctgatgttagaacctggtacttttgggaaatgaaattgtacatgagatatatgcagaatgggcgaagggagcgaaaagatttaaaaaattaagctcgatttattgagcgcctcgagtgcgctcagtgctgttccaagtgctgacagcagagaggtaagttctgttctccagtgttcacctcacacgtgcaagccaggtttgaaaacacactgtctttccttagtatccctccacccctccatgtgactatacgtatgtatcaagtttgtgatatttcacttctgggcttcttttcatttggaaatttaatgtcagtgtatcatgttttaattaataggacatcatgttatgaaactgttgaatcgaatattttccctaggcatcaaattacttgtcagtggaaatttgacatctagatatgagggacaaaagagatgagaaaaataatagtaaagtgttcctaaaggatgctggtatactgtttaggtattttaatgcactgttacaacctaaagtgtcttgtaaagtatgttctttagaaataaaataaataaaacaagacatctctccataggtacaaatccacttgccttcctcaattcctatccttctgtgatgggaaatctctgctgtgacaaagaaccatgttaagaaaaccataaagttgtattgtttgtagatttttttaatgactaaaggaagatattgcaagtagtagaaacaaatagaggaggtggccctgaaggtcaatataacggagttcactgcagaaaagagaaactactctaggtacgttagacacatatcaaagttttggaaaggctaaagtagcaggttttagacttggcttcgaggacagatttctaaaactatatagaactgatccaataagaaactaccatctccggggtaccactgaagcaatgatttcaagaacatactttgtaaataggaactaggaaccaggaggttgaaatctagacgctaccacttttgaagctgctgttagcaactgcccttctccagccaggaagctggagaaagaactttggaactctgatgtaggaaatctcatgtttctttgactaagctcgccaacagaaatagccaaaaggggcagaaaggtgacctatgcctcacttccactttccagatctctcacaagtatacacatttggcaaaacgttgccagatttagcaaataaaaataatgcatgcaacatacttaacactaaataaaaaaagattgtgtagaaaatttaaatttaactgggtgccttgtattttatctgacaaccctaacttattatatcctaattcataatcagaacactagctgcatggaagtctggcaaatacagtttttaatttccaacctgtccaactggaaggatggtaagtagatttaggtgagccagttcacagtattaaccaaagtagattgcctaccaagaatagctaaagcctttctgcccccagacgcttatgctaccatctgaatatttttactttgcattcttatattcttggaaatcctatcaatctgtgattcagattggtttggtttaactcagcttccccttttttttggagacagggtcataccctgtcacccaggctggagtgcagtggcacaatcatggctcactgcaacttcgacatccctgggctcaggtgatcctccctcccacctcagcctcccaagtggctgggactacaggcacgtgccaccacaccccgctactttttgtattttctgtagaaacagagtttcgccacattgcctaagctggtctcagattcctgggctgaagtgatccacccaccttggcctgacaacgtgctggaattacagatgtgagccaccatgcccagcccctctttttaaaatataaaaatctcccagaatgtgaaagttgtcagtctatactttgggaataagattttcaacagatagaagagaatgaggattaaaacataaggaagtttgggagtagaaaatatgggcaccagaaggtggaaggagagagcagatgcccatttatatatctcctttgttgggtgttggacaaatccaggtcttaaaataggaagtatttcttttccgtacttcttgaatctttcatatcccaaaagatgcatatttcccaaatcatataacccaaagtcatgctatcaaaatgatataaatcatccatggtataggttaaatagctatatatgtatatgctggtctgagacatgtatatgactattgtgtccatggaaatttgagtttggggttctggaccatttatttgcaagtgatttttggttagagaactctttgtaagttggggattgcttttacttattttatgagtaaagatgtcaaaaggatgactgctaaatttgcactgtgttaattcactatttagtgagaagaaatattagactagctatgaaaagtaaaactgcctctccaaaaagtcaaagctgatgaaaaacagtcatacaagcacaatgccgctcttcggaaacatggaaacactttttccttcccaattttccctcagattttctcttccgcatttaaaacacttgggtggttcaagtttctaggctaccactgattgtaacagcaaacagtagcaactggaagcagtgggatgttgggagaagtaatagaggtagctgctacccaagttatcctggaggattttccatggcaatgaaatcaggtagtagaagcttggctaactgagtgtaagcaaacagttctactgagaatggtgttgtcttttcaatccgtttatctgtgatggtgatagtgtgaaacaggggaattttatccaaggtttaaggaaggttatttggttaaaagaggatattgttacagtgaagtcaaactttccattaactttttgctgtaacaacagattgaacgtagcatttcaccgtcaacgagtaaagtgaaatttacagattaacttatgtgcctcttttaaaatatatcagatttctaaattgcttttatttcagaggtatgggaggttcactttctctttgaaagtgtacattatttttctagtgtcttacatctgcctacaaagatgttattttacttgaaagcacagtaactatttgatgagaatttgtcagcatcagtaaattaaagaccctcaaatgatttctactaattatagtttaattccgtacatttaatgatattttaaaacacatgagttatttcataactcccaacatcacaaggataaattttattctacaaacaaaatattgtgctaaatgaaatagttcatttaggcaaagaaaggagcacagaaaattagtggaactctctgctgtaagtaacgtagacattacatggcatattgagtctccatgaatattgtcatgttatgttttaaaaaggtgatcgaacatatggcatttaaaagttccaagtcctcttttaaatgcttcagaatctattatttaatgatcatcttggatctcaaaactgatcttttgaaagattttattcgccccatgtgttaatatgatttccctgtcatatgatatgattatctatcaatacttaaaaccagcagccaagtaaaaaatcagttcatatcatttaatgaatactatgagtcaggatctgggtaggcaagctattttcgggtttgagtagttccaaagcttaaaaatcttatattgattttacagtgaagaagaaatagtcttagctactttggaggtttcaaacattgactactcaaggagtatttccttgctttctcaggcaccaggcagtttttcaggagcaagcattcatccattcagggaattgtaacctgtagtttccacttttctagcaatcacacttaaaaccatgagagtaggccataggacataaggagctcagcttctcagggcaagcacatcctttcagctttcacctgtccgtttgttagtgttcacttccgtgctcaaggagtttcttgttgcctctgagttctaagagacagaacgaagggagaagggtgcagaagtctaacgcatgttcatggacttatctctccaataaagagcttgttttatcttcttttatttatttattttttctaatgaagccattagcctcaaacaaagccatggaatcttatcagagtgaaaccggggtcattccataggctggctgagtgagagctccatggcacgatgatgtatggtcactgcacaacaacgcctttgccacaacacatgtgccttttaattacactttaaatctcatttgaagagatgttatcattatggaaattgctctgtaaatgtgcccaggatgagacccaataaaagtttgctgagaagaattgaagacagaggagatgaatcagcagctaaaacattaccatcagacagaattttcttggctgtaggcaaaacagcccatgcaataacagaaaatcttcattgactcagaggcgtattttccctagattattatggggcactcctgcctgtagcactatcacttctttgataagctgaaggaagcgttctgctctccagctcagcgggcctttttctccccaacctcagagccatcatttgaatttatagttgccaaaatgaataatacagtattgcccttgtgttcctgacttcatgcatgcatgcagagcggggttaaggttctttaaatgaaagattgccttctattcatgcaataaagaacacctctgcttcctttccagggtcatttaaaaataactataccgctgggctatggaaagcacataagaaagattcttagggtaaagtcaaaatgctcttttctctacaacaggcattgtctcatatctttgtgtagcacagctgatttgaagttttcttttaagcacattcttaattatcttttcctttgatcttgaactgtttccctgggctaccagacagagagcctagagccctacctccgctttccccgaggtgcaaactgctccgtccttccacaggcaggcccctggctgaatgcacccttttctccatggttacccacccacctctctgttatttgttacttcccaagtgaatggcaggttaaaatgggaaaaggtcaggttatctgaatgtggttagagtgaaatgaatttcctcattgcacccaagaactgtcctttgacaggtctccttccccaaatcgggtcattttgtacgtaggctcactgggagtaattctaagacaactaaataagtaaaatcacattttggtgccattttccaatgtattcttcttcttgggggttctcctttaaaatggtactggaaggatacgttgtcttcattaatccattgtatgtcccgggggtggaggtggaggtggcagtagcagaagcccgtgaagtaataggtcgtattttgtgtttataaatatttctgcaggtttttgaggagaagatccatcattcttataaaggcattcatgacctccagaagattaagggctgttatgctagaacagtgtttcattcttaaaatggggtctctggactagcagtatcggcatcacttgggaacttctaagaaatgcaaattcttgagttctaccccagacatacagaatcatgatctctcagagtggagcccagcagcctgtgttttaatgagccctctgggtgattctcaagcccactcaagtttgagaaccactgtactaagggaactactgatgcatgatgcaagttcacgctcacaggcacgtgtgaatgacacaaagaacacagacgcctgagagagcaagaaagacaacatagactgtctgactccctgctgggcccttctttaccgcccctatttcaggctaccatgcccatgagtggatgacacgtaccccccgacaaaggtcaacaccactctcccttccacaccctatcactaagtgacaggctaagcctatgttaaactgctcacatctccttggaaattcaacactttaataataggtagcattatcacccccatcttcttctctaagccagaaacccaacttgcctccctatatgttatccttgcattcagtcagtctctaagttgtattcatgatctctcaaaaatatctccctttttctcatcctgtgtctattacctcagtttagatctccatattctcttgcctctaatgttcttgcctctaatgtaccttttcactgccaccaagatgatgttaccaaaaaatcttaaacagattagacatcttcacaggataaagtccaaacccttagcttgatacacaagccccttcacaatccaggccctccttcctgtgcagctatatatatatatatatatatatagagagagagagagagagagagagagagagagagagagaaattttgatcttaccactctgtctctcttcccgccatgggtcttcccctcttccctccggagttacttagctctgatgtgtattcttatctcgtcttatcttcaacttcattcatgtttttcccactgcttcaaatttcactctcccacttctcccctggccagctgctactcatccctcaagaccctgatcaaatatcatcacttgtatgatggcatctgcaaatcttggggggcaaggctaattgttctttgttcccacagggctgtgttccagtttaacatgatcacatgttattttggttcatttatttgcttaagactttttcagaaggctatgggctctttaaaatagagaacttacatcttgtagttttaagagtatttttagtaaaagtttagagtgacccccatctttctgccagcccacaaaaggaaaacatcaaaaagtgaatgtgtaaaaggaagagaactctgacaaaaccaggcagaaaggtttttcagcaagtctttttattttctgttcaggataacattaataattatccacgttggtttctcattctcctgttggtgaatatttttctgctaaatttaaaaccgtatcacaaactcaagcagagatttacaacatttcaacagcttttctacccctgccttagaagggtggatcaaaaacatttgtccatggtaaagcactatggacatgacttagttaacaattctctgtttgggtcaccatgaggcttcttcgtttatactcagggtcagcgacaatgctgatatgcagctacaatttctcatttcttactcagggtgttatgaagcagatttccactgttctttaatcgttattaaaatgtagtccaggtgcagtggctcacgcctataatcccagcactttgggaagctgaggcaggtgggtcacataaggttaggagttcgacaccagcctggccaacatggtgaaaccctgtctctactaaaaataaaaaaactggccgggcatggtggcaggtgcctgtaatcccagctactcaggaggctgaggcaggagaatcgcttgaacccaggagggggacagaggttgcagtgagccgagatcacaccattgcactccagcctgggcgacaagagcaaaactctgtctcaaaaaaaaaaaaaagtcattctcatgtaaaaattcttgtaaaataatctgtaaagtcatcctcttatctgttctagttcttcataagacttatataacatgtcatatgggcatggaaaggcctaagccttcccaaaccttgctcttttggggatgattttccaaatgtacttgttctcagttgaaaagagcattgcggccgggcgcggtggctcaacgcctgtaatcccagcactttgggaggctgaggtgggcagatcacgaggtcaggagatcgagaccatcctggctaacatggtgacaccccgtatctacttaaaatacaaaaaattagccgggcgtggtggcgggcgcctgtagtcccagctacttgggaggctgaggcaggagaatggcgtgaacccgggaggtggagcttgcagtgagccgagatcgcgccactgcactccagcctgggcaacagagcaagactccgtctcaaaaaaaaagaagaagaaaagaacattgcatcatggcacaaggacacaaaaaataccctggacctgcttcagtgagatggtctaagggtctctagcatcttctgaactgaactgaatgctttgggaagaattaatagatacacgatgtatattagttcgtttcacactgctataaagaacttccctgagactggggtaatttatttaaagaaaaagaggtttagttgactcacagttctgtgtggctggggaggcctcaggaaacttataatcatggtggaaagcaaaggggaaggaagcaccttcacaaggcagcaggagagagagagaaagagtgaatgggaagagccccttataaaaccatcaaatctcatgagaactcactcactatcacatgggaaaacagcatgggggaagccacccccatgatccaatcacctcccaccaggttcccccggattacagttctagatgagatttgggtgaggacacaaagccaaaccatatcacaatggaaagctcatgaatgggttctaagaatgaggaaatgtaccttagcattttgcctacttttcctttatgacatttttttcccggcaaatatgccaaatattacctacctttacatcagtgtccacatgcatatcccctgtcttcctccttttcctcatacattaacaaaagagtaactttgttttctccccatcactgttcaccctattgtataagagaagaaaagcaaaataggatgaaagaactatctaggcacacacacaaaagtcacactctccagaagaaagaatttgctctacttggtagtagacagaaattaactcactgaagatcaccagagaatcagatccaattatatcagcaggactttagtttacatcatggtactagaaccttctttaacattcaaaacttatgaatacctagaaatagttttaaggttaatatctctatgctgtgggctaaagagtacccacaaatgaatacagttgtgtctgatgagtgtctgtgattattttggaaattgtcctgctatttaaaatgaaaaaaatagaaatgtcttagattttcctatcattaacctattgtaaacaattacatcagtgtagggttgttttgtggttgcgtgggagtattttgaggtttttagggggtaaagtgggggatagaatgaagttgttgtttgcatttacaaccctaataattaaaacaagccagagggaattacctacatggctgttgtgatttctagtgtatgatcaaaaataattatggcactttgccatatgttcttgctttcttcttagatatgtgttattgggaaaagatgagacttgacatcaactaattgcttttttctaatatacaaccttgaaccacagtgattctctggaggacaaaaaatagcttagtgacaaagagattccagaaataagagcttttcgagcttttaactctctatgtaatatagacaaattgcacagattaatataaccaaatatgtattggtccatgggaagagagttacctatttgaagaataggagtgtattgtgttcatttagaaccattcagaaacatcaatgatattagttctgagttgactaaggataaatttttaaaagcaatacctaattggaaaattattcagttgttgaccattcctatcagtgctctgaaactaaatatctcacagatgccttaatgagttattataattatgttgctgtgatacatgtagcccaagtcagaagtcacttgctttgtatttaatggatggggaagacactggagcttggagggaagagaataaaaataacctagtttcaggaagatctatgctctaaccctgcttctgccacataacaacaactctatgatttgtataagttactttacctctcaaactcgtggtttcctcgataggggataaagaaggcctatttcatagagttggtgtaaaggatttataagggctgtaagtattagttcctgccctgtttcatccccctaccctacccccacccctcatcatggctctgcaaaaacaaatatgtctcagagttggaaagacccatctggtctttctcagataagggtagttttcttcaaacagactgattcctgcacataaaatataatataaaaaaccaaaagtaccttcaacattgtagacttttcatatgtggttgtctctgtgacttaaatgtacaatctagggtttgcatgttaaggtctttcaagattactgttggcactgatctgaaagatgtctcatgcaggaaatgctcacccaattatgagcactgaggctgtatagcaatatcagaaataatattgcagcacagtattttctatggattttagatgcagtattaaaaaaagaaaactcagcctgtctttaagactcgttttctctttcaacaccagaattaaaaggcatgccattcttttttaaagtttatgtgcagagccaaatgaatatcaacattagttctccactgggtccacggcttctttttaaaaatatctgaagcagtgttactctacccactttttctcaggaaattgtgtcctttagaactggcacccatatagtttaggaatgcttgatagggtatattttaggtgggagtcacctgtgcctatatggagctttgatgtcaatgcccttgtcatttggtgtcaatggttttgtcattctaatttatttggccccaaggtgtgtgtgtgtgtgtgtgtgtgtgtgtgtgtgtgtgtgtgtgtgtttgaaacacagcatatgtatttttttcttactccttgagaaatagaactttaaataacatttctatctttaaaatgtacttgtgaatagttatcactttcctgaattctaccttccaaaggtaggacaagagaaggatggaattaaatcacacatgcagctatttttataacttatgagcactcaatgatggtagcatccctcttctttaccttctctctgattctgaagccactgctgttttggttcctgtatggctgggactgcctgtccactagacttcctgccttcactctgaccctgctacatttaccctgaacaccatcctcccaataatcattaccagatgctattttcacaatgttacacctttacacaagaagctacagtggaatattatccttacagaatcagataaaaatctccaggcggcattctaagctctcattggctacactgtaccctttgaacctgaacttcctgagaactacctcttagctcctgcctgtagctctggctcccatcttcatgcagtaggtattcgttttcttttgaacggcctcatatcttctctgctagcaggattggagtcatggcagaaagtgagagggggactagaaggatgcaacattaatgaaacctcacaataggttaggcattgggttaggtacttggttgatctactcacatcatctcatctaatctttgccaaaaccttaaaaggtaggtattatcggccctacttatagacatacaataggtacttaatgcacatttttgtgatgaataaatattcgggaatttttgcattgtgactggatgagaagaaactaggaaaaacaagacgtagatgagaaagatacctctcatcttacttccaacctaggagatcttaaatgaactcatcagttttaaaaggtaatcttaagaatggagtcagagggtcacacaaggagagaaagcatcacgtattaccagagttcgggattgcttaaggcggtttgacagtttcctccgggggtaatccaccctaggccaggcatttttaaagattagattttgaaatgaagctttgcacttgggaatatactgaggcaagaaagcatatcccttctccctgctgagagagcatatcccttctctctgctgttgcagtgcttaagtgtgagaattttcgaatgagatatgaaagcaaagacaacaaaccctgcaggataatagtctctgaggactttaataacagccgtttttaaagcaaagcctgtggactcctaaatccatagctgctcgtttaagatgcaacgcaatgcagtggacctgaaaacatactccttatctacctagagcaaccaggctccaagccaaacagcagtcctcaaattaactcttgtttctcttgggacgacaactctgctgcttttaaaggtgttgcgtggccacatatagaataagaagggaaaaaacagtcacaccctcttgtgagtctgtatccaactgcattttctgatctggttaggaacctccggtggttagattagaatcctgataaggccaagactgtgggtccaatttcttcctatggattcttctcgaaaaacttgttaggaaagatccacttcgggtttttttttttttttttttgcgcttgttttaattcccaatccataatagactgatacttttgtaacatgcaataaaaatgaattattttaaaaattacaaataccagacatacaaaatttaagccgatgctttttatttttagattgctgtacacgtttctaaagatttgctttcaatttctgttcttatgtcttcataatagaatatctgtttctgtgtgtgtatacgtatgagtgtatgcaagtgtgctccaaaagctctactatttagagctcatgtttaatgagtcatgttggataaccagtctaagggagttctactttcatataattgtttttgttttatttttatttaaatcattaacaccttttcaaaacaactgtatcaaataacagtcatttggtcatttgaagcatttacatacactgctttcttcttaaacagattttactgaatgtaaatctgctttccctggctaattcagcatcatcatcctgagcattaactattttgcttcgctataaaacgaggtgatgccttcaagggctactgatgcatggagagctgttagtttccacactgtgtgaccctggtcaattatgcatgcccatggctccttttacacctttctgattctctgtaaggtgtcacttcttcctactctcaatttagccacttaggataatttctttactattttgaattgtatgttcctgaccttctaagttcttagaaatcagaccactttttttcccatcaagctaatttaaattagataaaaattatcagtaaggaggaactaatggccttataattattcatatactaactgctttcagaaaagcttagagataatctgtctataataaaattcttaaggagatttggtcacttattgttattctttctacaccattgtgtttgtttccttacttctcagctatattaaaatggggaagttttcatttgctgagtcctattttagagaccaataattccatttacataggaaaggaaatatgtggatacgattattcatgatgttctagaatagtatcacaaccatctgcttaatggttaataaaatggttaataataaaaagaagggtacagcactaattcttgacatctcccttctttatttttcttctagtaaaacatccataacttttcctattcttccccagttgtattattacttatgaacaccatggatcattctactttttgaatgaaatagtacaaatttaatattcgataatcttgtctttgtacttttctttctaaacttttattctcggtggcttcctaaaggaagactttattctacttggtttaagcagttggtctgcattctacctatttctctcaactctcattgtccattccaatcaggttgtgcaattcattgtccctgctcataaaccaaattcatttcacctttactccattcccatgctattctttttacctggaatattttcttttgttccaatttcccaatcgtatacatccctcaaggctcaagccaagtcctgtaacttcatgaaatctatttctaacatctgatttccacatggattatcttgtaatagtaagccctgcatttgctattatttattaaagatctcttgtgttctagacgctattcaaagtattttacaaaaattccatgtaatattcaaaaaattcagcaggtatgtattattatttcatgtttagtgaaaccaaagtaatgaaagagttttcatcattatgtggctaataagggaaagagaagagaagggtcaaacctatgtctatttaactgcactttgccatgagttttctctggaagctgagaaaggagattcacaacaagagtagatgagactcagataagaaggaagtgtggaatttgaaaaagcccttcagaaaacaggatctcccctactcctaaaactgctatactgtgaacatattgcttgtctcataactgaacttttttggtactctcagctgaaatttgctctataattgtacagaactttaggccaaatgtttcttttatggggacacacattatttgtttcgtttgcacccattttctcaattactttgtgttttctcttgttgtattggatgcatctctatccactgctacaaatctgtttaatagtctttatattaataagaccatgaaattgctctttgtgtgctgacatagttatcctttattttctaatggcagtgctagatttgctaaaatttaggtagtagcattattaataggaaaaactaccaccaacaactaaacttgaaaggtaatatagcctagtggctaagagcacaatccctgaagtctgactgacgaggttctaaatcttgctgcatttattagctgtgtgaacctgggcatttttagttaaccttacagtagtttcattatcttatatggaaaatgaagataatagtagcccctaccctagagggttgttgagaggagaaaatgagctcatgtatatacagtgctttggacagcacctgatgtacagtaaggttcatgtatgttgttgttcttgctgctgctgctgctgctatggtttttgttatgtaacaactaccttttcccctttgttcattcgttattgcttttcctaaagactacaatcacaaaaaagaagaaaaaaattagagagcatacagtgaatgcagtaatgaaggcttgaatgatcttttctagttaagtcagaagtgaaataaaactatccaaaaatttctatgaaaattatcctttgtccagattggctacccactgagaactccacttgattctccatatcaatcttttgctcttttgtgctacctgagtctgaggtgtagtctttaaatgatgagtttattggcacaagacagggatgccctctctcaccactcctattcaacatagtgttggaagttctggccagggcaatcaggcaggagaaggaaataaagggtattcaattaggaaaagaggaagtcaaattgtccctgtttgcagacgacatgattgtatatctagaaaaccccatcgtctcagcccaaaatctccttaagctgataagcaacttcagcaaagtctcaggatacaaaatcaatgtacaaaaatcacaagcattcttatacaccaacaacagacaaacagagagccaaatcatgagtgaactcccattcacaattgcttcaaagagaataaaatacctaggaatgcaacttacaagggatgtgaaggacctcttcaaggagaactacaaaccactgctcaaggaaataaaagaggacacaaacaaatggaagaacattccatgctcatgggtaggaagaatcaatattgtgaaaatggccatactgcccaaggtgatttacagattcaatgccatccccatcaagctaccaatgcctttcttcacagaattggaaaaaactactttaaagttcatatggaaccaaaaaagagcccacatcgccaagtcaatcctgagccaaaagaacaaagctggaggcatcacactagctgacttcaaactatactacaaggctacagtaaccaaaacaacatggtactggtaccaaaacagagatatagatcagtggaacagaacagagccctcagaaataatgccgcatatctacaactatctgatctttaacaaacctgagaaaaacaagcaatggggaaaggattccctatttaataaatggtgctgggaaaactggctagccatatgtagaaagctgaaactggatcccttccttacaccttatacaaaaatcaattcaagatggattaaagacttaaacgttagacctaaaaccataaaaaccctagaagaaaacctaggcattaccattcaggacataggcatgggcaaggacttcatgtctaaaacaccaaaagcaatggcaacaaaagccagaattgacaaatgggatctaattaaactaaagagcttctgcacagcaaaagaaactaccatcagagtgaacaggcaacctacaacatgggagaaaattttcgcaacctactcatctgacaaagggctaatatccagaatctacaatgaactcaaacaaatgtacaagaaaaaaacaaacaaccccatcaaaaagtgggtgaaggacatgaacagacacttctcaaaagaagacatttatgcagccaaaagacacatgaaaaaatgctcaccatcactggccatcagagaaatgcaaatcaaaaccacaatgagataccatctcacaccagttagaatggcaatcatttaaaagtcaggaaacaacaggtgctggagaggatgtggagaaataggaacacttctacactgttggtgggactgtaaactagttcaaccattgtggaagtcagtgtggcgattcctcagggatctagaactagaaataccatttgacccagccatcccattactgggtatatacccaaaggactataaatcatgctgctataaagacacatgcacacgtatgtttattgcggcactattcacaatagcaaagacttggaaccaacccaaatgtccaacagtgatagactggattaagaaaatgtggcacatatacaccatggaatactatgcagccataaaaaaaggatgagttcacatcctttgtagggacatggatgaaattggaaatcattattctcagtaaactatcacaagaacagaacaccaaacaccgcatattctcactcataggtgggaattgaacaatgagaacacatggacacaggaaggggaacatcacactctggggactgttgtggggtggggggaggggggagggatagcattgggagatatacctaatgctagatgatgagttagtgggtgcagcgcaccagcatggcacatgtatacatatgtaactaacctgcacgttgtgcacatgtaccctaaaatttaaagtataataataataataaataaataaataaataaataaaaaatgatgagtttagacaaatatcattatggtagtattatattatgttatgttatattatattatattatattatgtataatgtatattccttgcagcctgccctgcattcccaatctatgactcatgctgccttattgatactgaaaaatctccactacagcatgccagcttttgaaagagagccttgggttctttcccaatacttaccttccttttagggcaacctatctgagtcctgtagcttgaaagatttcctaccagcctgccatcccaaaggaacatggatgaactatgtttatgctgatgtgtcaagtcatttcttggtatggttcatagtagtccacatggctcttgtagacaaagagatgaattactgatggcagaatttctgttctggcaacagggaaatttgcagaaaggagaccttttcagtgtgaacattttttgctcacaggtggtccaggatgcccaatgctaaatgagaagtgaaaagagcaatcagggccaggtgtggtggctcacgcctgtaatccaagcactttgggaggccaaggtgggcggatcacgaggtcaggagatcgagaccatcctggctaacatggtgaaaccctgtttctactaaaaatacaaaaaaaattagccaggcgtggtggcgggcgcctatagtcccagctacttgggaggctgaggcaggagaatggcgtgaacctgggaggcggagcttgcagtgagccaagatcgcgccactgtgctccagcctgggtgacagagcgagactctgtctcaaaaaaaaaaaaaaaaaaagagcagtcagaattcaatttttcattcagaacaaatcaatccacgtgggtaaacattttatcaaactcaagaatgctgtctttcagggtgcttttccctcaacagtcacttatttcctcttgcaagtagtatcttcgttcaggttcagtgactactgtgtattatatccaatgcttctggcaagtgggttggtggaggcagcccaagatcttctagaatcaagagaattggatccatttcccagttctaacacttatcagctatatggcttttaggcaagtcagttaaacatccgagtctcagtgctctcatctgcaaaacagaaaatgtgatgtacttcacagagccagggggaggaataactaaggtggtacatttgtacgtgctttgtaacctgtaaagccctttactgtacacgtgtcatttacagctctgtatcaccatcatgacctagaaaagcagtactgacagaagacttatcttcttgccaatgctaagataactttagccatttctgcatttctaaaggaaggagtctttatcccagtatctatgaagacttggcaggaattgccgtcaatatttagttggtaatataaacgaattaaacaaaaatgcacactaggttttaggaaaattaaagacagaactatcatttgtactcctcttacatttcccaaagtgctaaaactagacaataaatcagtcctcaataaatgcttgtttatcaattttatattcatttatttgttgataatacaacaaagatgtttatatgcagtataatatatatggcaaagatgaaaagtagcaaattcatgaatcaacatcctatttatgcttgagaagacaaagaaagtgttggtgacttcatggtatacataaccttaaggagctcgtgattgagcctgggtctctgctatcaatgtaggatataaatttcaaatgtactatcctttatatgtatgttaatgtagtaaacatagaaaactgatgctactagtgagaatacttttacttgaacaactaaaagtttgtctttaatcccctaagtgcatacacaaaaggaaagtactgtacaaatcaagtacaacagaagaagtaaagtaaaagacaagtgaaggaattatctggaacttagatctggttggctttttctcctgaagtacttagataaattaactcacttttctcttttgctgaagaagtgcaaattaggcaggcatgttattccacgtaggcaaaaggaaaaaagaaagaaaaacataaaatggctatatatttgaccaaacttcgttctgcaagaatcccaatactaaccttctaccatataaactactttcaaaatcaggctatatccttccagtacaaacctggtttgtactactcagagatactactcagaaatactttcagtatttcccttctttcaacttctgatgtgattctatccatattcccctgcctgtctcccagtcaaagagaatgggacacaactctctttagagtccatcagtgatgctttagctgccaaaaatagtgacaatagacattcattgtctgtctaccttacttgttcaacattcagaattctgcatcttaagaggctgtggctgaaaacttgagccagttcttcagaatttctaacatgttatttctgccactttttctcccttactttagcagagtaatttaattcaatttgagagagagagagaaaaaaaaaacttttctagttacacagatcaatccaattgtttggagcttcagaatgaatttttaaacttgttgaacagaagcatacaaatctctaagagcaagtcagataatatacaaagcctccattcattgtgtaggcagaaaggaatgctggtacccggcagctctctgaggaatgttcccttggctttgactattctgctgggaacaaggaaggaaacacatatataaaatgaatttataatgtctctggcttgtaatggcagaatgataagaaaagttggctgtttaatataaactgtcagttgcatattccaggcctcctctctttgaggttcctcccacatccacacgcctggctactgtttagtgcggagtacaaagtggccgtttattattattgactggtgaggcctgtgctccaaaattcattctgtcaacagaatgtaagcaaagttggcattttaaagcagggctctttcagtttctgggttttctcaggattgctatgcaacaggatcagtgctgtagtgcccggttcaagctgaaaatgttacacaggaagacataccatgtaaaggtcagattcttctactataataattttcttgatctgtgtgtatacaagtgaagttgaatgcataacctcttatcataactcttaccaaggtcctatgtactttccacctgtcaagcctaaaaatgtgtattaaatgggaaatcaaaactaataaatgtatgatgctgtactatatgtatgatgctataataccaaggtgaacttaatttgtgttgtcaagaagattttctctcccatgacagactcccaggaatgtgctggtgctgtgggccaagtgcaatcttgtttattagtctctccacgcttttatggtcagagttaactctacagattactacgtaaatagaaaatatgacttgatccatatagtaatgaaattattggcactggggtacactttatcatagaattttattgcctatcacttccataaaataatacattttgtccatagactagaagatataacttgtgaactttataaagttataaatacattactttccaactcataatggcaaggaataaatctattacaactaataagatgcccattttaaatctacataataacaggagaaggcaatacgccaagaaaagggatttgagatgtatcttcttgttagtttagcctgattgaaatgtcttttgaactaataattatttatattttgcaattctccaaattcacattcatcgcttgtttcttttgtttggtaattctgcacatattcttcttcctgctgtcctgtaggacctccaaggtgaaattgaagctcacacagatgtttatcacaacctggatgaaaacagccaaaaaatcctgagatccctggaaggttccgatgatgcagtcctgttacaaagacgtttggataacatgaacttcaagtggagtgaacttcggaaaaagtctctcaacattaggtaggaaaagatgtggagcaaaaaggccacaaatgaattaaaatggccaaattttcctcattgtcttagcacaagtaactggtatctcacatgtctacgtaaatcatccaatttcagaatgattcactgtattttgaataaatgaatcatttatttgcttggtatggagatgatacttgaggattcagattagattaaagtggtaatgttttataaacataggagacatgcatattaagacatcagagtgaatttaaatgaggagtgcagctattctagtttcataaatttctctcttggcatatcacagggttatacaaaaagtgataaaaaattaacggatatgtattatggaattatttttggcattagtctaaatgcataccagaggacagtctttaaaaccctttataacacattacaattatataatataaaacctgtaacacattataattaacagtttagaggagatagctcctacagttaaagagagactatagcaacttcctgtcttttgcttcctctcagattttgttaaaacacatcctctgtaaactaagcttttagttgtagtatactcacatactttatattttgcccccttctatgtgccagctttctttggagaagttagttaatggatgcatcatagcatctttgtaaaaagggcagagggaagttcttgttataccagttttgcaatagttccgtggaggaacaaaaggatagagatagtaagtaaaacgcccattgtaacttaaatgatctagcaagggcggggaatgaaagccaggcttcctgctttctaagcagttgcctttcttaattcatttctctttattaaaaatattttgtgctttcttctgtgtctagagaaaaagtgataatgaagggaggtagaagatgaccaaatggacttaataatagttatgggagtatacactaaatgacgggagtagttactacctctaggtagaaagattacagaagggagattttttttcttctttatagttcttctaacttgtccaaaattttaacatatatacttctataaggaggaaaatctgcatttttagtaattcagaagcactattgtaaatgtctgcatcaagtatgaaataatgatagcaactaatatttacatgatgtacctacataccacgcaatgccataagcactttccattcattgaccggtttaatgctctcagcaaccctaagaggtagattttattattgaattctttttacatttgaagaaagtgaggcacagagaggctaaataatttccttagggtcacttagcaagtggaagatacaagatgaaaacagggagtctgggtgggccaggcgtagtggctcacgcctgtaatcccagcactttgggaggccgaggcaggtggatcacgaggtcaagagatcgagaccatcctggccaacatggtgaaatcccgtctctaccaaaaatacaaaaattagctgggcatggtggcacgcgcctgtagtcccagctactcaggaggctgaggcaggagaatcgcttgaacccgggaggtggaggttgcagtgagccgagatcgcaccacttcactccagcctaggggacagagtgagactctgtctcaaaagaaaaaagaaaaaagtaaaagaaaaagaaatcagggagtctgacttcagagtctgaacttttaaccaccatatgataccgtagcatataaagaaagaaggaaacttctacaaagaaatgcatactaattgaaaggatgaaatagagagtagattttttctaggagtagaaaaggatttgtttttatgagaagtagattgctaggagtagaacaggtttatttttatgtataaggttttgttttgttttgtttttcacaagtttgcaccctggcttcccagacattgttccttatctccctattttgtatatgaattttgtgtcaacttggtggtggtacactgggagcaacaatggcaatagcattttcaaagatagggaggctctattagctttctacagcttaaactcttaagagaggtcagtatgtgtgatgacgtaggccactttgataaccttcgtcattaaaaaagaatgaaaatgtgagatggaaaaaatattggcaggtcaagttaagttattcttttctgcacaaaagaaaaagaaagatgctataattgttccgagtatcacttagtgccttttctctgcctcatgtgaacttgataaaataaaaggagaattgaaagtggcaaatagcatgtcagccaaaatatggactcttcattctcagcagtttcccatgtcagctaccgcagtttgattcttgctgtcattaatcaggtagaaaacagttagcttatctaaggtgctgccaattctagaatttaaatattcagatcaatggttttggcttttatataggcctatgtaataatacaggatatgttataagcactcataaaaagcaaagaagtaattctccacatcaaagcaatttagcttatttcctgacacttgattgaaattagggtattgatcaatctacagcaaatggcagggttcaattgagagaagtacagtataggcagtaattagggatgattatgaaatagaatagaataacactggaagagttagatatagaaccattagtggcactgataaacctgcattatgaatcttgtcacttcttccatgggggttattttaaaatgaaaagttgccacaattaaaaaatagtttcaatgatatactggaaaaataggcctgtgtttgcccaagttataacatattataaaaaattacagttggcccattgtttggtgagcgattctgaaactgctcttatatttcaaaaaaataaaaccattaatgtgtccatttttaaagaaacaaaattgaatttaaatccaaatgatttcgaagtttccctttgtattccattggctcataagagatatccttgtgcttccaaatacaagtccatattgtatcgttttccttccatttatttttcttctgccatacatcttttctcttcctgtgattaagattcttatttaagtcatcatgttatgccatattgatacatttgcaagaatactctaccttggacgctgtttatatcatattactcttttgttcaaagcttcaatcttgtaggtctccatatctccctcattcatttatttgttcattcaacaaatatttaatgaatgcctactatgtactaggcactcttctgggcacggaggatgcaaccatgaataaaacataccaaaaaaaatcactgctctaatgaagttatatttaatcattagaatctagtagaaccttctctctctgccaactgtgcctaataagtccttgctaactccttcccttctcttttctttttctgcctccagttcctttctcaccaagcatcattctgttactccccaacatagattctctgagccaagagaatcaataaattctattttctaaccccattcctactctccaacaatttcctcactctcccatatgagtatgtacccttgctggttctcacacttgcaacattctctttcctcttattctccaaattttgattcatattccataacaaatcttttcttttctggctgtttcctcactaggtcttcccaatactattctaatttacacttgataacatgtttcttcaagtgttcaagagttgctttatagggctatgcttactgcctccagctaacttatatgaatacaaaaatttcaaactcgaaatatgtgagtatggtagagtagaaagacatgggccagcagctgggcaacccagtttcccttctgttctattctgtcactaactgtcttagcatataatcttgatcaagtcacttaactgcttcagacttcaattttctccttcactgaaatgaagagtttgaccagaaatatggacagtctcttccagttctcttgcaatcgtacaattttattcttttagttctgcaatcacactttatgaacctggaaaattgtttaatttttctaccttggttttcttaattaaaatagaactgattgatttaaaaggcattatataaagtaattaagatgtctttgagagaaaagaaatttaattgaaattgtataatcctatctcataatttaattcaagaaaagtatatgctatcattccacatgcattattacatcacatgttggccaagaggtataaggaagaaaagtaagtagtcagtgataatttaagttccatcaaacaaaacgaaaacattaactgctttaagtgggagaaaaagagaaaattatttacttaaatgtacacacacatgcatacacacacagttactgatgacgttatccaatattaagatggtaattagtcaaagaaagtgtttttcattctaaaattccatatccacaatccttgcatttttaattttagaatattaataacttgagaagtggtcaagtcaattgttttacataagaaatatatatgaagatttcaatttagtctactactagattatttttccagatcattgtatatactattaactatgaaaatcacataatatgttatcaacataatttcagcagaatttacattatgtgagatttttatatttggcagaaaaatttgtaaatgttatataaaatgttcacatttatacaattgtgaacattaagaggcaaggacactgacattatatagtctgtagaagccataaatctattggggagtgcttgctattagaggttagaatagttagtgtctttgtataatggagaacaaaagaagggcaaaaagaggtggggtctacctttgagagaaaactgcaacttggacattgaatatctctgaccttctttctctctcttttagaatgttaattatgtttggatgttggagttcaagacctgtctagaaaaaaaaaatgttgacttctctttgggattctctctatttaaagagatagctcccattttaattctgtggttctttaattttttttgtttctgaagtacaaattcaaattattcatctgttgatgacaccctggagatttttctcagtgttctcttgtagtagtttcatggtttgaggtcttacatttaagtctttaatctactttgatttgatttttgtatatggtgagagataggggtctagattcattctgcatatggatatccagtttttccgcaccatttgttgaagagactgtcttttccccactgtatgttcttggcacctttgtcaaaaatgagttaactgtaggtgtgtggattcgtttttgggttctctagtcttttccatgggtctttgtgtctgtttttatggcagtattgtggttctttattatttctgcattcctcccttttctttctgcatgtttaagtgctattttattacatgagggtactaaagatttatagggatatatcattagttttataaaggaagtcaaagtgaaaaatgaattcaatataacacatttcactttaagaatgcatgcctttcagagtaaagttttattaaggatttcaaactaggcattaaccaaatcacagttgaaatatctgtgtctagagaaataacaatcactttatcagcccctataattcttagtgtcctgacactgaggagttccttaaagaccaagcaatatactccagcacatctaaaggctctgcgttttacctaaaccttacaaattgtggaaattatcagctttttagagattagcacttgccttgttaaacggtagtaacccctaagctcttgtcttcactaataaagattaatagacatagatagaagctaagcatgcccctttgaaccacctcttttattttccgttgagtgggtaggagtaagcagaatatatttgacaattagcaatgttaaaagacaaactttagacaaattccgttttgcagagtttatttgagcaaaaaacaattcatgaatcagacagtactcagaattagaagttcagaaagctccacccagcaaggtgggcaggcagtatttatagatagaaaaaggaagtgacatacagaaacagcttgactggttacagcttagaatttgccttacttgggcatagtgtaaataggcatttgccttatatggacatgagctgatcagtttacagcctgtgattagctgaaacttgactgctgggattggctgaggctcagctatttgttacaagaatgtactcttaagttgcatattgcttacatgccaagctgggttgcagtttgctatgtacagagtcagctttaggcccaatttaatttaatttaacagcaacaagcctttttgttcagagatcaaaaacatttggttaaaaccactaaggtttaaggattttctcatctaacaaaggtttgtaatttctatttcccatatctaaataggacagctcaagttatgtttttcagcagctgttttatacctttgcaatcttgatttctacatatgcaaaacaagaaggttgaactataatctctcaggttccttccaaccccaacagcctatgtatgatataaccagaaaaaaaagtcattacaaatacaaagaaacattttcaggaggagatattccacatgcaaacataggttaatcatttcaaaatatctggtatatacactcatgaaaataaaaatagggcaactgcttccgataaatgtattagaaatgtgacttgaaaacatttcacgggcttaacatggtcaaagaaaatgttttgagctcacaatgttccttacatttagatcttcaaaatcaagtcactgacaaatgccacctttgccctgtggagaccaagaagtaatgtttggggcatatcagaaatgctttaataaatgctttatcaaagaatggttctggagcttacctgtggaattgtgaaggttcttgttgaaagcagagattgttgatagaattatagaaagtctggaggtggcacctagcaatctcaattttaaacaagctactcaaatgtttcttatacacactatagtttgagacccagagctttaggttgaatacatttgtatatgctgttttaattcattctctggctgcctttcacctcttcagttcttactcagtgttctctgtcctttgtaagtttttcgcttcagtttttgtcctcctatcacatttttcctttcactcttgagctttaggagaggaaaaaaatgaagcaatttgatatgtagttaggatgatcaaacattctgaaattttatctaactccacagcttagaaaaaaattaaaggaagtccccttacccagatatgtgagagcttttcgtcttttgaggttccaggtccgtcttctgctgctgtattagctctcttgactgtcctctgtccctggcttctaacaacttccctatttcatgctattaagtttctcttagatcctttagaactgaattcccggctgggtgtggtagcttacgcctctactcccaacactttgggaggctgaggcaggtggatcacctgaggtcaagagttcaagaccagcctggccagcatggcgaaaccccatctctactaaaaataccaaaaattagctgggtgtggtggtgggcgcctgtaatcccagccacttgggaggctgatgcaggagaattgcttgaacccgggaggtggaggtgcagtgagccaagatcgtgccattgcactccagcctgggtgatagatcaagactctgtctcaccaaaaaaaaaaaaaaaaaagaactgaattccctaggtctcagttattttgctctctcttaggggacctaaaggggttcattgacccactaataatgagtcagcaccatttaacctagaactggaattttagcacttccttacataaacaaagccgcagcttgaggtcttaacataggcagcctgcccttcactatatcctcctctagacctctctgccacaaggatattttgtttcctctaccaggcagacagaggccaaacattagtcatcgttatattctctcttcccttcctctctccctactccccaatgtatcctagagacttaggggcagtcaataaatatttatttaatcagtgtcttttctaccatttgctgcttttccatgtctgagccctacctctctccacctacttttcaatatgtcctgcttgacagcctcttttcactctcaaagggaccaagctgtgaattccagacaccccaaggaattcgtttaaccattacacattacatgctattaaacagctaaaatcttgcatggggaattgtcgcttaggcttatcatggaaaagtggtaactgaaaggatggtacagaaacataaaagaactgacctctaattgtatgcaatctgcatgcactattatattcaattcatgacatttatggtatttcacgattcagttcttgggaaataatacccttagagtctggaacaatttaatttatcttatttgatggaaatgccttcatttttcctggacatattgtttatactgcaattatagaaagaaaatcttgacaatttggaaaagtagaaagattaagaaataaatcacctgtaaatctacctctgagggataacctggttgtcattacaaaattttttcctagtcaagcatgtgcatacaaatacatacacatacacaaatgttttagaaaaattcaaaaaatgtatttgttttgtaacctgttttctcatttagtaactgggatgatgaccttttccatatccataaatatttggctatgtcatcatattgaaccttgcaaaggattttactgtatgaatgcaccattatatatgtaataattcccttttaaattaagagctatttaattaaattcatatataaatttcattaatttctaaatttaaagcatatacaagtttcattacatttgaaaacaatcagtaggttggggttttgcatttctcaagcaattccctcatattgaatatttaagttgtttctgttttgttttatcaatcataaatgatgctatatataacatttttccacctatatctttgtatctttttccaatttctttgttagtataatttccttgaatttaagcctgtgggtcattgtctttgcacattttaaagacttttatgtattgtcaaattatccttcagaaagtttggaacaatttaatttcagtagataagtattctttggtgattctgtttgactaaggccaaaaggagaattgtatttgtaatgtcaagctaagttaccaaatggctaagggaaatgttgctccacctggttgctttgctttacatttcaatctttgcagcgttaaagtctttattatatttatgttataggtagcgttattatgaattaattagtaattgctgataatagctgagtgattgagcataatttctaatttacctgaagataaagctttgctaacactgcgtttcctctttgttttctggatgatgatttattttattaatttagcttctcatcttcaagtgaaatgtggattttatagcacagatcattcatttgtgtattcttaaatggcttctaaggattaacgtgttctaaatacagttgacggtaaagcactcagtctcctgcctaaattattcatgttcgggggaagctttcagataaatgtctgattttactcttccatgtgagttgttgtcttagtactttttacacaaaggaaacaaagcagaaaatgttgaaacttggtgaagacaaatcccaggtgcacacaaataaagaagggtagggggaaaggagacgcatttgggaagaggagcagaaaggaacagacgccagatggaagaactcaatggaaaaggctgcctagggtgtagaaatggaaaagtcaaaatgtggggagagacctttccatttctcaaggcaaaaagaattccagtactagcatgagtcacatgaaaacgaagtgtttttcattagtcactgcatccaattttttctaccagaaatattaagaattgttgactacaacagtatggaaaagcaatagattccagtgtgtatttcatgccaaaagtctcagcattctgcatgtggaaataaacatatggctaaacactgccttttctcaaaattgccatcaaactatcctctgttttgtggctctcaaaagtaagtagccagatttttattcaagactgctttgtagttcacaataggtttattgtactttttcaatggaattgttagaatcatcaattacacttctagatattctgacatggtacgctgctgttctttttcaggtcccatttggaagccagttctgaccagtggaagcgtctgcacctttctctgcaggaacttctggtgtggctacagctgaaagatgatgaattaagccggcaggcacctattggaggcgactttccagcagttcagaagcagaacgatgtacatagggtaggacatttttaagcctcgtgccttgcacatgttaagcacatagtaatccagtgactattttaaaattaattttgtttgaaattaagttgaatagaaatcttttttactcttctcacccaagggtcaattataaataatctaagccattacactgtaaatgtcaaacacatttgtgttaataataccctttaagaaatcgtccatctcttttggctatataaaaaaaagcttttcatgatgaaaaatattgaacatatacaaaagtagacagaatgctataataaaactcgtactcatcaagacatcaacaattatcaaatcacgtcagatcttatttattctatagctcttcccagattgttttaaaacaaatatcaggcgtgtgttattttattgttaatatttcaaaaggttaaaagataggattcactcttttaaggtaatcaccttgctactataatgcttttgaaatatcaataatttcatcatatcaaatatccagtccatattcaaatttccatttttctcatacatattatgcattttttaaactttttctggttttggtttaaataaaaattgaaatcagacccacaccttactttggttagttggtctttttattactttttgtttggaagtaattacagattcacagtaagtttctaaaatagaatagtttccctgtatctttcaccctgtttcttttcatcattatatgtcatgcaactgtagtacaattcttattgtcatttcaacatgcaatcaatagaaaaaatgtacatttacagcacatctcaattcaggctcattacattccaagtactcagtagccagatgttgccagtagctaccgattgaacagtgcagttctatagtttgattgtatttgggtttggctttttttggcaagactgcttcacaggtgttcgtgtattcttccatcatcaggaggtggtatataatgccttgttttctctttttgtgtgatgtttaatagctgttcacgatcagtggctaggggttgcagtgtgataattgcctatctctaccattccttcttcatttattcactggggtaggtctatgaaaaaaatgttttgcacttgtctcctattttggtactcagtatacctttcataccgaacaagcaaaatacgtttcaattttaccaatttttataataacaacttgttcactagcatcctccaacgatgaccaattatttctttgtttgtttgttttatttttatttacatttctatcttctctactaagctctgagtgaaaaaggcagagattttgtcttgttcacctccaagaccctagagtctagtaaagtgtctggtgtagagtggatactgataagtgttttggaaatgagaataaaagatacaagaacagaaatgaatagcaaaccaaacaaattactaccaaataataaaaacttgataaaatggtaccacttttgtatgttgagcatgtaaaggaaagatctctgtggagatacagccaaaggtggcatcttgaggaaaggtcaagggtttatattattctggagaagaggatataggaaattataaaaagggaagagaacatgaaagaagacccagggatctttgcaaaaaaaaaaaaaaatgccagggaaactgccagtttctcctttagccatttgccttcatatatttctgaatattaaattagcttttgtggtagggtgaaatgtaatggtgctatgtgttttaaatgttctgactttgaataaacagccaaaacactctggtgtacatatagaaaagcactcattgagaaggatgggccttttttaaaaaatgcattatgcgatatagtgaaatgagacagaatttctacaaaagatgaattttatgctagttccagaaaccaaagaaaatgaatcactggacatgtgcactaggagtcaggagactgagattctagtcatatttcttcataagatggattctgattgctattttgttcttcaactgtaatatgaggaaattggtccaaataattgctgtggtttcttccagccagtattttgttataaatactgcttcactattcctggttattagttttggttgcttgttaagagtggtaaaatgtctgtacttaacgcagtccttactcaggaatctcatgacaaagaacatgacttggggagatggtgatgctagagttatgagtgatactcaccagaatgaagttaatccgtccccacttggttagtgtgcttgctcagatagctacctgttaacctttcgtgaatttcacaggacttccagcccattgattactctgtgttttatacattagttcctctgcccttccatatttacctccttccaaatacaacttagattcaatcatctaaattttaataacttgttttcaaaagtctgaaaccctttgcttctttatctttttgttgctgcaatctacaaaactccaaaactctagctaaatattccgagactctaactaaatattttctcataccagacaacaatgtagttgtctggtacagtaccttttccggatgaccagccttcagccttccactaccaagacatcactgggtcaatttttttttttttttttttttgagactgggtcttgctctgtcaccaggctggagttgcaatggcacaatcttggctcactgcaacctccgcctcctggttcaagcaattctcccgcctcagcctcccgagtagctgggactacaggcacgcgccaccatgcccacctaatgtttgtatttttagtagagacagggtttcaccgtgttggccagatggtctcgatctcttgacctcgtgatctgcctgtcttggcctcccaaagtgctgggattacaggcgtgagccaccgcacctggccaatttaccttcaaaattgtttttgactgtctactattgttatcatcataattatagaagaccatttctcctaacctttctgcatctactcttgccaccctacaatgcaatctctacatttcagtcagaataatctgtgtaaaaaacataaatccaattatatcagtccttatcttaacactatagtagtcttctcagtgctcttggaaaaagaccaaaatcctcaacaagggtgacaaggcactatctggcttgtctggcctcagcctcctctttcctagatgctcttcccttgctgtttggatgccagccatactgcctccatttactttttccaattctgcgtgtccctcttatgtggggctttaaatatgttggtcctctgtctcaaacccttttacctatacccacccactcataatatcctggttatcatctaataatcctttacatcttggctcggacattgtgcaaacttttccctgttgtctacatttgaccagatctttctttacacacttctaaaattgtctacttttctataacatagcgttgtttgtcatcacgtacatgtgttactatttgataaatatcgactactcttgctaaaccatgtccttcaagaagatttttgggagggggaaagctgtcatttttctactcagcacattccaaagtgcctagtatacagtagacactggttagataaaggaaggctattgagaccaagagcagggaaagaaagaatagagtggtattcccttcttatttacaggagttttctgtttatttctaattaagcatctttttgtaaagtgtgtagagctactttgatgcacaggtttttttttattattatactttacattctgggatacatgtgcagaaagtgcaggtttgttacataggtatacatgtgccatggtggtttgccacacccatcaacccgtcatctacattaggtatttctcctaatgctatccctcccctagccccccaccccctgacaggccccagtgtgtgatgttcccctccctgtgtccatatgttttcattgtttatctcccacttatgagtgagaccatgcagtgtttggttttcggttcctctgttagtttgctgagaatgatggtttccagcttcatccatgtccctgcaaaggacatgatctcatccttttttatggcttcacagtattccatggtgtacatgtgccacattttcttaatccagtatatcattgatgggcatttgggttggttccacgcctttgctattgtgaatggtgcttcaataaacatacgacatacagcttttacttgtagtttggcgcaatgctttttcaagcttctcttggtatctttaagaaaaattcttgacacaaaacactctccttcctcaaacaacatcatcgctcctgagtgctgatgagagaacagtttagtagcctgtttgactcaaagttttgtcacatgtatgtggtagccctttcatatatggactgtctagttagtgatgctcttgaagcctatgggcaaaagaacaatggaaaatccttgaaactggatctgcgtatcagatctcctgaactcagttagaaaaagagaaaaagaacagaatcagtacaaaattccatcaagatctaatagttgacagatcttatatttgtggacttttgttttactttgccatgtttccagaattgtacattgtattgctctttatgggtttcttgatttaattgttgtttgtatagaatccttggtatcaagatgggtcactgtaattgtaaacttattccgcaagtatttagagtgccacttttttaaaaagtcatctgcttactctctattctaaattattaatatcctttgctgatgctttttatggggatacaaatcccattaaaatgtcaatagttgaaactaaaatcaaatgttgttcattttcactttcattttctataaatcaggatgtttacaaaacaggtaatttgtgtttttctttgtataccatttcagattagtgataatattttgtagcaaaatattacatatcttgtactcttttcttgtagagaaaatatacagtcaatatcaattgctgtcatggagagatatatggttcttctgtaggtaaaattccaagatactccacagacatatttggggaccatagtctcactcctcaaagcaattttcacacccatgggagtagatctgtgctccccaaaccagctgggcagcataacaactgcaactgaatggctctcaagactaattaataaaataatgctccagatgcggtgaagtgttataaataattaaagctcaaatatgccttagcaaatataaactgaccaatttttatgtcttttgaatacattatcctggcttttacagttcctcattacttgcctcactagactgactcgttttcaattagtgggtgttattctggtccagatatattttaaaaactgacttcctttgttttacttgagcagtcactaaagtgatatttattacttgtctacttctgtgattaacctagagagagttttaaaggagcaaatcatagtggggaatttctaaggagaactgcaataaaacatcagcttattcaactcccttcctcctaccccaaatccaaatggagattagatcttgattgtaacaacagtgtaggtaatgactttttgtttgcctttttactaatgaaattgtttgtcactaggttttcatctttcaattaaaaaaatctctataatcccttccctagagatcattaaggataccttcaaagcttcccgagattttctggttaagatttagatggaagtaatcaatacatacattattaaaagagtggacagaaagccattattgcttggatgctgttgacaaatgaaaaggcttgaataaagtagtttacttgttcatttgtcaggtcatatattatgcatgttcgatttcttcagaagtcaccacaaagtgagagacaggctgagaaattcaataaaattatcctgaaatcatgttgtagattatacatttatttaggctcattctgttatcagtgctggcctgcttacgtgggatacattttagtatgtatgttagcttgacgagttttctgtgttttctttttacagaaagagaaaatatctttggatgtcatttgtgaatgttaagatttaagtcagctctgtgttaagaaaaatgcgttgttccctatcacctctgaaaaacaaccaaaagttgcgatagagtgattcattcttttttcttttctttttatttattttttctttaatttttttttgagatggagtctcgcctgcagcccaggctggagtgcagcggtgcgatctcggctcaccgcaagctccacctcctgggttcacgccattctccttctcctgcctcagctgggactacaggcacccaccaccacacctggctaatgttttgtatttttagtagagacggggtttcaccgtgttagccaggatggtctcgatctcctgacctcgtgatccacccgcctcagcctcccaaagtgctgggattacaggcgtgagccaccgcgcccggccagagtgattcattctaacattcaatgacctggcctcttagagtttctaaaccacttgactgttagttatatctactctaaggtgtctttttagccgcgttggaggaaatagacgtctttttgatctattcttcatcatttttgtataagtttgatatcctatgcagtcatatttagggatgctgaatagaaatgacttaaaaattatttttagaactgcatttctaggcatttgagtcttctgaaaactaagtctaagtcttctgaaaactagctttatcatcaaaactgaagaactgagtcatctaggaattgctgctttgctttaatgactgtaacaagatgagatgtgaataatttacaaactgacttctctaccagtcttctctctcactttgtcaaaatattttgatgtcctgacaaatactctttaaaacagtatctgcatagtgttttgccttgacaaagcacttttacacacattattcatttaattacaaatgatccccttgatttttttctgtgctcttccttttgtcccccaaaaacattattttaggaaaaattataccataactcagattcctagaatttattggttctttcaagaactttttttatgaagagcctactctatgttaagcatatgttagggaacaaaatgagtctctgcccctatggatgtttagattttagtgacagaaatacatagtaaacccataaattaatatatgaaattatgttgggtagtaagtgctatgaagagaaaataaacaaagcatgaatagagaaagattgaggagtactggcctatgtgaggaggttattttggggtaaagacttgtgtgaggccgggtgcagtggctcatgcctgtaatcccagcactttgggtggctgaaacaggcagatccctggacgtcaagagttcgaaaccagcctggccaacatagtgaaactacgtttctaccaaaaactagctgggcgtggtgacacgtgcctgtagtcccagctacccaggaggctgaggtaccagaatcgcttgaacttgggaggcggaggttgaagtgaaccaagattgtgccactgcactctagcctgggtggcagagtgagaccctgtctcaaaaaaacaaacaaacaaaacctgtgtgagtgagtaaaccatgcaaaaaccttgaatgaagaggattctaggcagaagaagcaccaaattcaaaagcccaatggtaagaacaggttttgagtgttgtagaaatagcaagatgagctgtgtatctcaagggaaataagatcagtagacagtgataggttctagaaagagggaaaggccagataatgaatggtcttgcaggccatagtttggaggtggattttattctgtgagtaaagagacatcactggaagtaaggaaacatcactggaaggctctcagcagggatgatgtgatctgatttatgtgtttagaagttgactcttgctgctatggagaattgactataaaaagagcgaaactgaagacacagaaaaggagggtggtggagtcatctcagaaggaaatgattacttggactagagtggaaatgataggtatggtgaataattatttgatcgaagatatatttggagggtagaattgatagaacttaagatagatagaatgtggagtttgagaggaagcaaagagtcaaggaaaattctgaggtcaatggcttgaacaaataaaataatgatgttgccatctgagaaagacttgggaatgatcacgtttgagtgtatgtgcttagaatgaaccagggttccatttttggattatgttgatagacagacacaaagggtatgattcagatattatttaccacttatacttgacaatctcaaattttggctcagtatcttgagaacatacacaaattaatttgtcacagggttttctaataatccattcatttctactaacatttcagaagtaatttccaaatcttaaagtttaggcttaatgacctaagacctaattccctaaatggccacgggaactagattgagttttcaccagtgatctctcaaggtcagctcagaacttaacaacattattgtcagtaggaagtaacttccccagtgattgttggaagcagcccagccttagaattaagagtcaaacagctgttcaagatgctgtgtgcgcagtaaactattcctccatagtatcacagacctgcaagcaggctggactattctagcccgtgcccttgatctcagagaatacaatctttgttttcaaagacttccagaaaaataaatctcaacacagagtttgttaaacacattttccccttatacactcaaaaatgttttttcattgactataattagatttttaaaaaaaaaacataatttcaggcctgaaatatgttcatttacttttcaattttacatcaaatttattcaatctcatttataaattaatattgttgttcatgttgttgactatctgaaacaatgaatggatgtatctgatacttcaatcccttatcttcacttttattcagaagtggagtgaaaataaggcggagctttttgtcatcttatttagatgattatttagtcaaactcatagaagcagagagtagaaaaatggttgccatacattgtaagggcgagttgttgctcaatggatataaagtttcagttatgcaagatgaaaaagttctagaggtctgctgcataacattgtgcctatagttaacaataccgatttgtgcacttaaaaatgtgttaaccgaggtccggagatcaagaccatcctggctaacacggtgaaaccccatctctactaaaaatacaaaaaaagaaaaaattagccgggcatggtagcaggcacctgtagtcccagctactcgggaggctgaggcaggagaatggcgtgaacctgggagacggagcttgcagtgagccgagatcgcgcaccactgcactccagcctgagtgacagagcgagactccgtctcaaaaaaaaaaaaaaatgtgttaacagggtaaagttcatattaagtgttcttatctcaataagaaaagatgattatggccttttctttatagcccagatacccatgttcataacttctgtaatactagctgtctcaaatgactattaagggaaacctctctttctgttgtttgctccattgcctctttcttcaaatttttttcttccatgaacccctatgaatttgctttagattactgggggcaatattcttgccaccctgccatgtacatcctggattgcttgcccttttccaagacctcgcttttaagttaactgagcattgcttgtcccgaagtgagcatttggtaaaatattcttatgtgtttgagactcaataaatatggtggctctttaaataaagaaggtccttttggtgacagaatatattcagcaactttcttgtcagacatagaaacaatacaggagacataaaaaataaggtagaaataacacaggaacaagaatgatgacgtaggatggcaaaactagtaaatacagatcaagttacagatatgactgttaacatcttgttctatgcctgctcggtatccatttgttgaatgaacagaactgttggatcatcctacatttcagagcctgtctagtgtcctctcatctcctacctaatcctgcagactacagaaaaagccccaagcagcagttcaaaccatggaacttctgagtgtttggacatgaaaatctcctttaagaaatcactaggttgaagaaggcaatgctaatgggaccacttcttgaggaaattccacccagtaactcagcagtgacactcagctttggatctggaacatgagtagacctagaataagatctgtccatttttcccaatttacagcattaattttttcacttatgattcatgagtccaggctttcccctgcaagcctgttttgcatctaaatcaacttggccttcatataacacactctagtgttctaactgggtgttctgtatcttagtcaacaatgtttactgagcatttactatatgccaagctatggctatggtttttaagcatcgataataacgatgcttagcagagactctcaaactgccaccatagagcaggcctgtggccgattaatgatcttaacaaattgattatagtatatgagaactggatgttagaacttagataaggttttagcaaatgcccacattttacaaatgaggacacagaggagcaggaagagtttatcaccttttctggatcactgcagccaggttctggcccagcccaggcttgaagcccaaggcttctgccactcagaacagtgctcttttcaccacttcagcctgcctcccaggatgattctaggaagttctgcttacaaatatgggtagtatttctagtcattccatcagattttattctgaaaaacacaaatttaccatttcaatatgaatacaggtaaaattcagcgccaggcaagctgtacatgattgaaagacatctgtgttttgaaaagcacgggcttttactcacatccatagtaatatgatcctaaatccactgtccccaggagaaagcaagatagcttttctccctgtcatgtcattacctatgcccagagttctcctcttgttcctctcatgaagcaaatcaatatctcacctttcatcccctccatacgtggttctgagctacttctatttatggcattatttagatatttttataatataagcaggaagcaagagggacagaaaaaaataatcagtggccaggtgtggtggctcacacttgtaatcccagcactttgcgaggccgaggcaaacggatcacctgaggtcaggagtttgagaccagcttgcccaacatagtgaaaccccgtctctactaaaaatacaaaaaattagcagggtgtggtggcgcgtgcctgtagtcccatctactcaggaggctgaggcaggagaatcacttgaacccaggaggcagaggttgcagtaagccgagatcgtgccactgcactccagactgggtgacagagcgagactccgtctcaaaaataaataaataaataaataaaaataataataatcaataacttggttcttctctattactttcaggaattttttaagtttctgatttcttccatggccattaggattttccacttatgtggcttccaaattattctaagtcagggagattttatgttttgttatcactcactttcagcttcactttagaattgcaagatttagattcaaagtgtgtaattaactgatggccttaggtaaaccctaacttatctgtatctcaatttgcatggatgaaacattcataatataaaagtatacaccacaaatatacctactcaaccaaactattggctccttaatgacaaagattaagtctctatatctttcctaactttgtacctaataggttcaaaataaatattttttgaatgaacaaattagtgagtcaacaatcagtcacccggttggccagtacctatggtgttttaagtgcaatctaccagataattcaaccttcataataaatagatttatcttgagattatcattgctataatagtgtagtagcatacttcatataagtttattttgtgaaccttaagaagctcaaggacaaacatctgtgtagtattcctaacattttctaaattgcatattttattttcatagaggtgctctacgtctttagtattgcttctaattctctcatatcactattttggacccttgggtctggctgtcttggaaaggtgaaaagaaaggtatggggaagaggatgtgttttaacaaagataattttatctgttcaagggattcaggaagtaattatcttaacatctgaatgctaacatctgaatattgtaaatacgtattctgtatgtacatgggagaaaatatctatatctgataccttttctatcatcacataaaggaactgacttctctggtttaaaatattaaccaaaatttatatgacaaaatcagtatatatgagtatatattttctcaaacctctttcaaacaggcctttttgggagacaagacacttatcaaaatcaaggctcttgacattaaatattcttgtttgtctttttttaaaaaaaagtcttcatttttctttcttttaaaatgcaataaattatactacaacatgcagtttatggtgagttattagatactgaaaaattggctttccattattttaatgcagattctacattgctttttttttactacataaagccatttgttttaagctccatgctacaaagaccacagatgttcattgcctagaacagtgtctgatacatagtagttgcttgaagtttgttaagtgactaaattaaagaggatcttacatataaccatgtttaaaattacatattgttatttatagtttttcccacatgataagaattattgccattttctttaacctctgacctccttgaaccaactatttctctctttttgtgggagttttatccttttgtatttaatctgaatcttttgaaattctaaagatacaatcacttaaccctctcttccatccactttcttttcttaatttcaggcaacaatgtgaaaataatggtgcttatgtctttgtaataacagaactttctttgtcttttctttggcctcattttaatcttcaatgactcatatttaagaaatgaactgtgcagctgtggtggatctaagtccttggcaacaactcgatgggcaaacacgtggtctctcacaatggatgctccttagctttgaattatttactgtccagttttaacaatggaattatatcatcaaatagtgccttggactttttaagtttttagtgccttaagtttttaagtttgatgagacctttaagatccatttccggccgggcgtggtggctcacgcctgtaatcccagcactttgggaggccaaggcgggcagatcacgaggttgggagatggagaccatcctggctaacacggtgaaaccccgtctctactaaaaatacaaaaaattagctgggcgtggtggcgggcgcctgtagtcccagctactcgggaggctgaggcaggagaatggcatgaacctgggaggtggagcttgcagtgagccgagattgcgccactgcactccagcctgggcgacagagcgagactccatctcaaaaaaaaaaaaaaaaaaaaaaaagatccatttccttattttacagaccttgttccaacaattatctccaccttctgtcaaggtcgtaacatatatctagggtgaccaactttcctcgttttcctgagactgtccaattttcctgaaactattctggttttaacatcgaaagtctctcatcctgaaaaactcaatgctggacaaaccaagatggttggttaccctactgctagcttccgtctttcactctaggttcaaatcattcctatgctaaaaagaacttcttatccctttgtcttgttatcctctctgtcctcctgtcgtgtcttcctcttttccttctcagaaaaagaaaattgaacatttgattttcacttgaaatacctactccttcttccactcactcctcagctatgcctacttctgaggcttctgccctccactgaaattgctctcagcacatctagtgaacactctgcaatgctgatcttactttacttctgtgtttcattggactcacttggtcaccctcttcctctcaaaattctcactctctccttgaaatttctacactcctcatttcccctaatctctccacctatttgttccttttctatctctcaagagatcctgttcctctgtttgcccattaaactttgatatgtaggcactcaacgtatattagctgaatgagaaaataactcctaagtattttttttctcctcaaacctcagaatttattatttccttgtggaaggaatgttagctttccaagctgagcatatcacagtcccttactctgtcccccatgcacagaacaccccccccacacacacacacacacaccatcatgttgcatttttaatattactcttcaataattttatcctgaatgagcatgaggggttctgaatcagaggcagatttcatttaattaccttacagtaaatattgttgctgtgcccttcctttgcccaaagacttacccctagggcaacatgatgaacgctgatgaaacattttcctacttgagtggctgggtactccataagtgggagactaggaaaaatcattttttctgcttataaaggagaaggaggctgctatccatctctcattctgaaaggttctctgtggaaacataacaggcctgagtcctaattccagcttctgcagaaaccagctagccctgtgtgtctcatgttttacaatctggaaatgtctccaaggtatgggcttcatattttttgaaatgtaaatacctagaaagatacccactccagtctttctaacaacatagagttcagcttaggaacctaccctgagctataaccgtttgaccctcttggatcagagaaatgaactagacaaattgctacagatctaatctccatggtgtgggaagtttctcaggaggctagagctttctgtaggtgaactgagacatccaggaaagtttatttcctcatacttagttgaattgcacccagcgtttgctcatctactcaacctagacactaagtgtcattcttgtttctttttctctcttctctccagcatctattcagtcaccaaattttcacacttcagatttttagacatttccctatcctatccctgtcatttttcctggtaccattgccctgagtcaaatcctcataatcttgcactgaattcttacaattgcctcattatctctctgattccatttctgttcttctcaaatacatactctgtatttatatcaggaagatctatttgaagcacacatattcctgtgccactcccttggttaaaaccgttcaaaggttcctgattaccttcaaggcaacacctaagcctcttagtggaccatatgtgatcatagagaggcagagcttcaaattctggtttaaaaatctaatgtatttccagatagcaatagtgtctttttcatctttggacatgccctctccttgttctttatgctctagaaacactggcctgcttgagattccgatacataccatactgcactatgtcctatgactctgcacttgcattttcctcttcttggaatgttctctagcatactcttccttgaataagtcatgttcatgcttttgaattctatgtgattactagcttctcctggaagcttttcccgattttcttccccatattgcgcaagtctatagcactgtctacattgtattgaaattatttacgtgtctgactcttctattatatgttaaatattcctaaatagaaagggctgttttgcattcaactttgtatttccagtttcaggtacaaccactgacacatggtagttcaatagagggagccattattatttttataattagtaatgtcagtattaattgcctcccttcaggtccaaacagagaaactaggcaaaatgataatttacttgaatttgggaaacttaattgtatgaaaaaaaacacaagaatacaacaactgaacacacacacacacacacacacacacacacacacacacacacaaacatggagatttcaagtgaaatatcaggagaatcagctttatatgtaagcagagtaaataactcacgtatctagcatgattttagggtacagaaatatcccattattcagaaagtacttccctatctgtaggctgaatcctaatattctacttacagaactccagtattttggttcaaacgccttccctttctctattgaattgtaaatagctgtggatgatgaatcattttgcaaagtatcagactcaggattcttttgaatggtgaacaccgctaagattttattaataaatgtgtcatacaatacagctctggaacacttctgtaacataatggcatatctgaaattcaaggaagaatactgctaatttgtttttccccagtgaaagaacagggcttaaattcagcaggcaacattgctaaaagacagagttgaaaaaagttacaaaaattaagccctagatcagggcaaatattactgttattgttaaacagttatattagcatttatgtagcatgcacttaatacttttattaataccctcacttctgagatcaaagaatctgggtcaataactctcttcaatggtgtcagagtatccgttaggttattctaggctcacggtatacctcacgatccttttagcactcgattatgtgtgaacttactgttttcactctgcttctagtgttaattttctcccttctttggatctagaaactttttgaaggcagaaactattcattttgtttttctcttgatcccctggataaaggaagattacagattaaagattaattctagatctgttcatttatagaaactagtgtccgcaattcctacatccataatagctcaaaacatttctactattctcaaagaggtcacaatggatgatgtaatgactatttttcaaaagtattgagacttttctcttagcttacctattttataccttgtcagacattttgacagaattaactggtgattgtcagttggattcattgtatactttaatatagcctaaggtcctgcaaatggcccttaaggcttcccattatgttctggatatccactatttggggtatgtttaagtcctcattagccatgctagagttttgcaatatataccttgaaactttagctgtagatttgaagtatggctgtcaggttacataaacaaagcactcttatctcaatgagagggcattaactatccagaatgctccccccatctccccagaatagctttacaaacacagcgctttcctcattaacagatagacccatatagcctttaaaaaaaatcattttataaccatcagtgtataaataaaagagatagaaattgacctgggagtttcataaacaagttctgagcacccaggattaattttgagaagaatgccacaagccaaataagcacttcttttcatctcatttcacaggccttcaagagggaattgaaaactaaagaacctgtaatcatgagtactcttgagactgtacgaatatttctgacagagcagcctttggaaggactagagaaactctaccaggagcccagaggtaattgaatgtggaactataataacatattgatagaaggatcagtggtgacggagcagcccatccattcttgctgccagggtctggatagctctcatattttcttggttaaatagaatcaattcaaattaaacatagatgctgaaaaaaaaataaggactcataaactaccatgcataaatcagtttgtgcattcataaataaacatcaaaagagattagcaatcagttattggaacatttagaaaataataaacaaagggagttatctgtgaggaggaattctattgttgcaaagactacaagttaattttccatttaagagcctgcctgaagtaaattagagcttgtggtatgcatcctaacgtttttctcctcaatagcttaagtgaatcttaaattgtcggattgatataaggtagaaactcaggaagatatactttagatgttctgggctgtatcaaaatttatgccaaagtataaaaaagccgttaatcagtaggttaccctcttgttcaactgtactctttctttcttccagtatgacctttttgacaatgtttaaaaaaaaagaatgtggcctaaaaccttgtcatattgccaatttagagctgcctcctgaggagagagcccagaatgtcactcggcttctacgaaagcaggctgaggaggtcaatactgagtgggaaaaattgaacctgcactccgctgactggcagagaaaaatagatgagacccttgaaagactccgggaacttcaagaggccacggatgagctggacctcaagctgcgccaagctgaggtgatcaagggatcctggcagcccgtgggcgatctcctcattgactctctccaagatcacctcgagaaagtcaaggtaccgtctacttctttgcttcagggccctttgagagactcaaaagagcttctaatctgaacttgagtgcagtgttatcttcccacaaagttaaagctagagaaatcagtccgtctttcacaaattcagtcttcattcacatggtattttctccaagagaagacagtgatctaattatttgtctgtcttcagttatatgaaatgaaatattaaaacagttacagggcaagaaatcactttgactttgatattaagtgattgtactaaagtctgatgtgtgtgtgtgtgtgtgtgtgtgtgtgtgtgtgtattggtgtattgcttgtgttacttagtatcagaatacagaaaaataaaacacttaatcaaaagccaggagtctaggtgttggcccttttgctaaccaaattacatgacttgggtaagttatggtttggtgaaataaggctgttaatgtgttgcccttcccttggaaggcaacatttgtaatacagtttcaagtttcattggcccactgcagaaatgagggaaaatcattatatatttggaagaccactgtctataagaccaaagttaaattcccttgtggcacaaagatggcaaatatattctgtagaaaaaaatacatatttaggagtatcattttgaaatcagcaactactcatctattgtcaaaatcacaaaaatcctcctagattaaaattcaaaagaagttaaattccctcatgcactcagcatgtttgccagcatctcagcatcctcattctagaagttgtcctcttccttggctttcatggaactgttccatccatgttcttcttcctatatttttctagattcttctcctagccacccctcaaatactgttgtgcccaagtttctaaccttagcctaattctcttttgattgtttaaaccctccctgtttgagatggcctggatggtgatgtatctacatctctagtccgcatctctcttctgatctctgaatccatgtggcattacgatcacaaatgcaactattctgaaaccaagttcatttgttctcctgttttccatttccctacttctgtcccctcttatctgaccttttttttcctgtttcctatttcagttaatgaatcatcatccaacaaattttccaggctagaaactttaggttcatccttaaacccttctgcattttcactgatggcacatgatggctcatgttacctcagaatagctcttttgtgttttctctcctcttttaaccaatgtcctttttaatccccagcatcttttacttagatgataacagtatacatctttaaatcccattcacccctctgtgtgcctggcatatctcagatactgcattttaaacatttggtgaattaatggatggatgaatggtttctttgctgatgttcctgcattacccagcttcttccaattccaatccaaactccttgcgggagaatacttgcctagagaatgaaatccaatgaataaggagattacgtggcccttttcttcctagccttgacttaccttctcagccatagctcctattctccagaccatttaatacactctgcccatatgatatatatatatatgtgatggcatatttgggaaaaaggggtgatatgggcagagtgtattgaatgtgtgtgtctgtaaagtatgtgtgtgtgtgtgtgtatatatatatatatatatatatacacacacacacatacatagttagatatatacatagtatatatacatatatacatagatatacacatatatatacacatagatatagatatagatatatctgcctttgcaaatgctgttctctctgtctggatccccctacgttgtctacttggcgaattctccttcagccctcaaggaccagccaaaatgttacctatctttgttgtctttcctgagtgtctacaacccccaactcccaccaagcagaagaaactgcttacagttggtactctcatagatcaccaagcatgctaaattgtcacacttaaatttcacatatattgtagcaacttgcttatgcatttttttttctcccagagaaagtgaagttgctaagagcaaggatcatgctgtacatctttgggctgctagcccagggccagcaacatatgaggaatctcattaggtaccttcatttattcactcaacaactgtttatgagtcattatataatgtgctggacaggtagttataaaagaaacagacttgatcattgccttcatgaagcctatggtctaatgttgaattgcatagctcttcattaaaatagtaggtaaaatttttaaaaagaaaagattaaaaatttgactctaatacttgtaaaatcccttctaccccaatgttttatgaccccatgtctaacatttaaagtaagggttaaccttgctgtgtactggaaaactaagggttttgaaatgtattacctagtattttaaaagcattaaatatgttgattttattcaaaaatatagggactaattttttgacagacttctccaaaaatgagaaataagttaggaaaatgtcccagtggaactaaattagttaatatgtcaattaaattgctcaatagataggctgtagagcagacataagggattcatttttagccatacttgtcacacaggtgcatttgtaagatactgagtatggatggagaagagaatgtgtacagcataatttaataattaaaaataactaaaagcataacagttcaagtatcagctggccttcacccaaccctatttgcggtattccttttagtttccctgtcttatctgttcttggtcttaagacaaacttcattttccataccctgattggtaaaactctcattctgatcccaatgatagcaaaacatataaacattaaacatacctttcgaaaaattatatttataacccagcacatctatctttctcagacatatatacacttaagttatggtacttatctgaatttttatgtactggtaatagtagatgtgattgggcttttgaatctgtgttgtattttatgcgtgtttcaaactatgaattacatgaattcatatatatttatctcccttcggtagctcttctttaattttgcagtggaaataaatcatttttctccactgcatcttattgacactgggtttgaaactctgaagctttgggggtagtagtttacaaagaatgagttttattaactaaaatttatttcagaaaaaaagtagaagtgtacttgaaaccactcttcccatttttccactcagcaatttaagccctcagaggattcatgctgtagggaacttttctaataaaccatggtttctctttttttattttattttattttattttattttattttattttattttttttttgcgacagtctcgctctgtcacccaggctggagtgcagtggtgctatctcggctcactgcaacctccacctcctgggctcaagcagttctccgcctcagcctcccaaatagctgggactacaggcgcccaccaccatgcccagctatttttttttttttgtattttttagtagagatggggtttcaccatgttggccaggctagtctcgaacttctgacctcaggtgatccactcaccttggcctcccaaagtggattacagcactgataactaggcagctagctagaagaacattttatatatccatatcagttcattttccttacccctagacactctatcatagtaccccccctccattctgatcttatgtgttaaataacttgttattcaagaaactaagtaatatgtgtttctgtgagatttagcattctgtaattgtattagcaaatgtggcttttggatttaaagaatgggtgaaacaacaatgactaagtccctggcctttatggaaatggcattattgctagctgatcatctgcgggtggtgaacatggtaaattaataaatggaaacacaatattaatattgactatattgctcactaagagaatctcagccttccaaacatagcttccataggaaaaaacagtagaatcaaatttaagttttaaatgcttctttacttttaaaattcatgatttatactgcttatcaaatattttaagggcaagatcatgacttttcactttactgaaaatagcaccagtgcttatttgactagacaaatattctaccttccttgtaatggggaataggaataactttttgaattactaggtgttccacatagatctgtaagtggaatatataaaggctttaataaagtagaataacttttaaacctgtagtctggatacaagatttttgttcttcaggacaatcccaaggtgaaaaggtttgtggattgttgttttctttttttttttttttttgagacagagtctcactctgtcaccaggctggagtgcagtggtgagatctcggctcgctgaacctcctgggttcaagcaattctcctgcctcagcctcctgagtagctgggactacaggcgcgcaccaccacgcccagctgatttttgtaattttagtagagacggggtttcaccatgttggccaggatggtcttgatctcttgatctcgtgatccgcccaccttggcctcccaaagtgctgggattacaggcgtgagccaccgctcccggccagattgctgttttttaatgttttgtttttgttttaataaaccatggtttctctttttttaatttttttttttttgagacagtctcactctgtcacccaggctggagtgcagtggtgctgtctcggctcactgcaacctccgcctcctgggttcaagcaattctctgcctcagcctcctgagtagctgggattacagacatgtgccaccacgcctggctaattttttttttttttttggattttttagtagagatggggtttcaccacgttggccaggctggtctcgaacttctgacctcaggtgatccgttcaccttggcctcccaaagtgctgggattacaggcgtgagccactgcgcccagactataaaccatagtttctctgtaccaaaagtggtatgtccttcttgagccaggaatatttcactgttcttagtttacctgttgactctgaacacagtttttcatacactgtaaataactctcccaggctgccatcttggaatatgcaaatctgtcgcatctatgtagttatgcatatcgcatttttgtcaaacttttaacttgcatttcttactgtgaaaagtcagggcagggattctatgagttttttctttaaagttcctacaatgaaatgttttgattaaaccttttttggcattcaaattgagattgatttaatgatgtgtgtagtaggctagaaattatgatgaagtgacgatgccatccttatttatcttcagcattcacatctaaagttttaagaagaaaactggcaaatccacctttttaggcttaccatcctcagtccctgtggctttgggtttttttgagaaatttgtcaaagaaacgctatgttagaatttgacattgaggaagccaagcatatttcctctgaatagataatgtgaaatgtgatataatgtattagaatttcatcttcactttggcaagcaagatacttgcaaccatgttcatgcaactatcttcccttattgcttttctcttcttaaccttggttctaaagttttcttcttattgtattaattttgttatgcttcccatttatatgagtcaagtcaaccttacttgatttcttatatatgagttatgtaaggaaaacttatcttttcttatagaattaggggatgaatgagcagatagaaccaacatgaacagggcgatcctaaaaatcattcaaaacatgtaagctctcccaactctgaataaacttgtgatatcttcataatgaataaggtatactgcctatagtaggaagaggaaaatttattaatgttttgtgcattgttaaagaactacaaatgaattgccgtgtggaggctttcattgttgttgttgtaaaaatgctatgtgtattaagtaagcctttgatggagaagaaaaaacaaagaaaaaatatttaatccttcataaatctgggttaaatatgaagctaattcctgttatttggagtaaccagggttttatctagtttacaaagcatgcaattgcaatgtttaaaagcatatgatttggcctttaatatctgaaaatatgtctatcaaaggccatattatagcgagtgtcactccatactttataagtacggtatatttttaatagaatgtttatgtactggtgataagagatgttactgggtttctaaaccagtactgtattaaggattttatgctattgtaagattatggattatgtgaattcatatatattgatttactttcagtagcttttcaatagaatatctagggtttaatacagcttagaaactaaagcaggaattattcatctttaaaatcctgaccaaagaagtggctggcaagatggctgaataggaacagctcaggtgcgcagcccctagtgagatcaacacagaaggtgggtgatttctgcatttccaactgcagtacccggctcatctcactgggactggttagacagtgggtgcagcccacagagggcgcagaagcacggtgggatgtcgcctcaccccggaagcacaaggggtcagggaattccctcccctagccaacagaagccgtgagggactgtgccctgaggaacggagcattccagcccagacactatgcttttcccacagcctccgcaacatgcagaccaggagattccctcgggtgcctacgccaccagggccctgggtttcaagcacaaaattgggcagctgtttgggcagacaccgagctagctgcaggcgtttttttcatatcccagcgtcacctggaacaccagcgagatagaaccattcactcccctggaaaggggactgaagtcagggagccaagtggtctagctcagtggatcccacccccaacggagcccagccagctaagatccactggcttgaaattctcgctgccagcacagcagtctgaagtggacctgggatactcaagcttagtgtggggaggggcacctgccattactgaagcttgagtaggcagttttcccctcacagtgtaaacaaagccgtcaagaagttctaactgggcggagctcaccgcagctcggcaaagccactgtagccagattgcctctctagattccttctctctgggcagggcatctctgaaagaaaggcagcagccccagtcaggggcttatagataaaactcccatctccctgggacagagcaccacggggaaggggcagctgtgggtgcagcatcagcagacttaaacgttcctgcctgctggctctgaagagagcagcagatctcccagcacagcactcgagctctgctaagggacagactgccttctcaagtggggtcctgacccccgtgcctcctgactgggagacacctcccagcaggggttgacagacaccctcatacaggagagctctggctggcatctggcaggtgcccctctgggatgaagcttccagaggaaggaacagacagcaatctttgctgttctgcagcttctgctggtgatactcaggcaaacagggtctggagtggacctccagcaaattccagcagacctgcagcagagggttcctgactgctagcatcaacatcaacaaaaaggacgtccacacaaaaaccccatctgaaggtcaccaacatcaaagaccaaaggtagataaatccacgaagatgaggaaaaaccagcacaaaaagcctgaaaattccaaaaaccggaacgcctcttctcctccaaatgatcacaactcctctccagcaagggaacaaaactggatggagaatgagtttgacgaattgacggaagtaggcttcagaaggtgggtaataacaaactcttacgagctaaaggagcgtgttctaacccaatgcaaggaagctaagaaccttaaaaaaaaggttagaggaattgctaactagaataaccagtttagagaggaacataaatgacctgaaggagctgagaaacacagcacgagaactttgtgaagcatacacaagtatcaatagccaaatcgaccaagcaaaagaaaggatatcagagactgaagatcaacttaatgaaataaagcatgaagagaagattactgaaaaaagaatgaaaaggaacaaacaaagccttcaagaaatatgggacgatgtgaaaagaccaaacctacatttgattggtgtacctgaaagtgatggggagaatggaaccaagttggaaaacactcttcaggttattatccaggagaacttccccaacctagcaagacaggccaacattcaaattcaggaaatatggagaacaccacaaagatactccttgagaagagcaacccaagacacataataatcggattcaccaaggttgaaatgaaggaaaaaatgttaagggcagccagagagaaaggtcaggctaccccaaaggaaagcccatcagactaacagcggatcatttggcagaaaccctacaagccagaagagagtgggggccaatattcaacattcttaaagaaaagaattttcaacccagaatttcatatccagccaaactaagcttcataagcaaagtagaaataaaatcctttacagacaagcaaatgctgagagattttgtcaccaccaggcctgccttacaagagcttctaatgaaggaagcactaaatatggaaaggaaaaactggtaccagccatggtaaaaacataacaaattgtaaagaccatcacactatgaagaaactgcatcaactaacgggcaaagtaaccagctagcatcataatgacaggatcaaattcacacataacaatattaaccttaaatgtaaacaggctaaatgccccaattaaaagacacagactggcaaattggataaagactcaagacccatcagtgtgctgtattcagaagacccacctcatgtgcagagacacacataggctcaaaataaagggatcgatgaatatttaccaagcagcaaatggaaagaaaaaaaaagcaggggttgcaatcctagtctcagacaaaacagactttaaaccaataaagatcaaaaaggacaaaaaaaatggtattacataatggtaaagtgatcaatgcaacaagaagagctaactatcctaaatatatatgcacccaatataggagcacccggattcataaagtaagttcttagagacctacaaagagacatagatgcccatacaataatagtgggagattttaacaccccactgtcaatattagacggatcaacgaaacagaaaattaacaaggatattcaggacttaaactcagctctggaccaagtggacttaatagacatctacagaactccccaccccaaatcaacagaatatacattattctcagcaccacatcacacttattataaaattgaccacataattggaagtaaaacactcctcagcaaatgcaaaaaaacagaaatcataagagtctctcagaccacagtacaatcaaattagaactcaggattaagaaactcactcaaaaccacacaactacatggaaactgagcaacctgctcctgaatgactgctggataaataaggaaattaaggcagaaatgaataagttctttcaaaccaatgagaataaatacacaacggaccagaatctctgggacacagctaaagcagtatttagagggaaatttacagcattaaaatccccacaggagaaagcaggaaatatctaaaattgacaccttaacatcacaattaaaagaagtagagaagcaagagcaaacaaattccaaagctagcagaagagaagaaataactacgatcagagcagaactgaaggagatagagacatgagaaatccttcaaaaaatcaatgaagccaggggctggttttttgaaaagattaacaaaatagatagactgctagccagactaataaagaagaaaagagagaagaatcagacagacacaagaaaaaatgataaaggggatattagctctcatcccacagaaatacaaactaccatcagagaatactataaacacctctacgcaaataaactagaaaatctagaagaaattgattaatttctggacacatacaccctcccaagactaaaccaggaagaaatcgaatccctgaatagaccaataacgagttctgaaattgaggcagtaattaatagcctaccaaccaaaaaaagcccaggaacagatggattcacagctgaattctaccagaggtacaaagaggagctggtaccattccttctgaaactattctaaacaataggaaaagagggactcctccctaactctttttatgaggccagcatcatcctgataccaaaacctggcagagacacaacagacaaagaaaatttcaggccaatatccctgatgaacatcaatgcgaaaatcctcaataaaatactggcaaaccgaatccagcagcacatgaaaaagcttatccagcatgatcaagttggcttcatccctgggatgccaggctggttcaacatacagaaatcaataaacataatccatcacttaaacagaaccaatgacaaaaaccacatgattatctcaatagaagcggaaaaggccttcaataaaattcaacaccccttcatgctaaaaactctcaataaattaggtactgatggaacgtatctcaaaataataagagctacttatgacaaacccacagccattatcatactgaatgggcaaaagctggaagcactccctttaaaaaccggcacaagacaaggatgccctctcccaccactcgtattcaacataatattggaagttttggccaggacaatcaggcaagggaaagaaataaagggtattcaaataggaagagaggaagtcagattgtctctgtttgcagctgacatgattgtatatttagaaaaccccatcgtctcaacccaaaatcttcttaagctgataagcaacttcagcaaagtctcaggatacaaaatcaatgtggaaaaatagtaagcattcctatacgccaataatagacaaagagagtgccaaatcatgagtgaattcccattcacaattgcttcaaagagaataaaatacctaggaatacaacttagaagggatgtgaaagacctcttcaaggagaactacaaaccactgctcaaggaaatgagagaggacaccacaaacaaatggaagaacattccatgctcatggataggaagaatcaatatcgtgaaaatggccatactgtccaaagtaatttatagattcaatgcagtctccatcaagctaccattgactttcttcacataattagaaaaactactttaaatttcatatggaaccaaaaaagagcccacatagccaagtcaatcctaagcaaaaagaacaaagctggaggcatcatgctacctgacttcaaactatactacaaggcttcagtaaccaaaacagtatggtattggtaccaaaacagatatatagaccaatggaacagaggcctcagaaataatgccacacatctacaaccatctgatctttgacaaacctgacaaaaacaagcaatggagaaaggattccctattcagtaaatggtgctgggtaaaccggctagccatctacagaaaactgaaactggaccccttccttacaccttatacaaaaattaactcaagacttaaacataaaacctaaaaccataaaaaccctagaagaaaacctaggcaataccattcaggatataggcatgggcaaagacttcacgactaaaacaccaaaagcaatggcaacaaaagccaaaattgacaaatggaatctaattaaactaaagagcttctgcacagcaaaagaaactatcatcagagtgaacaagcaacctacagaatgggagaaaatgtttgccatctattcatctgacaaagggctgatatccagaatctacaaggaacttaaacaaatttacaagaaaaaacctaatcaaaaattgggcaaaggatatgaacagacacttctcaaagtaagacatttatgcggccaacaaacatgaaaaaaagctcatcatcactggtgattagagaaatgcaaatcaaaacacaccagttacaatggcgatcattaaaaagtcaggaaacatcaggtgctggggaagatgtggagaaataggtgtgcttttacactgttggtgggagtgtaaattagttcaaccattgtggaagacagtgtggcaattcctcaaggatctagaaccagaagtaccatttgatccagcaatcccattactggttatatacccaaaggattataaatcattctactataaagacacatgcacatgtatgtttgttgcagcactgttcacaatagcaaagacttggaaccaacccaaatgctcatcaatgatagactggataaagaaaacgtggcacagatacaccatggaatactatgcagccataagaaaggatgagttcatgtccttggcagggacatggatgaagctggaagccatcaatctcagcaaactaacacaggaacagaaaaccaggcaccgcatgttctcactcgtaagtgggagttgaacaacgagagcccatggacacagggacgggaacatcacacaccggggcctgtcgaggggtgggaggttaggggagggatagcagtaagagaaatacctaatgtagatgacaggttgatgggtgcagcaaaccaccatggcatgtgtatacctatgtaacaaacctgcacgttctgcacatgtatcccagaacttaaagtataataataataaaaaaaaaatcctgaccaaattatttattcaatgtgaaattaattgtaagttagtgttgccaggagagcttattacttagttaccatgtattccctctcatctcctgctttgtttataaagctaaaagcaaattacttaggacagcaatgtcaaatcactttctttccccaaagcatctgattttagatagcgctgtgtgtgttttaaaagcccctacctcgacttaggcaaacagaaccttcgtttaccatgctattcccatcccgcctttgaaacttctgaaaaggcagagcggagtaattgtttcagacatctgcttagcatactttgaagtgcatataagttctttttcagtttcatttgaaccccagctgtcttcaccgaagtctataatcaatctgaattaagttgtcctacttctcctaataagtctcttattaagttctgcatcagcctcttagggagacttaaaagctaattcatgtagaattgccattttctactaattcacttgtcagctctccaaattccaacaaaaacaattgcaaagactattaatttggctcttcataaacaacttatgtaagtgtagtatacattggaaccaaacaaacgatttaaaacagtgggtgggaggaaatgagttgatggcattcaaaacgcttccttttttgactgttatgaaatgccttccacatcgaaagcataaagccatttatttaataagggaaacatccttctgcttttactttcatagatgagataatgactgaatgaactttgcttaaagacaggaaaaggctttagaacagttggaaaaggaacatgttctttttgtcattgaacttattttaatttggacttctttgtgttattttgatggactgtgataaaagaaggagctagaattggttattattgttattggattaaatcagagttgtacagctactcttctggtcatgggatatttaggagaacacgggtaatcaaaatgttcagctaatgagttcatctgattctactcaagaagtgtttaatcagataataaaaatttctccaaataataccatccttcctactatttgaaaacaaccatatcaacatctgatcctataatatgccaatcctgtttgctaggattttctgaaagctttgtttgtggtgggtaataactagaaatactattcctcaagagtctcgggtaataaaagattattcaaaaaacttaagtaatatactctcagtattagaggatatacaaatgcactcattcattaattcatgatatgattgaaacctatacccagagaagtctgatctcattatagagtgtgaacatttaatttatttcaaaaacaaaaattatattgagagttgtatagatggcatcttagttttcctgggaatattattatttagcaccaagctgagggagcaagaatttgtattagcttgtgtatacatgtgcatgtaccacattaactagaaacagtgctaaaatgtgagttatttatttaactgaaattccatatttcctaagaaaatggaatcacacagccaatatatatttttaattattttttgacatctaccaaagttgtgacaagaataaagttcacaattctgttactctcctaccgttcagtaaaacaggaaatgctttaagatcaaataacccaaggagttcgcttcttcctgtcatgcttgacaattacaattttcaaaatttaacagttagcattgacaccagtattatgccttacacaacctgaaattaactaagttaagtaatggcattgaataatttttcttggtaaatcagttttctgggtattatgggaacagttgtgtctgtgatactaatgtctctctcattttaatggggcctaagaaagaactttttcataataagattttttcatgttaaaataatatttttagttatagtttacacttactgcaggtttttctatttaaaagcatcttccgagagcagtgattcttaaacttatttacttcagttatcttaacagcatagaagacatagcctgacatctcccgcttccacttacctatctcctttttccatgagcatgaaatttctttgatgttcttgttttattttttaaatctcacatcaattttatggtattttccataatggattcatcatgttttaatatgaagatgctttttcttcaaattctgaagtaaggaatctttcagcacattcacctatggacatgaaagcgtaagttgagaatcacagtataaaggattgcccagtttttgcaggctttatctttttccatcaacttctgtcttttatgtacacagacaaaaagagcagacccttgctatttcaaatttatcttttgcaggttcatctgattattgtgatccaaagttccatgactagcagctcttaattttgaacatgtattatttcaagcttttgtgcatagtcacttaactaatgagttaaatggcattttaagtcaggttccatgaacgcagaccctgagaacaggggtctaggtgcctgtgatttatagagggtctgctctcaggagaagcctgtattggagttagggaaacaatacaggagaagaaagagcccagcaagtatgccatttcaggtgaaacctcacattgtgtctgatccagagagagagcaagccctcgagcagaaacctcgctgtggagttgtactctttattttattttatttttttgagatggagtttcgctcttgttgcccaggctggagtgcaatctcagctcactgcaacctccgcctcccaggttcaagtgattctcctgcctcagcctcctgagtagctgggattacaggcatgcaccgccacgcctggctaatttttgtgtttttagtagagatggggtttcaccatgttagtcaggctggtcttgaactcctgacctcaggtgatctgcccacctcagcctcccaaagtgctgggattacaggcgtaagccacaacaccgagccggagttgtgcctttataccagtcattgtctgtgtcactgaagtgctggcaaatatttgtcgactagctctgaggtgggatgaatcctggtgtgtatcaaaaccagttttcgtggtgtaaatactccctctaccactgatctccagctaccgacataatgccactgagtatggaattgggaggagatgcacacaattggctcttgggctctgctgcagcacaccactggctgtggtccactcctgggatatgggttacttcctgggctagggggctcccataagcagaggtcacatgtggagaaggcaggtagctataagacattaatagtcaaccatcacagcagctgaaggatggatgcccaggttaggtaaagtgtcccctgcaactaataagtaaacctagtaatccactcactcttcatattcaacttggctttttttaatgctgttttgtttttgcatgtacagtaattctttataaataatgagaattttgtttctttatggaaaatccacctaccctccaccctaccatgaatagcttgatagctgttcatcagaattagtgatggaagagaagagttaatgaatgaaaaagtctaagaaagtgatcactattagtaagaaaatggcctcataagtgagtttggctttatagttatggaatctgtaaatgtctaggcattcagacatgtccagacatcattgagaatgtcaagaattttcagtggcaatggttctcacctcagcatacatcagaatcacctggagggcttgtagaaactcaggttggtgaaccccttccccagagttcctgattcaaaatgtctggggcaaggctaagaagtcccaacttgttcccaggtgttcatgatgctgctggttcagagatacattctgagaaccaatattccatagtaaagctactgtgtatgtacctgaagacatattttgtgtagtgttagcgtttcttcaattacaagtaataaatatatcatttattatttcttttatatttatcaatatccagaagatttagtttaaaaatgaatgcaggcacacagcctcttgttggattgattaatagtttagatatgggagcatcatagggagcattgtttcgcttaggaaccttgaaatgaataaatggcttcttttctaaatctcacttgtggaagactttgacggtggtttatttcattttttcctgttggtattttaatgacactggtacaattttggggttgcttcagatgaccaacagcataacttgccttcccagtattaatttttaacgttaaaaatatttagtcatggccggccgtggtggctcacgcctgtaatcccagcactttgggaggccgaggtgggtgggttgcatgagctcaggagtttaagaccagcctggacaacatagtgaaacctcgtttggacaaaaaatacaaaaattaaccaggtgtggtggcatgtgtctgtagtcccagctacccgaaaggctggggcaggaggactgtttgagcacaggaggttgaggctgcagtgtgccctgttcactccactgtactccaggctgagtgacaaagcaagaccttgtctcaaactatatatatatttagtcacataacttttcactttgtgtaaatattttttgcatttaccaataaaaacaattacatttaaaaattctccttacacttttctaccaaacatactgatgataaaatagtactttatagagtttctgaatctaggatattaaaaatagttgggatcagtcaacactttttaagtaaaatctacttgctagatatgaatagctaacagcttctccaggagtgcctacattttataacttactttgtccaccccttgaggctctgtgttcagggggagggtatatttttgtgtatagaaatagagatgaggtgaaatagagatgaaatagagatgatgtgggatcaactgggagaaagtagaaaagagtcttagctgaagtggttgaggaaggaggatttttcccaaaatggtgcaaaaaacaatgtattaaatatctgtgaaaaagttcatggttgtggtatagggtgagtggtatatgaaaagagaattatgggataaactaatggaaacagatgtcttaaaatttgcttttaactttaaacaagagacatgaaacttaaacttttcccttatcctagaatctgggagaggagaaggatgagaaaaaatgaaattttacattagaagcaatttgattaatgttcaatggaaaatggaaatagctatggtcaaacccactcaaatcaagtgtacattaaataattgagttaactgaattaggcagagtaagggcacattgattttcagtgttgttgaaaattggtccacatatcattgttatgctttttgtttgtaaacctcaatatttattaagtttccacagtgtgctcagccctgaaacgccaaattctcttaaccagaatgaggctggaggatctaacactaagacagatttctattttcttttaaggaattgatttttatggtaattttttttcttcataaagttaagaacctgccagtcctgtttcgaaacacacttatttttagaagtttggttttccgggattatgcatcattatagactcaaatgactcatttagaacttttccctatcaaatattcacattctatcatcatgatcttaacacggcataagcaagttagtgaacagagtgaagtcaatttattggcaatatatgccgaagtacaggaattaagtagaaacaaaagtgaatgagagtctttggcaatacattgatgtgttttttttagaaccaatgataaactactgctgagtttcctttcatttacttttttcctactcttaaaacattgtaacccattttgagatctatccattgttgtgaacctaaagcctattaggtcttattaaataatacccatttaactgacctgtgatttaagtttcttatctgcccccaagcaagcagactgtatgcaacggcattttacctgcttcaccttctgcttgccagttggtttttggtcttcacatgtttctagcagggatggggctaaagcaagggagagaatggtccattgttttagactttcacaaacccaatatactagaatctccacaaaggttatccaatatcagggtgacttttgtgcatccaataaagcataaggttaaaagaaatacaggctaaacaaatgagcataaattactccgttggcttatgctgtgaataaaatattacctttggaaccatctcaattttttttttgtataaaggttgaaggaagacatttgcaaagtcgtttctcctataaaactgcctagggtttggggttgattgttgtatgcaagaggggtcttggtgaaatctgacccactttgaatctaaaattactgaattattagtgaaaagattattttaaaaagagttttgaactctttttcctactgaaattgtattctcctttagataatcaatgcagcatcacccccacagatttttgagggcactaaatcatactcctattttgaaaaagaaaaaagtctattactattaaatatatctgttagttgaatatcaatcactttttctaaagggtagatttggccaatgagtgatttttttttttttttttttttggaaatcacatctgagaacgttgtttagacagcttgacacttagactcatttgtgtaagtagtaatttattcatcatttgcatgtacttaactggacattatcatgatagcagttgtcataacagactattacaggatatgaatttagatattaccttaagatgtgatcataaaaatcagaataatatcttgaaaatatcaattttatggtgagaaaaatgacaaactgaataaactcttgactcaagaagctagacttttcacaacctcatgtattcacagaagtaaaaataacaactaataatgtgtccagagggcccacattgctcagaaatgaatacataagactttcttttcagcctcagaatatgatgaaaagaagatgaaccattatgatgttgcatagattttaatgaagaaaattcgttttctgttcctttcgtttgactttaagtagttgaacatcctgcttttttattttgtttgcaagaaataagaccattttagaaaggctaaaaacattaattacatttaggaactacaataatctgaaagtaaaattggatattaaaggacgtttttgcaatcctttttagccctcttctgtgtattatttttatcactgctcttaaaaatttgtattaatctttggttcatttctgccttagtatttctaagttaataatatattgaatgaaaaatcaaatcagtaaaaatccattttgtttcagtagtgagtgccttccccctagaaccaaaactaaataaatgtgctccatataaagcaaaccaggtacagcatattgcacgggtaactcacaattctagattcctctattaatcattattcagacatgcagaggtagcttaatttgctttaataagtgaaaacagaatctctttgagactgctatctgcaatattatactttgtcctgcattttcttggtcaaaaattgtattttatagccatgatatattttggcttggaatttgcttctttataagcctagttattaatagtcatcatttaaatgaaatgatatccattagccttaagctgcatgattacagagacttggtctatcttacgctgtatttccagtgcctagaacattccctggcatataataggtacccaataatagtttttggaataaatgaataaacaaatttgtgcaaaagcatagggcaaaatgctatcttttagatagcgtgacccttaaaaattattttgcaaataatttgctccatttgccaccagcttatttctggccattgttacttcttgtctctgcatacaaacactctgtgtctcttctcctttccacaatgaccacaagttatactgatctacttgagattttccaggtgactatttcatgtccagaggaacatgcctcttctagtgttcccctctgtgaatgatttcagtcaccttatctactcaggaggtctctcttcccctccatcagcatctttctctgcaccttccaaacccctatgactcaacttctcataatatggattgcattttttttaatgacccattaaattgtgtacctctgctaatgattgtgagtgtgttgagacttccatttttccagtggatgataggtatataatatatatatatatacacacacacacacacacacacacacacacacacacacacatatatgtgggcacagtatctagtggatataaagtaagtgttttcaagtgagtagtaattaaatctaagagttgccgagaaaatgccattcccgttttgtggacatcttcattctacattgtaaaggccacctcattcaagacccaccacaatcttgatcccagaaaacacccatgattcatcttttacagctgccctgtacttcatattttaagttattaaaggctatttgcttttcctcagacacacattaaactttcctacctcttaccctttgttcaagttctgaacacatatctttcttccccacactatgcttcctctttatcagtttcatgtacctactttccaatgtctagttcgaggagacgtttataaggctacatgatagaggttgcccctggggcgatgtgagaaatcagctccaaaaaggtagctacccggcaaaggatcttagtctgtgactctctcatggatgaacttattacctactgctttgcagagtctccctggactagcctgaataggaacttgtgtgactatatgtgaactaaaagaaggagaaatatgcctaaacttctcatccatctttgtaacagccctaaagtatgcatgttactatcccttttctacacaagtggaaaatatttgtaaatgaacttcgttacagtctaatatttgatgacttcttagttcatatcattatttaagtaacttttctttagtggaaaagcccaaaaattagggaggcagggagagagagagagagagagagagggatcatctgtaatctcagccccagcatctataatcccaatccctgcaagggcctctttgggcaaagaagaaaaaggcactgtgtttttgaagagatccccggtcctatgccaagcctaaccaatttggtagtagagcccaggctggatttcagttggtttgtagtcttctagtcttttcatatgtaaatatttttaatgcttttattcagtgttgttaaaatgccctccaaaagatgcactaacttgtgccaccaccaccaagcagaatatattttccttgaataggctacttcctctttttttcccactcactccatttttattttaaaaatccctggtagagaccaaaaactgaaatgttatattcttgcccaaagaatgagagatgcttcagaaattagcaaatgctccaatataaatcaagtgatagatataaataattcagatatgggataaggaaaatgggtagctttctcttatttaggaactctatgtcaggtttctgtgagaaactgtttacgaagcagtctgacaatagctattggtctgaagtattagtaattagtacagaagtgcctaattctcttgactgcttgttctttaataaaaatgtattgagggattatcatgtactatggcttggcatatactggtgaaaaacaataatgtaggattgccttaataaattttctggtcttgggaaggaacagacaatgaataaatgaataggcaaatatatatgtacttgcaaattgtgatcagggttcagaaggaaaatagggtgttgagagtcaaggaaaaaggagacactttacgtagggcaaccaactgggaataggctatctttaaaagtcacatctaactgagatcagaagtatatgaataagagccagctaggcataaagtggatatataaaactccaagcagagggaacagtgtatctgaaggttctaagtcaagagtaagcttgggccaggcacggtggctcatgcttgtaatcccaacactttgggaggccgaagtgggaggatcacttgagcccaggagtttgagaccagcctggaaaacatagagagatcccatctcgcaaaaaaaaaaaaaaaaaagaaaaagaaaaaactaacttaaaaatatatatatatcaatgccagtggtgtgtgcttgtagtcctggctaacttgggaggctgaagcaggaggatcgcttgagcccaggagtttgaggctgcagtgagctatgatcgcactgctgcactccagcctgggcgacagaaagaggccctgtctgaaaaataaaataaaaataaataaagaaataaaaagcttgatgagttctaggaactcaacattttctaacttcttattagaaatgccaaattctcaggcccaccttacacccactgaatcaaaagcactaagtgggactcagcagtctctgtgttaacaagccttccacatgacaatgagatgcacactattgtgtgagaatcactgccttagactgatgttttgagctatttaggggagggagagggcccattcagggacaatggtggttaacacatgtggctcagaccaagaaatgattgcaagcccaaaaacttgttaaatgtaaaacttcaggcgcagtggctcacgcctgtaatcccagcactttgggaggccgaggcgggtggatcatctgatgtcaggagttcaagaccagcctggccaacaaggtgaaacccagtctctagtaaaaatagaaaaattagccaggcatggtggtggtgtgcgcctgtaatcccagctacttgggaggttgaagcaggagaatcgcttgaacccacgaggcggaggttgcagtgagcccagatcgcaccattgcactccagccggggcgacaagagcaaaactctatctcaaaaaaaaagtaaaacttcatctgtctgaagtaacttctgaatttgaagataaacatcctcatggttgatattttaatggtttatggattattacttacttttaaggaagttaataggtttcattaactgccattttgcttcattttgtcacatataattaaaatttttcagacagaaaatattggtattttttctgtttccttagcaacctaaagcatgacctgcttaaatgacttatttgtgctcattaaaagcctttttgtgttaattgtgtatattttgtatttagcctctgtgaaacactcatgaactatctttttatttgttttaattgtgtcattggaaagcttgaagtattttgtggtttttttttttttttttttttttttgcttgttttttgtctataaaggggagataactggcagttgcagttaggattatagaaacattttcccaaggaaattaataaaatttgttcaagtttcttcttttacaaattgtacttatttttgattttttaaatagtggtaaaatacaaattacatgaagtttactatcttggctctatttaaatgtatacttccatggcattacatacatttacgttgttctgctgccatcaccaccatccatctccagaactcttctcatcttgcaaaactgaaactctatgtctattcaacgataatccccaccaggcatggtggctcacacctgtaatctcaacactttgggaggccaaggcaggcggatcacctgaggccaggagttcgagaccagcctggccaacatggtaaaaccccatctctactaaaaatacaaaaattagctgggcgtggtggtgcacacctgtaatcccagctacttgggaggctgaggcagcagaattgcttgaacctgggaggcggaggttgcagtgagctgagatcgagatcacaccactgcactccagcctgggcaacagagcgagactccatctcaaaaggaacaaaaaagaaaaaaccacagtaattccccattgcttcctgcccccagcccctggaaaccaccattctatttcctgtctataaatctgaatactcatttctatatcttctttggagaaatgtctattcaggttacttgctcattttttagtcaggtgatttgttttcttgctattgagttgtaggagttccttgtgtattttgaatactgaccccttaccgggtgtatggtttgcaaaatatcaattgctcctgctatgttcaacttgttcttaaaaataaaaacttttcctttgtggtcaatacttccctgttcctcatttccaaattttatacatgaaggaaatgtgagcacccagaaaagaaagaagatagacactgttaatatggccaagatataattcggcttttattataagaacattggagttacaagcttcatagaaagccatgtcctaaaagatgaagaattatgatcagtgcaaagagaaaatgttaaaaagaaaaagttatccttttatgtttgggtatatattctttttcgatattgtaaagagaaactagagttttttgttcttgtttttgagacagagttttgctcttgttgcccaggctggagtgcaatgttgcaatctcagctcactgcaacctccacctcccgggttcaagcaattctcctgcctcagcctccagagtggctgggattacaggtgtgcaccaccatgcccggctaatttttctgtttttagtagagacagggtttcactgtgttggccaggctcgtctgtaactcctgacctcaggtgatccacccacctcagcctcccaaagtgctaggattacaggcgtgagccaccgcacctggttgagattgttttttataaaaagatgtggattctttatggaaaacacagagcagttaattgctatttttttaatgtcacaaatttggaagcgtgttgagtctgagaagaaaccatagttaaaatataattactgataatcgcttgggaaataaaagccctaaatttcttcatgcctacaaacttaatattgttttcccaagatcttttttttgactttaacctttcttaagtgtttctgattatgctaaatctaggccattagttctgagtctgtttcattatttatattgttattcagtttactcgtcaaaagtgatcatgcccaaatatgaaagtttacaagaattgccctgaaaactgaacggaaggagacaacgaaaagaaactgcataatattttgccttcaggctatcacaataaaaactgttgctggaaaaaaatgcaatcacatcccttttttttttttaaagtacgtttcaatggcataatttattgtcgagaatgtctctaccagaagcataagtgatactaaaggcagagggttgtattcgctcagtctgcaaagtatcccctttgtcttagctccacacagtccctcagaatttggcagaaatgagggactcaactttcgagaaagggtgacaatcccagttttgttggagagctatgaaatagccccatagtgttagtaatgaaaattcacttaagaagtctcctgcaggcccggcacggtggctcaggcctgtaatcccagcactttgggaggcctacgtgggtggatcacctgaggtcaagagttcaagaccagcctggccaacatggtgaaaccccatctcttctaaaaatacaaaattagccaggcgtggtggcgggcacctgtaatcccagctactcaggaggctgaggcaggagaatcacttgaacccaggaggtagaagttgcagtgagccgagatcgtgccattgtactccagcctgggcagcaagagtgaaactccaccttggaaaaaaaaaaaaaaaaaggaaagaaaggaaggaaaggaaggaaggaaggaaggaaagaaaaaagagaaagaagtctcttgaaaaaaagaaaggaagaaagaaagaaagaaagaagtctcctgtataaaaaaaggaaagaaagaaaagaaggaaggaaggaagaaaagaaaagaaaagtctcctgaaaaaaaaaaaaaaacaaaatataagtgcttgacaactgaagttcaagggtaaaggctattgggaaagcagatgaagttaatctaagtaatggatgctgttggtgccccagtcagattcgttcactgggttggtgcacccattcctcagtgactctgagtattagctgctaaagcctcatggtttcacccctttccagagaacctccctcagccaaaaggaagccaccttgactggcatgtcccaccacaccttctctcttaaaaccaccaggggtacaaagggaaaacccctttgcctcatcatggcacctgctgttgtacaatttgtgatctgggaattcccatggggccagattgatgctggtctccagcccataccacatcccaacttaactttcttgccctgtcttcctgcttctctcactccctttttcttaagagcactcagactctgcttctcttaaacctggctgaaggcagtaggtatctgaaagaaaagctgtacctacattctgggcatcagagcagtcagggaaccaaccagaatgaaaagtcaaaaattacagataatgatggaagtctctgagcctgatacatttcatgaagggcttgcttacagctcaacttgtgtttctttttaattgtttcaacagcatttgagtagctcattccgcccaggtatttgagagattccagtaggcctctgatcctctggaaaaagcaagatacagtccttgactctcttggccccatgaggatgatatatctgctgagaaatgcaggagctgcaaaacatagctgggctgtacctgctgccaattcccgggtaattgcattctgtgagggcttccctgaaccacgaggaagagccccggaataagtactaaacaccagtatttataggacatgatttctaattgctcatccttgccttctcatgactagctcagcatgaagaatgctgggacttttctttcctagcacctcctctttttaggctgttttccaagagtcttggttaacaaacatttgtttgacaaggattcatggtagacagcaatgccattagtccctacttaagtaatatttgtaacataaatttctctgcacgtgtatgtagcccaagaataacacttcatttttggaacctagtaattttgaattcctagtaagtgagataggacgtctatgagttagcaggttaagattttaggaggaatatttaatatccctaagaagggaagtttttcaaacactgagtagcactatatatatttatatatatatagccagatttctatctatctatctatctatatatatatatatatatatatatatatatatatcacaccatttataaataaactcataagtggcaaatccagtagagctaatctgagcatcccagagtctcccctctctgtcgcttgtttgtgcagctactcctgctgtggccttttatggattatcctggacttctacaactgacccctctactttctctccatctacaagcttcattttgctttgctttcctcctaatccagtttagattccacagtatattttttcaattacatcctggctaatatcgaaactcccttatccctaaatgtgtgagccacagtcatctgacgaaaccccaaacctggatcaactgttttccccatgcttacatgcaacactgttggagaaaatgagaaagtcaggcagattggttctgctaaaaaatgttgaacctcatcctcaagtgggccctcaacactgtttgccaacctcattacatctcttaggtcaactccctctcacagtctctattacgattaattcaaatgttcccacttacccttaattcatgttttcattcagtgactattcattgcacaccaggcactgcacgctatgccaggcactgcagactatgccaggtctgttgattcctacttcacagaggaaataaaacccctccaagcagaattccctcaatttactctttctagtctttccaactgaccttctgtgctttgcagtaggaatgttctcttaactgtcaagtcaaaattcctccctcaaaaataagattcccttgttaatagacaattcctttattttcttagaaaagtagtagatgactataattttaaatgtgtatttgaacaaatccttagctacataaagataagcaaagatatgacaggcaatttaattttatatgaagaaaaacttattatatcagacttacctatcattctaaatcagtacttttgtatctataatcagacaacatttaatgaactgaaaattctgcctgtgagaaactagtcataataaaattagacttggtttgctctttcatggagaacatattccagatgtttaagtgattcaaagaaaacccacaatataatggctttcttcaatgttttctcacttactgcttccaaactagaaaaaaaacctaatgcaatcctgatatcacttaaatagcacctcgtattgctcagcgttaactgtgctttttgacattttaggtgtagtgtttaataatttaaacacaaatttatgtgtgtcatattaaaagctctaatctgtgaaatatagccaaaccaatgtcacatctatttaaatagcaaagtacctgtgttcaccctttacagggtgaaggtcttgtgactctgtgtttaggcggccatacttcttgttatgtatgctgctgggcactgagagcccacagtggtgagccatccttgggtggtaaaagctgctaccaaaacctaaatcaaatgccaaagtgaagactgacatgagcattctcctgcctccttttcctttttatctttcctaccatctgttatctcctttcttccaccttcatgcgttgagtgccctcatgatgatttctagctgactgaagtcctttagtctgctcaaccccatctagagacttccccaaagtgaacctttgcccccagttatctgtttatcaactgacctcacaccagtcaaagcttccattgtcaaatattttaacagaaatttaggaattcagattaaactgaatatttggcattttttcttttttttttttttttttttttggagacagagtcttgctgggtcacccaggctggagtgagtgcagtggtgccatcttggctcactgcaacctccacctcccaggttcaagcgcttctcatgcctcagccccctgagtagctggtactacaggcatgtgccaccacgcccgaataatttttgtatctttagtagagacagggtttcaccatgttggccagtctggtctcgaactgctgacctcaagtgatccacccatccacccacctcagcctcccaaagtgctgggattacagtcttgagccaccccacctggtctgggttgttttcttcatctttagcagttgtcttgttcacaactacttcaacaatatttattttctttttctttttgaagcaactctccagagtatttggcctggtttttatagaaataataacttttttcttttctttttaaactaatatttttatgatttaggaaatctttctttattaaattacataatcacaacagttactggcaaagataggtttgagaacatacacacaactgacggttgtaacaagtcaactgatgggagcagaaggtccacacatactgacaggcacctcgaacattttattgaggctgtgagaggttcccatcactgctgtttcacaaagagaatgaagactttggctaatttggtgagtcttaagtggagattagttcagagaacttccactatcattgcttgaaagaagcaaaaaaaaaaaaaaaaaaaaaaaaaatcccaagatcttatggtaaagtttaaagaagaaaagtaaattttaaaaagaaaaaaaaagaggaaaagggagagcattgcaattaattatgagtaccaaaacttatttttgaatccccttcatcctccaaaacattgaagcaggattaatatgtgtgctcaggaatttgggagagaaaatgaaaatcaaaatattctaataagagacatttgaaaatgtacattgtgtcacctaaagggaactgaaatctagctatggcttaacgaggtaggataatcaacttaatggcttgagagtcttgcttgtaaagagagatgattagcacaaaggactcacctgtatcactgaaagatgctgcctgctggcttgccctctctgcagaggttcctgtttacagtttcccctcacatgatatttatttgtggctactagaaatgcacgttattatccagaagagaatgatttcattttgtaaccgttgtccttgtccaagtttcccccattgacatttaagaaatctgttttctaacctttctattatgcaaaacaaaattaatatggatcatttccttttagagataagtattcatatatatggatttaaaccacctttctccatgggcccttattctgatacttttaatccatgtatttattcataaggaaatggaacaatatttactatccacccctataaaactttctgaatttcacactgattccagtgacattccactaacacgaagttgaatacagatgaatacatcacatatgattttttttttgcatgtgtatggtcagaaggggctctcttttgtttgtttttattaatatataattcacatactttaaaattcactctttcaaagtgtacaattcagtggtgtttagtatattcacaagattgtgccaccatcaccattgtttaataccagaacattttcgttatcgtccaaaagaaaccccctgattgcttaacgtaatgtttttaatgaccactttttaaaactttaagttcaacagagtgattatcacaatgttttgtattatctaagaactacacaacagtgttatgctctatacagcaccacggtttactgatgaagtattcaggttgatttgagaggataatgtcgttcttattttgaatgttcatactggctccttttatttggagtgggaggaaatgcaaggcttataaatgaggtcagtgtaaccaatggttttatcaacatagtgaaccagacagagaaataacacctgcccagatcaagcaagtcaaaacaacacgtatagtcaagtggtgctgtccttgtacacagacattacattacacaaactgttctcctaagtgagggaatttgtcccttagaaattgcttattggaacatttggacatcatgcatcatgttaaagatccataaatgccatctcgatagggtagatatgaggcgtggtaatatcctccccatatctgcatagggttcttctgctcaacggattgctatgatgtattgcatcagagactcctgctctagtgcttcaaagacagctgagaagccccacgggagccttctgaagtcattgctacaagggctaaaataccaggagatcaggaagtcattctgaggacttgacaaaataccctactccctaaatgaaactgttatgatgtggttggtgcaaagtatgcatgcaatattttatgactgaatatatctttctattgtaaaaaataaggatccatttctggttgtgacatgagtagaatttagaatccagcagcaatatatttttcttgttactttgccaatccagaatttcttaggggaagcatataacataatagttaagaatatatattctagaggcaggcaaacctgcatataggtatcccaggttcctcaatttttacccatgagagcttggcaaggtttgtttgttttgaaaacaaacctctgcaagtttgttttctcatgtataaaattagaattctccaactactggcctcataggattgttgggtagaaataaaatcagtttatgtatgaatagagctcatcatggcattaggcacctaggaagtgctcaacaaatagtagttatcattattcccccattaacaaatatccattgttataatactaccacaagagactgtcttagtctgttccagctgctataatagaaatgccataaattggatagcttgtgaaacaacaaaaacttatttctcactgttctggaggttgagaagtccaagatcaaaataccagcagatttggtgtctggggaaggcccattcctcatacaaagcaccttctcactgcaccctcacatgctgaaaggagctagctagctctctgaggtctcttttataagggcgctaatcccaaaaatcacctccctaaaggccccatctcctaataccattgccttaggtgttttgatttcgtttcctttttattttttaggatttcaacataggaatttgaggggggacacaaacattcaaaccgtagcatagagcaaacattactggcactgcaccctaaagagaataagcccaggtatcagttcttcttgttttaaatattctcatcttccaatttgcttttgactattgcacacaggcacttcgaggagaaattgcgcctctgaaagagaacgtgagccacgtcaatgaccttgctcgccagcttaccactttgggcattcagctctcaccgtataacctcagcactctggaagacctgaacaccagatggaagcttctgcaggtaagcacattgtaaacattgttgtcctttgttacagtaaaataatatacagataaaatttgtaaagaacaatgaaagtacttttttcatgtaatgttcatggtaatatttgtgaggataggatattttatattagtttataattcccatctaaacattttcaaattattaatattaattttggaagcaactaagacttagtatatgtcttagtctgtttagtgttgctataaaagaatacttggggctgggtaattcataaagaacaggtgtttatttggctcagttctgcaggctgtacaagaagcatctgcttctggcgagggcgtcaggctgcttccactcatggcagaaggcaaaggggagctggtgtacaaagatcacacggcaagagaggaggagaaaaagagggaggggaggtgccagttctcatgaaaactgctagagcaaaacctcgctcactaccgtgagaatggcaccaaaccattcatgagggattcactcctacaacccagacaccttccactaggcctcaccaccaacacgggggatcagatttcaacacgcgagttagagggaacatccaaactctgtgtagcagtattcttacgataaacagaaaataatgctgaatcatgatggaagatgtgaattgccaccatgcagttcctttgtactcttactgcttggattctcaaaaacatctttccctttagaatcctaatttaaacaagagtcaatagtaagatgtgtccaaaagtcatttaaagaaagagcatcctatcacaaacttacatgtggaagtttttcgtaggtttgcgtaataaatacaggcaatgtaagtgtgctgctcaaggtcacacttactagccatgggacctggagcaaattacttaacctttctgagcctcagtctttcatcaaaaaaaaaaaaatgcgataataaaattctctgcaatatcagtttattattaggatgaataagtcaaaataaatggaaagtgctcgggagcgaacatgccaaatgataaacactctacaaattctagctcttgatgttgttattattattattattacagtacacaggttttggaatccaacatattagctgagtgaccttgaggccacttaatctctgtggttgtccatttactcatctctaacatggttactgtaacatcgaatgagttaattcatgcagagtaatggttgtagtggtggaagaggtgcgtctaccttctcagtgtgaaggacaccatgttataccccaaaaccctaaaattagtttaaccgtagaattagagaatcattttctctcctttccaattttctcctttccaacaggatgcagaaggtatgcctctgaggaaactgggtttaaaactatttggttttaactttttaataagaaaaatataataaaccaaatcactttcctattgtcagtccatttaggggtgtgattgagaggcctgttaaagaattgctagatctttaataaagataagttgcaaatcccagacctcttgagatctcacataatttaattcttgttgtgatggatagtcctgaaagatttgtattctagattgttataagtggcatcgactaaagcaaggcgatatagctaagtgattatatgcctttctctgtttgctccatagtagttgagtactattaaaattttatctgttccatccttagtatgtttttcatcttaagtataaataaggaaagtaataaatgtccaaagaaaaccaatggccacattagtcccatataagtgttctagaagtatattttataatttcttttagagagcagaatgccacgtttgctttcagaacgtggtaaaagatttgtgacagtggcaggtagatttccaaatgaggtcaaaggattatgactagtaagaaaagtttttttttttttaatcaatgctaagtgatccattctagttgcactatttatttgcatttaaggtatcaaaaacagtaaatagcttactatgtagccattctttacaatgagtaaaaacttggttataagtacaggaaaacacatgtaaggagatagtatgatatagcgaaaagagcattggattgactattaggaggtctaacttcaaacttaagctcagccattatttgaccgtgttattgtgagaaagccatttaacctctctcagctttaattctcctcatttttaaaatgcagaaatctattttgtctaaggtcacatacagttcaatcttatgattctgtctctagatatctgggggagatacacatttgacagaatttagtttaaaaccaatgaagttcctttctttattcataatacaaatgtggtttgttgaaattatatttctccttgtataactctaacttttaatctcttcttccctaaacccacatatacacagccttctcctattaaacagttcagtttgtggtgtctgctctatattgtagcaaatttcatgtttctatttttgaacatgaccttaaagatatgcttaaaaagtgtttttagcagaaagctgataaatccaaggttttggtttgcatataaccgagtcaagttagttccattcttttctttgatagtaattctgctacattataaatgtgaggccttgttcagaaagagaagaaagcaagaaatgaggttcacatcaagcaatttttttcccattactggaaaagcaattcatacatcctgttgagaatattttatatttagaacaatgtatgtgaggctaacgcattatccaagttctatggcgggaagcttgagcccaccaccattatgacatcatatttttttaaatagtaaatgtcaaaaaagacatatttctatgaaaataaagaatttagtcacaatgctatgtcaatctttaaatcgtgataaaaaccaagtacaagttcatctttgcctctgtccactaagacaaagaacaatcaaaaagtaaagaactctctgggcatggtggctcacgcctgtaatcccagcactttgggaggccgaggcaggcggatcacttgaggtcaggagtttgacaccagcctgaccagcatggtgaaacctcatctctactaaaaatacaaaacttacctgggtgtggtggtgcgtgcctgtaatcctagctactctggaggctgaggcaggagaattgcttgaaaccaggaggcagaggttgcagtgagctgagatcgtgccactgcactccagcctgggcgacagagccagactcggtctcaaaaataaaataaaataaaataaaaatagagaactggagtagtagaaaggcagatgtaaacctgagaaaagaagaagagtcttaaatttgggcaaaatagtataatagaaagattagagttacatactatcaggccgtgtctacttgatatcagaatatcctgggttctttgcattatccattcatttaattttcaaggaaagccatgctagttttttagctgtctgtaatatcagtcaaaatggtgaaaccagttaagggatgtgagcaccaacaatacagtcaaacccagtcacaatttacctatgtatagaatcataatgtatagagaattccaaactgactttgaatcttctaatagaaatgtaagagacattggtttgcctgtttgaaattttctgtgggaatgaagtcctattttcttcctcaaagtagacacattggtatgcatgttactatttgaccatttgactttttgtggtgtaggaaaccatcactccttgcagttagaaaaagtcctcatgtgcattctctcatctaagaatcacaaccttgtgattttgtattatgattatgattacctattatcattattcccttttacgtgtaaggaaaccgaggcttagaaacatgaagtaccacagtcacagtcacataacttgtatcagtcaagatctgagtcaggtttttcgaactgctattcccatgctctttttgtctcctcttctcaaaatcctattacgtttggacttaacaaagcaataatggctgggtgtggtggctcacgcctgtaatcccagtactttgggagggtgaggcgggtggatcacttgagatcaggagttcaagaccggcctggccaacacatagtgaaaccccatcactactaaaaatacaaaaattagctgggtgtggtggcgcacgcttgtagatcagctacttgggaagctgaggcaggagaatcgcttgaacccgggaggcggatgttgcagtaagctgagatcatgccactgcactccagcctgggcaacagagcaagacaccatttccaaaaaaaaaaaaaaaaagcaatactttaaaactattttggacaatacaggtgtaaaatacttcacttttttacatgtatcttcttttttgaaatgattcttaggtatattaacttttaaatcttccttttataaaccaatggattaatgaacccagttcagtgtaccccttagaaatcacacttgtttcaaatataaaattttaaagcattatattcctcattgcctttagaactcagcaattgtactaaaatcagccaaaagtgatttcagtgaatcagctcttaaagccaaactaatgctaatatttgaccaagtagaaacgaatatctaaaccaggtgagaaaaaagttaaaatgatgataaacctttctaattttgaaatagtacacacactgagtaatgcagtcaatctctttattcaccaagcgcaagtagtatataaaggaatattataccatttttctttactcatgagtaaacccacaaatagcacaaaagctgcaaaaacactttaacataaggagtatttgttttattgactgtaggaactcatggaatgcaaacacctttaaaatctgaataatatgaaggcatttccagctattagattctttacatatgtcaaagaacagtatcataaattatgtatgttttttaaaggtttcctaagcttcttccaaagtcatgtagacatcattacactccatctgtatacctctgtggtaacttgctgtcgcagggatctagagcctcatcttttgcaaacttcattccttctttcatccctttgttctttcattcagtcagcactgattgagcatctactgtgtacctagaagacattgtaatgatcctgtttggtccaaggacatactaaacaaaactccctttactgcttatgctatattaagtaaagctttaaagatgggttctcttttattacttccatgatggcccacccctctcatcctttctcagtgttaaaaaccagaaatatacatacttacatactatcataacactgatactacaaaagcagtacccattattatctctggtttacaaattattcaataatttcttactggaaacttggtctatatagtcatagtagtaagctttgtgagaggatgtgatgggatcatagttagctaaacaataggagtatttgtgtggcttcattttaaaaaaactaaccagtttttttccaacaagcaattcttatatcagaaccatttatattctttactttggtgagataggattttctaagcaggtcttttatctgtatctatgtatgtttgttcttaccatcattgagcacaggatttgatcctttaaatgtgttgacagattttgaacattttcctcatatctttcttttttgttttttaatgatcctgtactaatcattttgcattatggggtcacttctggacagagagcctagccatctgctcttacaaataatgtcggcctatcactaactggggataaggagaagacatctaccgatgtctttctagcatgtccttcttgactttttctttctttaagaagactaaaatgattcagcttgtggttctaccacagaactcaggagaaaatgataaatatgaggccattctccaaataaatatgttttcctacattagtggttctcaaattttaacaagcatcaaattcacctggaaggcttattaaaacacagataactgggctccacataccaagtttcaaatgattcagtgggtctggtgtggagcttgagaatctgcatctctaacaaactttcaagtgaggctaatgctgctgaatcatggaccacactttgataacccctgttctatgttaagtacttgtcaggtacagacaaatttaaaagttaaaaaaatatatatatgacttctgtaagacactgtgaagggtttagactctggggaaattaagtataatgccatcccaaaaactctgtgttggaggagtgttcaagtgctgcaggatcatggagaaccaagcacttaacttttctatgaggcagaaagaggaagataaagggaaacgtggaggatgaagggaaactgttaatagatccccagaaacacaatttgctgctatatggatttatatttactgtatttcaaatcacatggtctagaactgtgctgtccaatatgatagctacatatggccattgagcccttcaatgtagccagtcgaaagtgagatgtgtagtaagcgtaatatatacacatgtaatatgtatatgttatatatatgatatagatgtaatatgtatgttatatatatgatatatatgtaatatgtatatgttatatatatatatatatatcaggatgcaaagacttagtaccaaaaaaagaatgtaaaatatctcattatttttatattgattacatgttgaaatgatagtatttttatgtatttgcttgggtaaaatgtcataatgaatttcactcatttattatgattattcaaacttggttatttttcttgaaaatgaatgaagtgagcctgttgcttcggctacaacaatgggcagtgtttctgcaaaatttttacatgtgcctactagaacatttaaaattgtacatgtagcactcattatatttctgttggatagcattggcctaaaagttttcaaaatctagcatggataagaatcacctgcaaagcttgttaaaccaatccgcccccagaaatttagtatcgggtgaggcctgcaattctgcatttctatcatgctcccaggagatgctgtctatttgtaaccacatatagaaattcattcccaaactacagatgatagagttttacagagaggtgcaaaaatatatttttgcatcaagcattgtctgtagcttgaatacaaaattatgttgcccatataccactggtttttgtaagtaaagcagttgtgttacaaagcatacaagtttttatcagctaatagccttttctcaattagcagatactaagtagtacttttattatgtggcaattctccagtttttggaatgttattgagaaatacacagggttaaaacaaattagaaagcacctctcccaaaatactgcagtaagatgtaggaaaaactgctctaacatattctaaactataggttgctcttatgtaaatatttcaactataatatctagtctgatgtgcccactggccagagttttgtaaaagctaaaagtaaaggaaataaaaaaaagaaagaagtatgtgtttgtttttgaaaaggttaggtcacagaaggatttgttgatattaggaatagaatgacccgtgaaaaaaggacaattaagttccaggaaaacatcttttcagtaaggagagaataatcatttatgcttaacctcaactctgttaggaaaaaaaggatgtaaacaaaaccctttaaagaattgaagaaggagagtataaatttaaatgcccaggttagtgaccacccttagagcatactgaggtcaaagcgtactgtcaagcttaagaacatttggttttcaatgtttgtacaactaattgtactttagtcaagaggactgttatcgaaattgctcaggtagccttgaaactaatatggcccaaatattccagagtctgtctttctcaccctaggagaagaatggtctggttttcaagggaattctctattttttttttttgaaggcatcaggatgtgtgaaactacagggggataaatgaacgatgtacagaatgtgatgaaaaaattatatgaagtataaaatgggaatgaagccatcaggagccaaagaaatatttatgaatttaagagaatgaaaagcatattattattttcagatattttataaagtgaacccaaatcattataaagtattaattaggctacttgattgcttgatctttatatactaatttctaatttgttttaatcgggaactatttttgctagttctaaggctagctattatggtaatccatgtaagtgtgtttattattgtttttaaaaatggaatgtgttcctagtaaatgtgtttaaatagcaaaatgtatttatgcatgcatgtatttattttagtttcctgagacctctagttccttactagaaacatgtatataattccaggcatttaaaattgccatgatggtcatgttttcttgtccttttcccttattctgcaactgacatttgcccttgtctccaatttctcactgctttattctttgttcttgtaagtgttcttgtctctctgggctgacctctctccttccctggagtttgaccccgccccaccctttcttctgcatttgtttgcactggttgttttcttcattgcctttcccactgccccgctgcgctgcatgtgaaacactccgccagtagctgctcacagttcccatgctacatcatacccagcattcaaagagctgctgttctcacatggccgccagtaagattcccgactcctccttcacagcacattcctctagaaagtagaaagaatcccctttcaggccacatgagaagctgcgtgttaaagccaactccataaaggggaatggaaactagcgtatgaaattcagaaatgctacttttaaaggtaaataccacaaagtgaatttcaaattcatacagtttatcataatacttctttatttttataaatgctataatgtccttaatataatgatcactgtgatataagttgtcctctcccttaatatattaattaatttactaaaggagacgggagggtggaaatataataaattagaagatgattcttatatcagaagtacagcctttatacatagttttactttattcagacaatcaatgtagtcatatggtataaatttgaaaataattttagtgagcattacgcttactgagattaatagtgagaacttacctagcacttactgtatgccattcacaattataagcacttttgcatgtgctaatgcttttaagcctcacgtaacccagtgagggaggtacaattttaacctcattttacaggttagaaaaatgaggagcccaagggttaagtgacttgcctgtggtcatatatcaggtaagtgagagagccaggatttgaacccagacagtctgcctggggaatctgtcagaactcctaactatgcagtaccactcctctgataaaaagttgaattgacatgacaacatttcctattcatttatgattcgaccctttaaacaaaaagaacagcatcattctcacatttattaatttgtcaggaatcacctggatcatgagttgaggaaatttaaagtaggagggttgtatgaatttcagaccacgatctcaagaattgcctgtttaactcagagcctgaatcattcacagactaaaaactagaatcactcttctgtaggaccaagagggttgaatcatcaaagtcttgctgaagtgaacggaaatcctcctttgttcaatcattcattcaataattatttttttctggtgtctactctttaccaaactctgtttgagatgatagggattcagtcatagacagaccttctctgccctcatggaggttatggtttcttgggatgacagacagtaattttttaaatctcataaaataattacaaatgtgtcaggaaagaaaatacaggacactaccagaatatatagtaaggacctaaatgtgtgtgtgtgtgtgtgtgtgtgtgtgtgtgtgtgtgtgtgtgtgtgtgtgtgtgcgcgcgcgctgcagtaagggtgagaggcaggaaagggcaatcaggacaccctcccaataaaagtgacctttgaccgagatctgaaggatgaagacaagctgagtgactcttctattcatctatatcttttgttttaaatggcctgaagcctgggactaactaaacagggttgtaaaattccagtatgtaaattgaataactagggatcatttgaagtaatggactgcagagttaatgtataattaagtcacatctagggaagatttcccatcattatcacagagagcatcctgtttgctttcttcacagcacttacgaaaatctatagctatgtgtttggtggcttgtttaatgaaagtctgtttcccctatctgaatgtgagctccataaggacagaggccctgaataccacatctactgacatttggcagtgtctttcatatagtaagcattctataaatgtcttgaatagatgaatgcataaaactaagttaaaatgttactgaaaactataaaaataagcagaaagttataccagaggagaaaaattaggggaaaaaaactataatttctgaagacgtagtacttacatctaaatttgtggcttcataaggttaaccaacacttaaatagttttgccaaaactccaagaaaaaaatgaccgggtgtcgtggctcacgcctgtgatcccagcactttgggaggtcgaggtgggtggatcacctgaggttaggagttcgagaccagcctggccaacatggtgaaaccctatctctactaaaaatacaaaaaaattagccgggcatggtggcagacacctgtaatcccagttactcggaaggctgaggcaggagaaccacttgaacataggaggcggaggttgcagtgagccgagatcatgccactgcactccagcctgggcaacagagcaagactctgtctcaaaaaaaaaaaaaagaaagaaagaaaaaaaagaactaccatttgacccagcacttccattacttggtatgtacccaaagaaatataaatttttctaccaaaaagacgtgcgctcatatgttcattgcagcactattcacaatagcaaagacataaagtcaacctaggtgcccatcaatggtggattggataaagaaaacgtggcatatatgcaccatggaatactacacagctatgaaaaagaaggaaatcatgtcctctgtagcaacatggttggaactggaggtcattatcctaagcgaattaaagcagaaacagaaaaccaaataatgcatgtgctcacttataagcaggagctaacctttgggtacacatggatgtaaagttgggaacaacaggcactagtgacaagggcaggagggtgtgggacaagggctgaaaaaactacctatcgagtactatactcactacctgggtgacaggttcaactgtactccaaacctcagtgtcacacaatatacccatgtaataaacctgcacatgtaccccttgagtctaaaataaaaattgaaatctaaaaatataaaatatcaaatcataaaaataaataagaaaacaattgaatctactgatatgtttcattgcttttaaaatatccactttgaattactgaatattttaatatttttagttttacacttcagcacagaaagtccagaaatccaacccttgagtttacaaagacaccacatgatagttcatagttcacacagctagttagttgtggaactagaacccaaaatttgctctctatgtctctcacataccttttccctttattctaataaaggcatttgtcagtctaaatgtacaatattcgaagacattttttaaaggaactacttatccaaatcccacctgtcttacaaggtccatgtgaagcaatgagataaggtctgtgaaactgcttccgaaactatcaaatgttataaaaatgttaagttttattattagaactgcagttcatctctatgaaacctttctaaactttctcacttttctgaacttgactacgcagcgtcttttctaatctatttgttctccctttataagaagaatttaatcctttccgccctgctgggttgtaagaaaaaggactctcttcttttctataatctattgatatttgattatattacacatctaatgggttcccaataaatacatagtgaatagaattgaaccaaatttctttctagacatgtgaaaaaaaatcctgatctttaaatagaaagggtactttcaaagattatatatagaacctcttggtattttgtatttgcaatgaaaatattttaatttgggccaggtgcggtggctcacacctgtggtcccagcactctgggaggccgaggtgagcagatcatgaggtcaggcgttcgagaccagcctgaccaacatggtaaaaccccgtctcaatcaaaaatacaaaaattagccaggcatggtgacgcatgcctgtaatcccaactactcaggaggctgaggcaggagaatcacttgaacccgggaggtggaggttgcagtgagctgagatcatgccactgcactccagcctgggtagagagggagactccatctaaaaaagaaagaaagagagagagagaaagaaaagaaaagaaagaaaatattttaatttgtcttatgttcaacagttgcatcatatctgcatccttttgttaaaattgaacaggcttctagtttcatataataatttctggccaggcgcagtggctcacgcctgtaatcccagcactttgggaggccgaggcgggtggatcacctgaggtccggagttcgagaccagcctgaccaacatggagaaaccccatctctactaaaaatacaaaattagctgggcgtggtggcacatgcctgtaatctcagctactcgggaggctgaggcaggagaatggcttgaacccaggaggcggaggttgctgtgagccaagatcacgccattgcactccagccggggcaacaagagcgaaactccgtctcaaaataataataatcataatcatcatcatcataataataatttctaccaacagctggcaggaaaaaaatatgagagcatagtcatgaacttcagattccactccccttacttttggcattccattcctctgaattatagcttatatttctttattatctcagtttgatttagtctttctaaatattcacctctgtttccatccataaatatcgactgaactaccttttaatatactatctttttgtaacagagaaaatcaagtgtaggtggattattgtaagtgacactgaggaaatataaaaagaccttgacttgtccaggcgcggtggctcacgcctgtaatcccaccactttgggaggccgaggcgggtgaattacgagatcaggagatcaagaccatcctgaccaaatggtgaaatcctgtctctactgaaatacaaaacattagccgggcatggtggcaggcgcctgtagtcccagctacttgggaggctgaggctggagaatggcatgaacctgggaggcggagcttgcagtgagctgagatcatgccactgcactccagactggtgacagagtgagactccctctcaaaaaaaaaaaaaaaaaaaaaaaaaaaagaccttaacttgcttcaaacaagtcaggacccccaattccaattcttaggtctggcattcccatcagacacttaaactgtaggggcagtaaagttgcccatgtggctacagcttttgtggctgtgctgtacttgggaattttaatgttaccctctttgaattaggtccttcattgatcatgcatctcaaagtatctcagtgccacataaaaattttctttcagagtcatattttcccattatgaatgctacctactgcttatctgttgagtgtacacttttaaaccttctgtgggtggtggcccctttgccactgggtgagttagatgctgatcctggtcattatcgctgcctttccagccttttctgctcttacaccaagcacaagaattctctgctgatagtcaggatctagggctgggaaaatgggatgagttgtcctgttagacaggcccaaaaggagtattgtttaatccccagggtgtggggaagaaagatactcttgttttcttttccccaaatgtgtccatatacacccttctcctttgctggcagccaccaggcttgttgaggatctaccctcctctgcatatcatgtgcatcaagggaagccccaacccaagggaatacataatgatagtcctgagctatttcatggtgctctcgcagtcttgattgccctcttcggaattggacatggtcatattacgcaattttaggtaataaaatacaaagggcattcagctaagggaccttctgagaaaggtttttctcgtctagagaactaaacaggcatccttctccgggcactatgcgtagttctttattctacctggaacattctttctccagaaatctttgtgactaactctgtcatttccttcaagtcttattcaaatctcaacttaaaaaaaaaaaaaaccttcttaaaatttgaccacactaattagacagcaactgccccatctccctcttcccagccatctgaatccatttcccacttacctttttatgatagctcttctaggaaggcactccctcctccctgtgaatcatgtctccaggcaattgttccttgtgtagaggaacacaccaaatctgggctgctcctgtacaacaaactgaaggaggtagaattgattctgcaagaagttcaaagctaaataagaaggagtcttgtagcttctgtcttggtcttctggaatgctcactctggggaaagtgatctgccctgtactaagtctactctaaggccactgtgctgtctacatgaagaagccacaaatctaagctagccacatggggaagctgcatggaaagacaaatacgtggctagcccccagctgttggccgaagatccgcagccatcccaagtgaggagccagatgtacaagtgaaaaaactgtaacagccattccaatggagccttcagatcaattcagctttggctactatctgactgcaaacacatgaaagaacccaagcaagaaacacccacctgagcacagtcaactcacagaaccatgagcaatactgataaatggttatttttagccagtaagttctagggtgatatatagcaaaaggaacatctgtcctgttttttctggtttttcctatcatacactcattctgcaggattaacatgtgtaatatactttttttttttttttgagatggagtctcaatctgtcgcccaggctggagtgcagtggcatgatctcagctcactgcaacctccgcctgctgggttcaagtaattctcctgcctcagcctcccgagtagctgggactacaggcatccaccaccacgcccagctagtttttttttatttttagtagagacggggtttcaccatgctggccaggctggtctcgaactcctgacctcgtgatctgcccgccttggcctcccaagtgctgggattacaggcatgagccaccactcccggcctaatatacttttttaaattgtctttcactatgagaaggtgagctccatgaggccagggatattgtctgttttgttagctaatgtatccaaattacctaagaatagatcttagcgtggtaaatatttgttgaatgaacgagtgaatagatcagaatttcagtagctacgttgtgagtatgtggacagttcaccaagaatggcagaatggaaggatgggaggaacctggaataatgtcattgtgcttctggattacccagtcctggagcagctttgcctctgtgggccttgactagtcaagacattttgtgttgggtttttatgttaattccatttgcatcactataaaggaatacctgaggctgggtaatttataaggaaaagagatttcattggctcatggttctgcaggctgtacaggaagtgtggtgacagcctctgcttctggtgagggcttcagcaagcttacaatcatggtggaaggtgaaaggagaaccagcgtgtcacatggtgagagatggagtgagggggtgggaggtgccacactcttttaaacagtcagatcccacatgaactcactctgagtgagaactcacttattactgcaagaatggcactgagccattcgtgagggatccagccccatgatccagtctcccccaccgggccccacatccaacactggggattacatttcagcatgagatttgaagggaacaaacatccaacccatatcagttttctacaacctgcagcagaaagcatctcatctggcacatggtcttgcaaataattctgacttagatgcatgggactcagatatgactgaaccagaagataaatctaagtagcagacaccacagtattctcaaaaccactctttctctttctcttgttgaccgaggcttttctactgagcaaagcacctggtttataatatgttctttcattacgccttctcctaagagacctccttagtgtccctgcaatggatgtctggggagccaccaatctcttagagatgactagacatgtagccccagaaatggttacaccttgagcttttctctcagtgcagatgagatacattgcccatcccaccaatttgccacatttatctaaatttctgtgttaagctgggacctctaccactcaagctgggatgcccctcaccaccaccacactgcaaaaactaaacatttttcattagcctcctacttgcaattaagtacataaaacctgcaaaacaagtaataaaattaaggcactatttggttaatgccttttctcagaaatcacttttgcatgaagttcagttcagtattttatcagtgactacattagtctcgagaccctctacccaataggagggacaaagatgtacatgacacaggctcccttcaaagatgattaatacatgaactacatacagtattacaagggctccactagagatgtgagccccccagaaatgatattaatgtgcagaagagttagcaataaattttgcacaaggggtgacatttgagcttagactcgagcaatgagtagggttccaagaggtaaagaaaaaaatggaatggttttctaggaagaaaaccaggtctgggaagatctgatataacctgaggtagtttataagtctggaatgactgagttatcgggtatatggtggggaaggcagcagaggtgaaataagtaatatctaagcaaatgaaaaacatgtaattaggggagatgaaatataattaaattatttaccttaattcctcttttgactctttacatttgtcattcataaggaaacaatttcactaagattgttttgacctttttaccttatttggccaagtaaacaagggacagaaagtttttaatgtaaaatattcattcaacctgaaagaacattgatgattccagaccatttaaagttaaatattttagagttctcaattatttctatttggatgagtagaaccttttttcagacttcaggaatatatgtttagtttttaacagactaattgttcctgctttcatgccagcctcatgggcatcagcaggttcaaggttagtaggtaggaatctgccccctaagaatgcagcctaagagttaaggaatgcatgattacccctgtaattacttgagaggggctctgaaattctggcagggttggtgaggccaccagataacactgatcaagaatgtacacgaggttaggaattcagactgtagctgaagtggggagttcgggtaaacaggctctgaatggaaaagatcaggaattcaaatagacagttaagtcaagaaaccaacatcttagaaatgtaaacctcactttaagtcaaaggctctccaagctaagacttcataatatatttgccaaggcaagagctagtatctgcttacctgagtggtcctggagctgcggccagttgaaacaggagattgcagatggaatgtcagttagaatactttcagaggccagtaacagatacctgactttaaagttcttaagtttgtctttcccaaggttttctggtcataagaatcaccaggggcacttgattaaattattaattcacaagccccttcactggagattctgatgcaatagacttgggaatatatttttttttaacacgaactccagtggaatcaggcaagaagtgaaaaccctatcgttaataatagacacattagaaataatagagacatttgataatctagcacagttcccaaactttagtatgcatcagaatcccctgggggcttgttaaactacaggctggcaggctgctcccagcgtttctgatgcagtaggtccagcgtggagtccgagattctacatttctagtaggttgccaagttatgctgctactcctgtggtcaggaactgcactttgagaaccactaatcaaaataaactgaagtccaaagaccatcagacctagagctggttaattcaacagattagctatatcaagacttgaggtcagcttctctgggattctcttgtctttttcctcatggtcccaagatggcttcccactgcgccaagcaacatatccgcagacaacaataaccaaggcaagaaggaataaggttcaaggataactgtattgtgtgcgtgtgtgtgtgtgtgtactcatgcctgtgtgtctgtgtttggaaaagcaaacgtttcccagaagctccccaacaaatttcttcttatgtgtcaactagaactggatctcactgaacctctttaagccaatcactggctatgagaaacaagcttactgtgattggcttagaccagattttaattttttcctcagagctgtgtcctttgttgcccaatatctgaacataattgagcttctttaccaaggaacaagaagtaaatagctgttagttaggcaaatagctgggtatgtccacaaatgggttctgaaacaagtgtgattataatgaggttcagaattgaaaatattagtacaaatgctagtaaataatgtatgatattggctttcttatcaccatttgcaacagaataacagtctcatgaagaatttggcacagccattgtagaaaaagtgccttttcagagctcacagtatgcatgtactcatcttgcttttattatacctgtatatggaattgcaagctgtcccttcaggtaatgaaatttagacaagttggaacctgtataacagcaaatcaatactgaaattataggcaaagcctgtacttgtgcagactaacacataggatagaaagactttgtgatcaaaattcaacaaatcccacatttataggtatccaacatagagagaaaactatatatagtggtgtgtctttttatgtgtttgcgtttttctccttattcattcctgaaagtgtattttcttttaacagactcacaactcagctacaccccatatgcccacagtcaacacagtggaaaactgagttgtttatttgagcctcaagtcatccaaatacttcgttaaacgttgtagtaaaaggtctcccctgaattcaaggaggatgccctaagttttctgcatccttttgatagaggaaagtattaactaatgtcagactatctgttgttttattttcctttacagcactagattttgttaaggacattgataattttgaaagagaagctaagctaaggtgacaaatatatcttctgttggtcaatatctaaaattatgtattatttcttttttgactacaccttacagtggttagtttgcactttacgtaaaaaactgatgtctaccatcttccatctttgtaagcaccatccagcctaatagttgttggtttgaataatgccacaagctttgtccagaaaccaaaaacctgatttccaaagactagtctatgtagctgagcccttcattccataatcattaaactatggttaggacacagtatccagtctcccctcaaccttgtccaatcacagtctatgcagagatcatgtaactcgattaaaatctagaaccatagagacatttcccttccctggggcaaatgggaattgcacatgggggaaaatggtgtggataagcaaaaaacggaagtttccaaagtgcaacagaatattgataattttagtacatttcaacatacagtgagtgtaatgacggcattttcctactgcttccttagttgtgaagattttgttttttcttctgggttcactgccgggaaaagagcagaaaatgttttagagcctctgccagcagagggggcatttaccatttgtgcataaggtctctggcactgtgccctggggttctcttttctatatgtttctaacagtcacacacagcagtgtgactgtttacagatactttaccgtcttctctgattgaagcagggactggtttgccagcaacttttggttgtttttgtttttttgaagaccatgcaactaacagatgtttgttgttggctccatatctacattctttgaaagctggagaatcaaattgctgacattcagacaacactaattcccatatccagggagcctaatttgccgtccctgagatcctgattcctggtgttcacgggtttaaaaaccatttcagtgacacaatataagaatgggcttgggagatgcagcgctgtctccactaaagataatcacattttataaacatctgcgtcattactggtatgattcatctctaagctgtatacagctgtgtttccagtttcaattaacaatcccttaattgcatatccatctcatgttactaatttagttaatttattcataattaagagtattctgttttctaccaaggtttgtcgagctcagaacattataaagaaaaatattttaaggcagcatctccgagggattttgtttcttataatcacatcacagtaaaatgtcattcatgcgcccaaaggaagatgaattgctaagggatttttttttccagtaaaataagaagctttgggaagctgcagtgtgttgtgtttttaaaccaagttaaatgcgatgcattttgttcttttctttctccttccctgacatcctctcaaaaaaattatcattttatttgtattattgcttaagtatcacagcaaatccagtcaccagtgcaaataaaactgtcattaccctgtcaggtaatggtgtctcttaaaatctaagctataaagtctgtacattttagaggacattaagatcaagaatttttaaattgcctaagtctaagcaagtggagtacacccttgtggaaaatggaaggcagatgaaaacatgatgccaggcagtgaattcattttagtttgatcttttctacaaaaatacatatatccgtgcagcaagagtcttgcctgtgttagtacatgtgtctgtgtgtcattcaaagcagcaataacaaaaaattaagaccatttctcactttgtttattgttcaagaactcccacctatagccttgacctgtgtttgagcttaaaaaaaaaaaaagtcttataactgcccagtggtttggagattttacacaatagaaataataagccatcttttgcctcacatgaattctactaaaatcaaaactccataggatactttccaaagtaactggtgaaaggaaaagtgtggtagtataggtatgcatattatccccatcactttatttctgagctcttctattttttaaaaattttaatttgtatcttaaaagggcaaaacataagaagaggtaggagtattctaaatttcagtgacaacaaattcatttattttacaatttaaccattgcccgtcaacatttacttaaaatttcagcatgggaggttttaaacacttctagagtcccatcttaccccatttccacgatgcttttcttctccatgtgttgctgcagtttaatattgtctgcgtgttttaatatgttaaacgagttaaacatagagtaggaagttaaaactgttagcagctatatgtttcccaagattgatgaaaattcaggtaacactccaacctgttaaagatacctgcaatctggccaggtgcggtggcccatgcctataatcccagcactttgagaggccaaggcaggcagatcacctgaggccaggagttcgagaccagcttggccaacatggtgaaaccccgtctctactaaaaatacaaaaaacatttagccgggtgtggtggcatgcacccatagtcccagctactcgggaggctgaggtgggagaattgcttgaacccggagcctgggtgacagagtaagactctgtctcaaaaagaaaaagaaaaaaaaaaatatatatatatatatgtgtgtgtgtttatatatatatatatgtgtgtgtatatatacatatatatatgtgtatatatatatgtgtatatatatatatatatgtgtgtgtgtatatatatatatatatatgtgtgtgtgtgtgtatatatatatatagaaagagagagagagagagagagagagagtaagcagggaggggttgaagccagaaaagactagaaattatctaggccaaaccctttaatttatagattaggaaatagtttctggttgacttagctgagacgttctcatttgttaaaagcaagatcagaaatcagacacaattcaacgctcttcactacaccttgtttttctctttgtggaaaacaagacgtatcctgttcaaaaatttatgctgtttatctgaaagcccaaaatgcctgtttacatcatattttccattttgcaatagcagctcattttggggattattttctgatgaaatctctaggtttagttgtacttgaatatctttttatctgtacacactggaatatgcatataataattgatagaaatgtggattttaaaagtagagatgatcattattattttatgatcctttaagttaataaaattcacctagaataaaataaacaagtttaactaaagttctcgcattttcccagaaatcgtagactagaaactagtcttatttgcttattttattccaaagcttattttacctctattattttgtggttctataaaatatttctgtgtattcctccaaagaacctcttggaaaagaaagtaaacatcacatctgaaaaatagctgggcattttttcattatctctgcaaggggaggggacgtgaaaggcaaccccatatagaaactcaactccctgctttttacaatgaatgaagtttttccactgcactgtcagaatggtaattcttgctaactactcacctatttcacaacattaacagagttccaggattcatgctttaatattgcataatggtccatgttttgaacatgaggagtggcagcggagattacactttgattccttggatttcatgtggcactggatgggagcaaggcactgattttaagttgagataaaaaggagaagtcagtcaatgcctgcagccagacaggactcttgtaatagctagggagtatgcctcatttggatatgcatgactgccgggcaaggacactgccatgaatcgctaatggcagcagttgtatgacataagagagatgtgtatcagcaactcacaagttgactttgttacatgttatgaacacattcctgtgggcactcattcatagaagtgagaaatgtggacaccacagtgtcccaggcctttgttaccttatggcctgggaatatcttgctttgctggaacatgaagccacgtctggttataagaagaagtttgatctgggagcaaaattgcctgttcacgcatgtctttctcacttctttaaaactaacttgctataagggtgattaaaaaaaacagatgtcaggtgagagttttgctttgcatcaacttcctacttgtagaggtaataacataaaccttgcctggcaatcattatttgtcatccagctgagggtgtttactcttgagaaagaagtaatggacaaaattgacttggattctggttctatgtttcccattaattgactctggacatatacatgcaatttaatccatcttactaaaaacatgaccaactcacaggatgtaaattctattctatagaaagggctttccctcagtagttagtcaagggacggttcctaactcctgtctttattgagcttattttccaaaataaatgtattattttctactttgttcacagagcaaggcagcataaagaaattaagcaacaaaacaatagtgtatttttacccaactttctagaaaacacccatttttcttaagttttgatatttttttgccaacaggcagtcaaaaagaagataaataaaactgggttaagttggtaatgacacaataaataaatgagatgaagaaagaggcaataaatatgagtggataccaacaagaaacatgttcaagccctgaaaaaataatgagaaaaggtagaactattaataatacatcccgctctcgtatcacaccttgctccccagatacatcctatctgtcctggcaccatgttgatgctgttgttctgtaagctatgccaatgaacatgttggatgacctactccagctctacctcaagatttccaaataagaaaaggacccagggatctccttgctgaggtctttatccatttactcaggtcacaagtactaattaagcagctcttatgtgcaaaatgttattgcttcaggtcagtttttcctatactgctgttctataagagaggaagaaggtccctgccctcagaaagccctagaatacagatctagagatgggttcaacatctttgttatgcaattatttcattccaattgtaatgagtacttagaaaggacaaaagcagagtgctgagagagtataacagagggacttgacctggtgtagtaggcctggaaagtttcctggggaagtggtattttagacaaacaacacacacatacacccatgaatgtatacgtgtggagaatgtattctaagtaactatgatgaatgtatttcttactgtaggtcatggtcaaagtttgaaaactattgttctaactagtattataattccagggatagtagaggtcatgtgacctgtttagcacatgcctgccttaacagtatctagtaggccaggcaatgtggctcacacctgtaatcccagcactttgggaggccaaggcaggtggatcacttgaggccaggagtctgagaccagcctggccaccacggtgaaaccgtgtctctgctaaaaatacaaaaattagccaggtgtggtggtggtgcctgtagtcccatctactggggaggctgaggcaggagaattgcttgaacccgggaggcggaagttgccgtgagctgagatcatgccactgcactccggcctgggccacagagtgagactctctggaaaaaaacaaaaaacaaaaaaaaagaatgtctagtaaataagtcagtgccaagcaactacctgataactgttaccaccttagtcatcaccgaaggcagaaggtcttgcattcattggaggagagttaccaatctaagacatttgcatgaaaatgtgcacagagccctcacctgataatcaaagcatgttccaacacttctctttggataaaataagagttacatctcaatgaaatcacttgtggatcaagttctcatcctttcgtaaataaagagaggggcagcaagaaatggaagtgagcacatataagtgtgggaacctgtactttcctaacctataaagcattggatgtagtttttgctattggtgcgcatggagtcatgtggccttggagcagttaggtaccttccctgatgataggggagaaggcaaagaaattgatgatacatctctctcattgtcattccctagtatattacacttaaatctaactgccctattttgtgattgccttactgctgtggcttgaatatttgtgtctccccaaaattcatatgtggaaacctaattccatatatgatggtattaggaggtaggccccttgggaggtgattagatcatgagggcagagcccacatgaatgagattagaacccttataaaagagacccagagagctgctttgccctttttgccatgagaacacaagaaggtgctatctatgaacaagaaagcaggccttcaccaaacactgaatctgccagcgccttgatatcagacttcctagccttcagaattgtgagaaaaaaactttggttgtctataagccacccagtttatgatattttgttatagcattccaacggactaaaacattcattttccagaaaatctactccatttataagccagcattcttttttttttttttttaattttctacagatctctgcagaaacatgcagagtaataatagggccaggcacggtggctcacgcctgtaatcccagcactttgggaggccacagtgggtggatcacctgaggtcaggagttcgagaccagcctggccaacatggtggaaccccgtctctactaaaaatacaaaaaattagccgggcatggtggtgggtacctataatcctagctactcaggaggctgaggcaggagaatcacttgaactcaggaggcagaggttgcagtgagccaagatcccaccattgcactctagcctggacaagaatagtgaaactgtctccaaaaaaaaaaaaaagaagtgataatatatttgctgtatatattagttatagatagttatattgcagtactatcagaagctatgccacatattatttacgtatttcttaagatatagaaaacatccctcccctgcagtcattagtacttttgcattcaaacttcaaatgaaacaggactttagaaattataggcttggtgccatcctggccaacatggtgaaactcgtctctactaaaaatacaaaaattagctgggcgtggtggtgcacacccgtagtcccagctactcgggaggctgaggcaggagaatcacttgaacctgggaggaggaggttgcagtgagccgagatcgcgccactgcactccagcctggcgacagagcgagactccgtctcaaaaaaaaaagaaaaaaaagaaaaaaagaaaagaaaaaagaaattataggcttggtgatttctcaggcattaactcaagaaagcagcctttataccgattacctacattcacccagcacttaccccattaatttctaatgttgcttggaacaaatgaacattcctggaatgcaagctaaatgaaagagccccgaagaagaacagggcatttcctggttcctcatattgacaaatttaaaagcctgtgctataatatgggctcctgtttcctttcaagtttgtctttgaataagtggacagagtagctgaaagcagagtatttaaagctttgaaacgaccactttatttcagtctctgttcttgctgggaccactcttataaatgaggagattagaaaatcacctagaactatttaatcgttgtgcagaagaccctcttaccccaaatatttacttaccgctcattttattggcacactgcctcaaattccacctgctgtgaactgacctaagtgaatttaggtcacgtgcaactattaggttctttttgggaaataatggagaaccacagatgtgtttgaggtggatgaggaatggctacctcaagccgcagcttcatgcttcatgctgaagtcctccacaagtgcaatcatgtcgttaaccaacatttgttagaaggcaggcagaagtcagcttacagcctgttctacaatttttatgaagtgtaggattttaggcttaaattgacaccattgcaaatacagtattctcttacctttagatttggcatcaggtcacaagaattcttcctaagccaatggttggatacaaggccattggagaccagacgtaaaattaaaagcccaagcaacaggttttgctggattcttatatcctgtttatgcaatgttaggggatgtcattaaaatattttagttaatccatgtatcttgattgtcttaaattttactaatgagatcctatagggatattcattgcaatccactatttccctcagcaaaaacacatttgcgatatctattacatgcattacaaaatcctccaaggttcacagagatatatagtagtagcagtctctgggttttggcctttttcataagatgaaggctgtgctgtcctagaatatgaattcctaattaaaataaccatttgcctcaagcctctagagttgaaggttgcactaactgcacatataaaatatccaactatctatgttgagatatttaaaattaattacagatattgtaacaccattatttaacttaaattccattacaggtcctttgagtatgcaaaatatttctttgagatgtggtaacccctttaactgatcaggaaataaacctttattatcaagttgttatcccaccttgacaggcctaaagcgcagaccacatatcagaatcccctgggcagcttataaagctcctcatgcccaggctgcatctcagaccaattcaatctctgggggtgggctccaagcatcagcatttgttgaaaatccccaggattacaaagtgcggtgaagtttgcaaacccttgtaataagagaatgggaggagggatggctgtttgccaagcagaaccaggaatgaggaaggatattggtaaacaaaatttatccataattgacttttcatgaatcacagtcctactgagacccagccttgtctcatgagactttggctacgatgatgagtgagaaaaggactcctcctaatttaccagactcttgattagaagcaaatgaaattttggaaaagagacaagtcactttcaaaagaccccagcctgtacctgaccctacctctggactccatagtaatggcaggtagtggtcattcctggagtaactctgtatttcttaaaggaacatttgcataatgaacctacagcaatctggaagacgactggggtaaatagagaatttgttgattttagatggctgaatactatccgtgcagagcaattaaaaggacaactgtcagaatcaagtaagagaaaggaaataagagaagtctcatgttagtagaccttgtttgatcaatgtgttttcatcttgtatatgattaataaaataagtttgggagttaggatcaacctttgtttactcactggagaataacttgcatatagaatgaagctgggattgtccaggctggtttttttccatttggaagtttggatacaatacaaggaagcctgaattccaaactgtttctcttaaagagtgcctttctgagccgctattaaggaatgcttattgtttcgaaaatggtagcacagaagtgttataactagagtacaccttgtgcctgcaattaattacccagtgtcttcaaaaattcttgtcttttgctggtagaaaacctttgaaactatagttgtctgtggtattcactgcagcaccttagatataaagagagaaatttattttcagaggaatcttgagacagtttgtgtgtgtgtgtgcatgcctgcttacacatctattggttttccccaaggattgtagaaatcccattaaaattccagcttcttaaggagctactgaaactccagtttttcatattttcttttataatatttggatgcgtttaggtaaacttgcagcattttaattatgtctgtatcagatgagcggaagaaatgtaaaagggtttggggagagatttaattttagatagcggcgtaattaatagcatttggaaaaactagtggaactttaattaaatgtctctacattaatttagtcatttaattgaacatgtagtgggatagtccttacaatttttcacccttactctttgaggaaaaatgatttttgaataacaaagcatcagtatgactactttttattatttagctgtatgttcactacttggcactttgtttaatttttccccccatatgtttcgagctttttaaaacattaatttggcttgtcgcttttatcttaaaaactataaatctgggggccgggtgcagtggctcatgcctgtaatcccagcactttgggaggccgaggtgggtagatcatttgatgtcaggagttcaagaccagcctgaccaacatgacgaaaccctgtctctactgaatacaaaaaaaactagccgggtgtggtggtgcatgcctgtaatcccagctacttgggaggctgaggcaggagaattgctggaacccagggggctaaggttgcagtgagcagatattgcaccactgcactccagcctgggcaacagagtgaaactccatctcaaaaaataataataaaataaagaaataaagaaaactataaatctgggagaaaccgtatttggaaacattgagcaactgtttcttttcctttattttagactttaatattcactagagtcatgttgtaaagttttcaccttaatattgtaggctttttttttttttttactttgccaacttaactggcttttttaaagtggtgttatgctgcagcagtgtatctgaatttcagcagtgccttttacgtggctgctcacaatcttattaaactacatgaattatacatggagagaaatataatttggtaaatttggtgatgtttcaataaccatgcccaaggaggaatgttgtgttaaactgtcaatttgagaagtgttttgtggtgctaaccacagagtgaattcagttctacttcatttcacaaccctccataaatagtgccccctaaaagtggtgcctccttgcctgtactttgacccagatttttgtcatttttctagataagcatatacattgtgcacttattaatttttcaaatgacacaaaggtgagaatgggagtcaacacactgaaagatcaaaatcaagactcaaaataagattataacagactgggatactgtaccaaaataaaaaaattaaaataaaatttaacaagaacaagcaagatgtcctgcctttaagatttttaaagtcttttgtacaaatataggctgaggaacatctgactttgtggcgctttatatgaaaaacaaattgggattttaaataaccacaaggactgtattaatctccagtatgatctggtgtggcttactgtacgaggcaatacagtattagattgcattaatgaaattcacaaatgttccattaatctcttcactagttaaaccacatctgcagtcatattgacttatgagcatcacgtatgatgagaacactgaaaaatcataatacattgacagcagggcaaccaagattgtgaaaggtatagcgatggttatatgacaaatatttgaaagaatctagaatgttcagtaagaagataacatgaaaatacaggacagcttcttcatgcatctggggagggtgggtaaaggacacagcacacttaattaagtaagattgtagaagagaactatgggcaagtgttacagtggagcttactctgagtaaggaaaatgtaaacgttagagttgttattaagtggcatgggctgcttcacaaatttccatcattttttaatctgattcatctgctaataggacaaactgtaacaatagcttaaacaatagagaaatgtaggtctctctcatgtacaagcccagaactaggtagatcaggcctccttccgctattctgcttcactaagtccgaagtcctcctttaccttgtcctgccatggtggcctcaattctcgttgtcaccacatggtccaatatgtctgcttcagctccagccaacacatctgagttccagcccccagcaacatggaagaaggaaggaggcacagagagggcgtgtgccagcagtgttgtgagaaaatctttcagaaactgtcatgaaatgtatcccctgatagttccttcaccagaactttgtcccatgattatatttacatctatgtgaggctaagaaatatattctttccttcaggcatctacatacccaactgaaaattatgagttctattgccacaagaaaaaatggaaaatatatggggacaatcaacagtacttgcacaaagatgttttacagagaattactcttttacctgggaattttacaagataaactttaagatcctatcaactctctctctctctttttttttttttttttttttgagacaagagtctcgctctgtcacccaggctggaatgtagtggtgcgatctcggctcactgtaacctccacctcccgggttcaagtgattcttctgcctcagcctcccgagtagctgggactgcaggcgcccgccaccatgcctggctaatttttgtatttttagtagagacggggtttcaccgtgttggccaggctggtctcgaactcctgacctcaggtgactcgcccgcctcgacctccctaagtgctgggattgggattacaggcatgagccaccacgcccagccagatcatctctggaggcagggggatcacttgaggtcaggagtttgaggccagtccggccaacatgacgaaaccctgtctctactaaaagtacaaaaattagctgggtgtggtggcaggcaactgtagtcccagctactcgggaggctgaggcaggagaatagcttgaacccaggaggccaaggttacagtgagccgagatcgtgccactgcactccagcctgggtgacagtgagactctaactcaaaaaacaaacaaaaagagtctatgatcctataatttatagacaacatacaacctcctttctctacaaagagaattggttctcaagggctgtttggaaattcatttccttttaagtccaaaatgacatacaaaagtgaccaatatatacaatgtacacccttctacaataagttctcttttgttgccgtagtaatcgcatgtcttttcttaaaggaacacttttttgactcttttgtacttttgaacatagcggtgttaataataatatttataaaacattatgaaaatatgcacacaaaacacaacacaggctaagaaaacctaatggtggcctaaagtaagttctgatgtcctctgttggtggtattcttcattgccatgcttctgctgtgcctgggacctttattgctacctatgggaagttgtaagtagagaagtttctttactacagggatgtgaacaatcattgtaagtaaggaataatgaattcacataagttcacagagcatgtttttctgccctggtaatactgcatttctcactttgcatttaaagtacctacgcccttacacagaaaaagttatcggggttgggtgcagtggctcacgcctgtaatcccaacactttgggaggccgaagcagggggatcacttgaggtcaggagttcgagaccagcctgggcaacatggtgacaccctgtctctactgaaaaaaaaaaaaaaaaaaaaaaacacacacacagaaaaattagccaggtatggcggtacatgcctgtagtcccagctacttgggaggctgatgtggaagaatcgcttgaacctgagaggtggaggttgcagtgagccgagatcgcaccacttcactccagcctgagtgacagagtgagattccatctcataaatatataaatatatatatataattatcgattgattaatattattatatggtccccattactctaaactctcaaaatgtaatgtaggtcaaaatcagaaaaaggccatactgtctactccttcctctgtttcattccaactataagagaaagggagagggcaaaacaaagatgacaggaggccaaattgtacatagaattcatggaaattcttacccaacatgtaaaattatgatagtataaggaaaagtatactgcaaaaattaaacttctacattgtgaaatggagaacatttttacatctagctctattgcttctccctgtggagctgttctaagcacaaagttcccattacataatgaacaactccttaaatactgtgcaactatttctcactagaagcacgatgcagcaaactctgtttctcagtaaccatttatatcatacctagtggtaccgagttctataataaaagggtgatatgtgcatattttgtggtcatagagtgcaaagttgacatctacagtttaaagcattgcattgcatgaataaggtcaaaatttaaatacttttctatgatcatgttctttacattaaaggttaaagatgcatgccgctttaaaaatggtttaagggccggacacggtgactcacgtctataatcctggcactttgggaggctgaggtgggcagatcacccgaggtcagacgttcaagaccagcctggccaacatggcaaaaccctgtctctactaaaaaatacaaaaattagtcaggcatggtggcgggcgcctgtaatcccagctactcgggaggctgaggcaggacaatctctggaacccggaaggcagaggttgcagtgagcagagatcgtgtcactgccctccagcctgggcgatagagcaagactctatctatctcaaaaaaataaatgaataaaataaaataaaaatggtttaagaacttcaaaccatctggcaccagaaaacacctaaattgaattaaaaatctggaaatttaatttcacaacttgtcctttttcaagcctaccctaagttttgtttacttaatggggagaatctgttttatttgttcctatgtagaagactgctgattttatcatgattgtattagggcccaaggatatttaaaatatttcagtagctattacttatactttatatctgcattgcactttagagttgactgagcattttcaaagtattatcttaccaaattgccacaatagtcttgagaggctagtaaatcatgggagaagcccccatttccccactggaaagcagagaaaacccccattgtagtaaaggaggggttccctccagagctcttgtggttgtgttgaggaggaagtattaatgctgctgggcatgacttacaagaaataagtcaattcacttaagcaaaagtgctatgatcctgtataccatgtgagcagctctaggatggggtcacccagcattttggagcagacattagaacatctggagggagtaaacgcaaagaaaatgggctagatacctttccttggatgggaaaggataacattaagataccaagatcaaatgttcaaagagcacatatacaccagagaatactatgcagccataaaaaatgatgaattcatgtcctttgtagggacatggatgaagctggaaaccatcattctcagcaaactatcacaaggaccaaaaaccaaacaccccatgttctcactcataggtgggaattgaacaatgagaacacatggacaaaggaaggggaacatcacacaccggggaatgttttggggttgggggagtggggagggatagcattaggagatatacgtaacgctaaatgatgagttaatgggtgcagcacaccagcatggcacatgtatacatatgtaacaaacctgcacgttgtgcacatgtaccctaaaactttaagtataataataataaaattttttgtaaaagcattgtataataaaagtagtaagataaaccagtaaaaacaaaacaaaacaaaacaaaacaaaaaaaagttcaaagaggccgggtgcagtggctcacgcctgtaatcccagcactttgggaggccgaggcaggcggatcacttgaagtcaggacttcgagaccagcctggccaacacggtgaaacctcgtttccactaaaaatacaaaaattagctggatatgatggtgcgtacctgtaatcccagctacactgaggcatgagaatcacttaaacctgggaggcagaggttgcagtgagctgagattgcaccactgcactctaatgtgggcaacaaagcaagactctgtctcaaattaaaaaaaaaaaaagtttaaagaaaaataagttatttctccatgcttcaggagatatgtttcgcaggagaaagaggcttaatagagaaaacagatccctacaaacatttgtggtttttaaaactgccccattggttactaagtggataacatgagcgtgatgccagattcagtactctagtgagccatgcagctttgctgtgctctgcacctgatgagtgtggcctcacttcttataaatgcctgtcattgctaacaggggtccttgctgaaacaacagggctggactaatgctctagttcccttcctggaaaacctatcccaaagctgagatcctcatgatgccttctctcatatatgaatgattgcaggttacgctatcatcattaaatcgaaacattttagaccactttgcgtttgtttgtttgtttgtctcattatgtccagttttatcctgtttcataatttaataaatttttattgggtctgtcttctggttaaatgttgtgtgtataaaaaataaagtcaagagagagaacaggagttatggaactaatgacaaatccatccttcagctaaataaaattatactatggatgatttgagctgtacgttgagtgataatttttaaaaataagatagatcgggtgcggtggctcatgcctaaaatcccagcactttgagaggccgaggcggatggatcacgaggtcaggagttcgagaccatcctggctaacatggtgaaaccccatctctacttaaaaaaaaaaaaatacaaaaaattagccaggcgtggtggtgggtgcctgtagtcccagctactcgggaggctgaggcaggagaatggcgtgaacccgggaggtgaagctcgcagtgagccaagattgcaccactgcactccagcctgggcaacagagccagactctgtctcaaaaaaaaaaagaaaaaaaaaaagggccaagcatgctggctcacacctgtaatcccagcactttgagaggccgaggtgggtggatcacctgaggtcaggaattcgagaccagcctggccaacatagtgaaaccctgtctctactaaaaatacaaaaaattagctggacgtggtgacaggcacctgtaatcacagctactacggaggctgaggcaggagaattgcttgaacccaggaggcagaggttgcagtgagccgagattgtgccattgcactccagcctgggcaacaagaacgaaactctgtctcaaataaaatgaaataaaataataataaaaaataagataaagtatcacaagtaagatgtagttgaaacttcatgcatttttctatgatgcctatgatattcaaaagataactgaatttcatgagcagagttcaagaacttctgagtatacttttcattgatgacttaatgtaatggatttctatgatgatggcactatattcttttggtgtttatggtattaataaaaaattgtggtaaagcttgtggaaatgaacatgccttggattagggtgccttaaatgtgcctttgtaaatgcagctaggagactccaagtcacccttctagtctaactgctactcctttcttttacaaactacatgccaactaaactgaccttgatctgtttatgaaaaggcggtataggaacaggggctctgcaattggacagatccaattctaatcaatccactccattgatagatatataaccttgagtccttcctgtgcctcagtttcctcatctgtaaaatggaattaaaaaccaacttcgtgaggcttttggagaatgaaaatgacataactcaaagattattgggtatcagaaacaataatgttatctatcactgtctttactgttattattattattgtcattattattattttctctacctggaacaccaattccacaaactcttaatgtcaagaccatgctgtatcatggagccttccctgattcctccatatgaaaataattaattctcatattaataatattacttttctagttgtattttctttttttagcttttattttaggtttgacggtacatgtgaaggtttgttacataggtaaacacatgtcatggaggtttgttgtacacattattttatcacccagatattaagcccagtactcaatagttatcttttctgcctactcgtattttcattatccccaagtatactatacatatcttaaaattaggatccatgttgaaaaaacattgatatttcctatggcttctaacacagtacattgcacttagatattcagcaactctgtattgaatgtatgggtacaatctgctcttagtttctaatttggtattaatatgttcaagcctcaagagctcatgtaaatgatggtttgactatattgcccatcttttgttaagttgaaaagctgaaattcatgcactgtttgttagtgtagtaatttgtgacaacgtctagctattaagtcttttctaggtataaaacctttatatctgtcattgttcccctcttgtgtttttgctttaatatcgttgaaagcatctattattggaactttcacttctgaatagtacttttgagaacctgtatagaatttcagaggccttagaaaattgtcatagattgcttttagtatatggtttaccactgtggtctcttaacttttcaaaaagtatttccaaagggcacttacatccataagtggaaattgatttacatctattattgctgattgttcactattctgaacttcggctaaacaggtgatttaggcagaatttttttaaatattagattttttcctactttctaaatattttgtagctctttcttattaatttgagtcaacttatgctcgcttttttttgtcaattatagatggttgtcaggggtttggcaaatgtcatatgaaggtaattctttaaaagttgggatttttgaactgtttatttctactacttttgattttgctggaaattatcattctattaaagggacaaaagggtgctcagaaatatgcattgaaaaatttcttacagatttatcaaccattgccctcaggcactgatattcagccagtatgttccaatacatccatgtctttccattttaaaccttttaattctgttctaatttttcattgcctgtgcctgattgttctgtatccatctgatacgaatggttaagtacaacattttaaatatcactcttgcctatacatattatttttcttgtcagatgatataattgtagtcattacatgtttcttaagcacaactgaaatcttaatttaaatcaataagtcttgtttctgtggccattgtttcccagaactctccggatttctaagcatggtggttattcttccaggaatagtgccgagagtcttcagcagcatgcatttctctctaattgacattatttcacactctccattttccttactattgaaaactgtatttcattggtattttgccaaggatcctgctctgtttcataataatgttctgttcgcactctctgcactgacaaatacctattccatgcatcaattgcataaatggcaatttgaaagcatttaaccacagctggatatttttcattgattcttttcatctgaagatcattcattaggcttctccctcctgtttcttctcacatccatacctcctttcctcctatgtacatagtgtcttttgcattttctgtatttaagtgtaaattgctgactacagttatgcttttacctcattccatggtcataatgaaatcacaaatttaaaaatgtactactttttaaacctgttttctgacttgtccatctaaatgcaattttataattcttcgacattcagcctcctggtgaatgatttctgcaatctctccaagacatctgtgcagtgttatggattatattgattgcattttgtccatgttcaaatttgcagaatgtaacctacagaatatatattgactaataaagaaatgcatccacatggtggatggttgtaaagagaaaatatatattggtgtgcagcaggcgcccacacaaatgaaatctagaaaacagcagcttgccatgtcagagttgcaaatgaaggctgtggctacaaaacacagaaagtctggagtgtatgaaaggtttttcttccaaattcattcacacataaaaatgaaaaaattgaaaaatcatatatgtgcaccttaatttttatatcgcattggtgtttgggcatacgaccctgagattttcataccctcgatttttttaatataaccacctgagcgtttcttcccatggggttactttagaagatggggggtgtacacactacgtatgtatgtcaataaagaaatgaaggaataaaggaggaaagaagtgaagaaggctgggggtaggaagggagggagaaattcagtgattcattacttattcatcatcctaaactggcatataaaataatatgtttaaatcagtctaaaattttcattgtataatctctgaaataactagtccccactccctaaactgtttggtgtaaatatttatctatgtctaatcatttctatgcaaaatagccttatatatattttcattttcataagatcatctaagaatcaaaggaaaagctattttaggcaatgaacataggcagtgatttcaaaatagaatttgagaaatgcaaggatagatggaatcacaaaagatgatctcattcatggtgttttaaaccctacaaatagatttctgtttagttgacctcatttcaatagcttctcatttttttcagaagtgtatttgatgtgtatatttctaataaacttatttttctttttgtacccagtattaaggagcacagcatttatatccactgaacaaaggataactgaaaggaaactccttgatatccaacttggagtatttgtttctcgaatgaatatgagtttatataagtagtttttttcacatacataaaattagaatttgtttgtattattgatattatttcagaacagcggatttaacgtcatagatgatctagatgtgtcctttccttagaaatctttaaaatgaatcacatagtctagaaacagatccagatactacatgctctcatcagaaaggactttcttctcttcgtgtcaagttcagtgttggcaccgtatagacaaagcgtgttaaaatagcagggttcttgttctctgacacattacaagagaggcaagattataaaactgctatgtgtctcattataattcccattagtttcatttgcttcaaaacattcacttctgtgctttttgcaaaagctttcaaacttattttttgatgattctaaaagtaattcttctatgtcttttcctagtgatactagcattagttttcttttccaattgtactaggaggcatgagagattatcgatgccctattttcttgtctaaataggcaacccaaataatcatagtgacctgttcatttatattatctttatttcttgcctcatacttcttcatatttcttcatttcccatgtttccttattctttggagccagaaacgatcacgttaatcactctttccattagttttctcctatacattttctgatctttctctgagccagttaagagtcattcagccatttgataatggacactagtttactttgaccttgcaaacacaaataccctgtttgatctttatttgctgagagcagtaagacagaagaattacaataaactttttagcacccttctgttcaattctttttcagaaatcgttccctcaaaaagcctattctaggctctttcttttggcagtttcctagaattttcctttgcttttcaccaactggaacattatcactagaagtaaactaagggaccatctaattcaacaccctcgttttgtactttaggatactgaagccaagagaagctaatttttttgcctgccataacacaactagttagtgaagcagccaaaactataagggatcttgccaccataagctttatcggcccatccgtttatctcctcaaagcagccctatacctgatttccttatttctgttctctaagtaagccaagctcagaccttagagtgaccttcccctaatccaccctgcctgacatccaataaactgacaaatccagttgattatgaagctacagtgtttttcaaaccataccataattgtctaggctgttgccatgctctacacaccagttttcttattccagtccctccctgccccagtcccagttcactctactcagcctctctactgcaatggataaaatcacagtttccagattcacaaagctcacagctctgccactttctagccttgtatttgtgtttcagttgctgctgaaactctctaagcctattttccatctataaaatggaaaccaacccagaggctcgttgtattacagagatattgcatgaaaagcatttagcgcagtgtctggcccataagaagtcctcagtaaatagtagtcttggggaagcagtagggtgttgtagtaagagagcagagcaggggacagcaaactacaggtctcagtacaaattcaacatggggcctgggttttttttaatagcaggggagctaaaaacagtttacttgttttaataagttgtacgaaacccaaagaagaatatgtaacggagatttatgtgttcctcaaagccagaaatatttactttctggccctttacagagaactttcattaattcctgttgacagctgtcagggtatgaatcctctctaccacttagaaactgtgtaaccttgggcaaatgttttaacctctccaaggtttggtttccctgactgtgaatagtacctatgttacagggttgttatgagaattaaatgagatcatttatatcaggtgcttagctcactagctgaaataggatttaataaatgttagctgacatggttacgtctactcattgttgcagataaatagcctctaagtgcagctttaatagtgattgtttcttaaaatttttgaacaaagtttttctatttcttatccaattaaataaatattccacattctggcattcaatatttctaacgacatcaagcaactctaaaatcattgaatgttttaaagcaacaggaaaccttagaaataactcatctaaactcatatcatagatatggaaactaagggccaataaaaccaaggcttctaggacctgaaatcagatcctctctttttaggtagtgtgatcttcatcgtgcttctgccatgcaatctcagaatttaaagggatttaagaatcattcattttcttcctaaggcaggattcgaccctataaaatccctgtcagtttggtcattcaaacccagtttgagtacagtcattgatgataaatcacccttttcccagggagcagttctggttgtttcaaagtctttataataaatgaaaattggctttcctgaaatctctatatattgatctattcctgcccactggagccaaagagaaacgtcacttctctacatctgtaaaatactcgttgtcaattttcgtatcttctctaagcatcctcgtttcaagctgatgtgaactagttgggtttttgattgttttcattgtcctgctaagtcgaaaagctaagaaaagcttggctctttcatcactgttatatatcccactgtgtaacagaacttgagttcagggtatacactctaaataactgcttttgtaaaagtattcaattatattgatttttttcgttccctctgttgttcctcataattaccctcagtcaagactttcatcttcgtctttatcttcctctgcaagaattaacagtggtcccttttgtgaacttcaaatatctgagactggtctcagttaatttaggaagtttattttgccaaggttgagaatatgcacccatgaaacagcctcaggaggttctaacgacatgtgcccaaggtgtttggggcacagcttggttttatatatatttagggagacatgagacatcaaccaatatatgtaagatgtacatttgttccatccagaagggtgggacaacttgaagcaaggaggggcttccaggtcacaggtaggtgagagataaatggttgcattcttttgagtatctgattcgcctttccaaaggaggcaatcagataagcatctatctcagtgagcagagggatgactttgaatagaatgggagacaggtttgccctaagcagttcccagcttgacttttccctttagtttggtgattttgaggccccaagatttattttcctttcacactttcaatataagctatccagaactgatgataatattccagatatggcccaaccaatggaaatgattgtgtttcctacataccatatcacaatcaaacctgttttgcaccttgcatttactttctttattaatgatgtcattgcaatttagaaaatttggggccacatttacttcttcctctctattatcttcagtttttatttggtcactaaattctgtttgctgactcttatatctaaaaataaaaacactcaaatccagctattcctctctaactactctgcccttccctcagtcctttctcagtgactattaatgatttggccttctaatgattagcctccctgtccccagacttttatccatctttatcactatggctagttatcttgctaaacaacagatctaatcctagtaccccattatattaaaaaaatcttctatagctacagctttctctccctccaggtcagtatccatagcctgtcaagatgtggctttgataaaggacagaaggcagggaaattctgggcagaagagggcaggtccccattgaggacccaccctcaagccaaaaagcctggaaccatggcccaaagtgagaacttacatccctgttttccctcttgaagggtgccttttccaaaaccatccattaccccccacccaccccccaacctgtgcctataaaaaccccagagctcagctggcagaaggaggagaagcagatggatgtcagaaactacagttggacatcaaagagaagcggcttgactttagagggacagtttgacagcatagctttggagaggagtccagctgtggatggtcagactccaggggaagattaccttcccactccatccccttttcagctccccttcccactgagagccactttcattggcaataaaatcccccatatttaccatcttcaatttgttcatgtgacctcattcctcctggatgctggacaagaacttgggtgccatgcgtgtgggtgaaaaaggctgtcacactgaccctccactgagctgttaacacttaagccatctgtgaatggcaaagctaaaagggcgctgtaacacttcctcatgggcaccctcccctagaggctgctgcagggcccgtacggtgttcactcttgccagcactcaaaaatgctggccccagctgctgcacctgctcacctgtgctcccccttccatgaggggtggaccagcgagtgagtggagtttgctcccctccagttcccacccacgaagggatcagggaaatatcctccttcagctccagtgaggcacagtggtatacacctatagtcccaactactgaagaggctgaggtgggaggatctcttgaacccagaagtttgaggctgtaggcactgtggttgtacctgtgaatagccactgccctccagccttggcaacatagcaagatctcatctctaaaaaagaaaaaatatatatgatgtggctccaattcactgatctagcctcttaactgaattccttcctcctggctgggcacagtggcttatgcctgtaatcctagcactttgagaggccaagacaggagaattgcttgagcccaggagttcaagaccagcctgggaaacatagtgagacttcatatctacaacacattttttcaaaaagaattttttcctccctgctccccaccctacccccttgcaaccttatttactcttcggcctctggccctctcgctatgtctttctcagcttcatgcctttgaaaatactctttctatgcctggaaagcccttataaacctggaaattcctattcttattcaactctgagccagtccattttagtggcttagttcagaggctctagatttaaattgcaattctgtcagattctgtctgctttgccaacctcaatcaagttatgtactatgcctcagtttcctcatcagtagaatgaaaataatacagtagtgcttttttcatagggttgtagtgaggattaaatgagatgaagcgtataatcctcatgtacataacacagtacatactatatgtgttgcacatagtaagtgctcagttctttttctttgcattattcttagcacataagtcaagttacatttgctctcccttacgcaaggtcaattgttcttttttatgtgtttacccgttactttgttcatgcatttgttataaccactgccatcataaagcaacttgctatctttgttcataaaacaaatcccagattcactgagctcaaagtgagagaaggaaactttgcattatgtgcagttcctatgcttttctccaaatttcacatctccgttggggatctctcactagttatccttgccatacccccacaccagccttacaattttgcattatgtttcctacatcatgattctaaacggtcctcctgttcgctttctctccatcccatatcgttgcagatagctatttcctctttttaagacagaaacacatttgcattttgcctaagctacatttgtaaattttacagtattttcgaaagacacaatggaatctaggaaagatgcaacagataaagagattaactggccaatttttgagagcaccatccgtaaagtccacgaacaagtgaggcttccttgtcggagaaagcaattcagtcaccataaatgatcattcaagcctgatctcattccctcttgaaactggaaattgaaagcttgttcctctgacagttgtgttgtcagtggatatgcccagtgtgcaaaggactggacaaagggcaaaagtacacatatcccatctggaattctgagtcatccctgagacatcattttggatttgtctactgagatgaaattaaaacatgagtaatcaagcccacacttcttccccctcaaactcatctctttggtatcatcaagaaaatcaaatgctaatagccattgacctcctaattctagtgctcttagctatgataaaacagtcattaacttaatctaaatgttgcaaataaaggagccccatcaaagctgaagccccaaaattatacaaatgagttaactgggaaggcatgggggaaacaacagttttcataagacacactctaaatctagtttattctcttaggaagacttttctcatcaatagagagccacataaagatgccttacctgcctttcacggggactatatcaattggctgtactgtcactcactccaaaactctcaaaatgcctaacacagattcttgattttattgattgcattagatgttacgttttctaaattttcagcaccctggaggtcacctcaggaaatcatgcagtttttgaatgattttccttagaaatacacgtgtagctatacatatgcccatgcgttatttaatcagttagtgaaaggaggaaaacagcatttctattattgacctttctcaatctctgaggagactgtatgtcttgcctacagtccaggattgaaagcaaaagaaaaaggcactgacaaaatagcattttattttaatagcacattatggagagacaaaaaaaaaaaaaaaaaaaaaaaaaccctgggatttcctttgtctaagtagaattgacgtatgggtgagatcagtctctattttactcagtacaagtgcacacatatttatgtacacacatataattgtcatctttgggccgggcgcggtggctcacgcctgtaatcccagcactttgggaggccgaggcgggcggatcacgaggtcaggagatggagaccatcctggctaacacggtgaaaccccgtctctactaaaaatacaaaaaattagccgggcgtggttgcgggcgcctgtagtcccagctactcaggaggctgaggcaggagaatggcgtgaacccgggaggcggagcttgcagtgagccgagatcgcgccactgcactccagcctgggccacagagcgagactccgtctcaaaaaaaaaaaaaaaaaattgtcatctttggaagctaagggccctgtatcagagtatcagaatatacctatatccaggatgcaatgttctccagttttgcattaacatcagctacaaggttcactgccatctaagactaatcaacagtaatagctaaaggacaaaggtcagttcctgagagatatgcctaaattcatctggctatatcttctgttcctcccaaaccctaaccccataaattcttcattgtttagaaggattcatattttttgtttgtttttcatattcccattttattggctggggttagaattgcaatggcagcaaaaaacacagaagctatctacagtggcttaaataaatagagttttatttatctccaatattaagatgtctggaaataaggtgctttgggcccaacagtatcaggactggcatctgtatattttttattgacttttcctcatgcaatatagcagccaccattatttcacagggtgaaaaagagaaggcaaaaagggtgtactatctgagtcttatcatttttataaagccaaaaatttcccagaaaccttttttgaaagacttctacttgtatatcattgtgtagaactgtgtcacatgacagccaccaacaaaaagatggctagggagaagtggttttcaacaggtattgaagtagctaaccggcagtgtctgccggtcttcagttataaacaccagcagctaactctggctaattcaagtcagggaaaacaaaggggatggggtaggggctctttatttaaaagatactcatagaaatgaacgaagtaatttgaaaactaggtctcagaataggacatgaagtataagagttctaaaatctcaaaagcaggaacacatgcatcttctttttaagtgttgtctttgaaatactaagctccaaagtctttccaaccttgtattattttcttcctttgtcagcttcctgagtggcagagtctgagtaacctatggggtctttgaactctttaggggaattgaggaaggcaaaaaggtaccatgattggcagctctactagagtcacaagaaatatggggaaagcgattcctcaaaggaaaaacaaaaacagaaacaacaaccaggcagttagtagaaggatgaaatactggacccacaaagacaacatatgtcttctcaccacacttggtctctctctctctctctctctctcacccttctctctctctcatagtaatgaaactaaagctgcaaaactaaggcctagctattcattgtgatccttatgagatcataaaaaaaatctgtatttaagtggagaaaaataaatggaatatcaactttaaaaaattttttttgagacagagtctcgctccgtggcccagactggagtccaatggcatgatctcagctcactgcaacctctggctcccgggttcaagcaattctcctgcctcagcctcctgagtagctgggactacaggcacgtgccaccacacccagctaatttttgtattttcagtagagacagagtttcaccatgttggccaggctgttccgaaactcctgacctcaggtgatccacccacctcgacctcccaaagtgctgggattacaggcacgagccactgcacccagctggaatatcgatttaattgtaagagaaaaatgcactagtttaaaaatgtgtcctctttatcctcaggttttaaaaatatttttaaggtagtttagaaaaactgaagtgattatttgataaataaatttcaaatgctatcaatggaacaagaatggatattagatatcctgctaacaaggatcatatttttacaagttgtttctccaaagagaacagagctacagctgagattctggtgcgcataaacctttccatcagagctgtagtcacctaacaattcttatatcacaatcttcatatctcaatcccttttccaaataacttcatctttcttaagttgcatacaaatgttataatctaatatttttgagatggatatcatgtgtcataaaaagaaagccattgtaatattaccaataccaagtattagcaaatattgacatagctttagaataaaaataaacagagctcaggttctggctctgccatagctagctagatttatcttaagacttcagtttcctcatatacaaaatgttgatagtatcatcatcttgtaagccttgttgtaaagagcaatttagctaacagtaacagtgtttaacatgcataaagtgaagactcctttctgggctgataagaacgctagtttattcatttgcttatttctatatttttaagcttagagtctgaaaattttcagagtctgggagtcaacgtgtggggtgtgaattggaacttcaccacttactaacaactcccttttgtagtgcttccatttatttatctgttcaataggagtaataatagcactcgctcaaagagttgtctgaggattagatgagacaatgcttgcaaaatgcaaagtggagcacctggtgtatagttggtattcaataatttctagttgttgatatgatgatgacgatgatgatgtattctcttgatatgtgaatgctcatcacaccatcctatggaatatttgattttaagaaaaagttgggtttgttttttttttttgtttttttttttttttgagatggagtctcactctgtcgcccaggccagagtgcagtggcgcaatctcggctcactgcaacctctgtctcctgggtttaagcaattcccctgcctcagcctccagagtagctgggactacaggcgtccgccaccatgcccggctaatttttgtatttttagtggagaccgggtttcaccatatttggccaggctggtctcgaactcctgatcttgtgatccacctgcctcggcctcccaaagtgctgggatgacaggcatgagccaccatgcccagccaagaaaaaatattttaaacaagttaagatcatttactatactgtgccctaagatgaggtgaacatgtagatcatgagatctaattgattttagatgcagttcagttttttaaaagaatgacctgctttccatattaaaatttcaaaacaatgatatgtggagatgatgacagaatatggctgaatgaggtaccttgttatcctcaaccttttggctcagagacctcttccttgctggaaactttcctaaccttttaatgatttattaacattttgcatgcactctttatacctttcattaatgactagttcactgcaaatttttctttgctttatttcctattcttggtgtgacattcattctctatctgtttctatggaagcttttgtgatgcctcagagagaaagaattctgagtctttgaaataatgaaaacattactaaaccataaaacctagatttcaggagcctaatagaggattagagctttattacgtacagccatcttacagtttagccttcaagtctcaattgtggaatgatcttttgtcctttctctccagtgtgcatgtgtgcatacacatatagacacagttcgcgcttcagtcatataaatgggaagccacaaagcttcctagagtacccagatgcagaattagaagacccaatcttgacaccagggtcaggggatctgtggtttggggggacttgtgctggctatattgttgtcacagcaggaacagtttgtgtcggtatagaggctttaacttctagtaaagggatatataatgaaaatgtaagcaaccatcgtttatttttctcacataataggaatttaagagaaagatatacccaaaattggtttattagctcaacagtttcattcagaatccaatgtctttccatctttgcatttgctatccttagcctttggctttggtctttggaattgtcacgcgatggttataaaatggctgccacactccaggaattgcatcatgacagtgtgaatggaaaataaaggaagagtggcagttcttgtcatgtttcagaagcaacagcatgtctccctaacatctctttggccagaactaggtcaagtagctgcatctacctgcaagggaaactaagaaattgactatcagtgctttttaaacttttttttgtgtgtgtggaaatagataatcactagagaaaaaagggagagtggaatggttgttgatgaggcaaccaacagtgtctaccactctatttataaaccttttcttgatttttcctactaaatgtgtggccgttttttttgcttgctttttgttttttgtttttgagatggagcctcactctctcccccaggctggagtgcagtggcgtgatctcggctcactgcaacctccgcctcccaggttcaagcaattctcctgcctcagcctcctgagtagctgggattacaggtgtgtgccaccacgcccagctaatttttgtatttttaggagacatggggtttcaccatgttgatcatgctggtctcgaactccagacctcgtgatccgcccatctcagcctcccaaagtgctgggattacaggtgtgagtcaccgcacccagccaatgtgtagccttttagttcaaggacctttcattataaatcttcatagtccaaacacccggcatattgtctggcacaaaataggaagaaatatttttggacgtgccaaggaatttgcaagacagtgagacaaatagccagtaaaaatgttagcattaatatattattaaaaatagtgagaaatgctccaggcgcagtggctcatgcctgtaatcccagcactttgggaccccgaggcgggcggatcacttgaggtcaggagttcaagaccagcctgaccaacatggtgaaaccctgtctgtacttccagctacttaagaggctgaggccggagaattgctggaacccaagaggcggaggttgcagtgagccgagatcacgtcactgtgctccagcctgggtgatagggcaagactctgtctcaaaaaaataaaaataaaataaaaagaaaaatagtgagaaatgttatgaagacaaagaataggctactttggaagaataatagtgggaacttcttcatagtctaggaaggcctctctgaaaaggatatatttaagctaaaatctgaaggttaggtcagtcatatgaacagggaggggaatggaataatattttcaagacaatgacctaaaaggaggcaagtatggctaggagctaatgactgagggggtgagtggtacaggacaaggctggagagtttattttatgggtaagcagagaaataatataatctgacgtacctgtgaaagtacacctgagctgatgtacctgcaaaacatcatacaatctgatggacctgctgtataaatgagagattgaatgtggcaagagtagaagcaaagaggccaggtaagaggcatttgcagttgtcttgatgaaagaaaatgactactgggagtaagatggcggcaatggaaatagagagaaatgaacagatttgagatgtattttcgagacaaaatctgtatgacttggtgatggattagatgtcaggcatgagggattgaggatgactcccaagttttttttgtttgatcaacttgttgtactgtttgctgaggtgataaagatggaggaggaagcagatttggaaaagatcaacagttcagttttagacatgttcagtttgaaatgtgtgtgatatgtccaagtgcagaagtcaaattcaattatagctcaaaggagagacccgagctagaagcgtaaatgagaaaaatattgatacaaaatggaatttagagcatccagaatggaaatcacttagcatgtaaagagggaagggaagatggcctaggaccaaaccttgataaacttcaagaaaaagaagtcaagcagaggtaggagaagagaagtcagtcaaaaatcaaaagaatatgacatctcagaattcaaggatgtgaataaatgtgtaagtgatggatggctttcggtctgggctttttgttttttttttccattttaagttccaactttgctacaatccggctacgaatcccacaccctcccaaattatctgaggatgttaattgatacttgatcagaaagcagtgatttttaaaatcatatacttctaaattatctgagatatgaagcaatgagatagggaagtggctgaaatatgtttctctggctcagctgtcatgagggcttgctctagaatggcactcaagcacatgtttatccactgagctctatatcatttattccattagctgaagaaggaatctctcacactctaacttcagttctgttggacatgggaataaaagttagatgtatacagactaaactaaacagatggtagaaaaacaaaggattcttaaagtatattggagaaatgcatttctatggtcaattttcttgaatatcctaagatcaggtttcatgtatataattctttacatttcacaaagcacctttagatgtgtctattccatttaaccctcatcctaactgtgtgaagtagggcacagaagtgtagaaatgattttttaaaactcactaagctaatcaatggataatctgtgattataatagaatctgagtttcggcatctttatcttattccttactgcactatatctggaatggtaaatattgttcatctcacaagcaagctcttattgactgatatcagctgcctagagtggtttattgtaaaagagcataaagcaaattggggaagactacaatacagtgccataggctgattagtaatttctaccattggtattaaatgagaaaataatggtacaagtgctttacatttgtctgccattcctaaactaaggcacctcctgttatttataaggaagaatattctgagaagtttaaaagtctcttgttaaatcatttgatgacgttggataaaatggcttaaaataagaatatgcctgttgcacaaataatctacactcccccaagataatgaataagtcagctggagcatctcaagtttcaatatgtagaggatcaaaatgaaatagtcataaaaccccttgcagacatttcttgggcaggcaaactaatttcctagtaaaagaagttggaagttggacaaattgtatatgggaactttctatactacttttgcaaattttctgtaagtttaacttttcctaataggatgctgagattcagctcttccaatggtctcaaatgttttttggttttgttttgttttgttttttgagacggagtctcactctgtcacccaggctggagtgcagtggcgtgatcttggctcactgcaacctccacctcacgggttcaagcaattctcctgcctcagcctcccaagcagctgggattacaagtgcctgccaccatgcctggctaatttttgtatttttagtagagacgggattttgccatgttggtcaggctggtctcaaactcctgacctcaggtgatccgcccaccttggcctcctaaagtgctgggattacaggcatgagccaccgctcctggcctcatttaaccattttgactttcactttttctgtcttcaaaatgaggtattgagctaggtaaacttaatgtcttttttcgctttaattatctaataattctgtgattctcaacttggtgtgttaaaccagattacacctaagaaaccctgaagactttttagctaggagtttaaatattcacttagtcattcaattaatatctattgtgggtctgttatatgccaggcgccattttaggtattgataataaagcagcaaacaagacaaaacccctgccctcaggagagcttacattcttgtaaagaagacagatgataggccgggcgtggtggctcactcctgtaatctcagcactttgggaggccaaggcgggtggatcacgaggtcaggagatcgagaccgtcctggctaacatggtgaaactccgtctctactaaaaatacaaaaaaaaaattagccgggcttggtggtgggcacctgtagtcccagctactcgggaggctgaggcaggagaatggcatgaacctgggagctggagattgcagtgagccgagatcgtgccactgcactccagcctgggtgactgagcaagattccatctcaaaaaaaaaaaaaaccgaaaaacaaagaagaaagatgataaacaagtacacaattatcatataacaattttaaatagtgacagcatgttgaaataaataaagcaaggaagacgctagagagttgttcatggaaggaattgtcattttatataaggtgatcagggaaggttccactgaggaggtgacatttgaggaaagacctgaaagaagtggggagggagacccgaaagttcatgaggaattgtgtcccaaacagggcaacacataaaaagtccttgaggcaagactaagctgattatataacatttaaaagaattaggccaggtgtggtggctcacacctgtaatcccagcacttttggaggccaaggcgggtggatcacctgaggtcaggagttcaagaccagcctggccaacatggcaaaaccgcgtctctactaaaaatacaaaacttagccaggcatagtggtgcatgcccatagtcccggctacttgggaggctgaggcaggagagtcacatgaacccaggaggcagaggatgcagtgagccaagattgcaccactgtactccagcctgggtgacagagcgagactctgtctcaaacaaaaaaaaaaagaattaatttacatatcatgagatcatctagtctaacacccttactagacaagttcaaaaaggttaagacttggccaagatgacacagctatttaatgtgatatctgggttagaattcacctcatctgaattcctctcaaattgtgctctttgaggtcaatgtgccttttaaaaaatgacagaaagcatggctgtagatttcagatcataccaaatttgatggaacaatgaccatttttagcttcctatagagtctaagacttgaacttgccaagggagtcacagctggatttgtaagcatcaaatccacaaatgtacttaatgtcaaccaaggattttgtgtcacctgtaatgctcccccaggaagcccccaagtccactagtcctaatcactgtgtttggcttcataacctgttggcccaaacattacgcaaaaaagagcaatattcccaaggtggtcatgttagttgtggtgagatgtcaaccataagtagatctgaccgaggaaatgccttaaggaagcagctcaggaacacctgagtatatgtgtctagaatgaagcctattaaaaaaactactgcagagctaaagacagctgaaagccattatgacagtcacaactacttgatagattgaaaccaaagagttcctttgtgattagatagatcaggactctaaatcatgtttttacttcatgtgttcattcattcatcatacagtcagtgattcagtaaacaatattgagcatccattatgtgccaagcactgtgttaaattctggaaacacagagatggattagacccctgtccccagggagcataaagactagcagagttagacctccctcccatatgaagaaattaaatgaggtaaggcattaaaagtgctatgattacataatacagaacccaaaggggaaggcattttctgaaaaacagaaaactgaaaataccagcttttcagcctcacacagacataggaaaaccaacccccatcaacatcatctcttcttttttttttattattactatagtttaagttctagggtacatgtgcacaacgtgcaggtttgttacatatgtatacatgtgccatgttggtgtgctgcacccattaactcgtcatttacattaggtatatctcctaatgctatccctcctccctcccctcaccccaaaacagtccctggtgtgtgatgttctccttcctgtgtccatgtgttctcattgttcaattcccacttatgagtgagaacatgcaatgtttggttttctgtccttgtgatagtttgctgagaatgatggtttccagcttcatccatgtccctacaaaggatatgaattcatccttttttatggctgcatagtattccatggtgtatatgtgccacattttcttaatccagtctatcattgatggacatttgggttggttccaaatctttgctattgtgaacagtgccgcaataaacatacgtgtgcatgtgtcttcatagcagcatgatttataatcctttgggtatatacccagtaatgggatggctgggtcaaatggtatttctagttctagatccttgaggaattgccacactgtcttccacaatggttgaactagtttacagtcccaccaacagtgtaaaagtgctatttctccacatcctctctggcatctgttgtttcctgacttttgaatgatagccattctaactggtgtgagatggtacctcattgtggttttgatttgcatttctctgaacatcatctcttaatataaaaagcataatgtgctgatttcacattgcatgcctgtatcaaaacatctcatatgctctataaatatatacgcttaatgtgtacctacaaaaattataagaattttttttaaagcaacaataaatatcttcattagtcaaccaaattaaatctattaatatatccatgtttgtgaacaggatggccacagaaccctgtggatgcttaccacttaaacatttcctgaaacaaatatgtttccaaaacatcttgcctgtctaatctgacaactgcagacatcctaactaggctctgaaggtgctctccatagcactgatgttattgattcagttgttaacagcgcaggcataaatgactgatgataactctctaaacgtcccttcctactgccgttgaaatggctctgggctttatccaagcagggctgctaaatgaatagtagatgtaccagcagaggagaaattggtcctgaggtgaattaactctcctgaggtagatttgtttgtgcttccaacaacctgtacgttaaaccttgtgaaccttcatgtaggaattttgaggagaaatgggcaatttttggaaagcctaatgttttatcagccgctttttcttctcattgagacctgtgtattctcaagggactttggaagtttgccattttaagaacagacttgatgagaattatttgaagtcctccacgtttccatttatcagttttcctaatacagacatcctacgcacatcgttgaaagaatgttctttttgcctcacaggtagatcacaaaagtgggcccataatcattgggtagagggtttctcagctctgagttaaattgcagctgggtattgtttttctgtaataggatcttctctgagtgaatggtgaaacatgcccatttttgaggtcatgagagcagagctttccacatcatggacagaaaagggcaaccggccatggtttcagttatacagggagaggaaacaataggttttgtctctgctttgctattgcttcaacagcagcatactgttggacactcagacattagggcacaatttagacttgtttcacagctgtcatttctttcctcaaaaacaacaaacctgcatgggggaaatgagtctacatttcagggtttttcaagaattgataacataacatgtacttcaccatgaatttatattccacaggtccctgttctcttctctggtcatcagagtacaaaatcacaaccaaaaagcaagaattgatatctatgaagctaaagtagtagtagtagtagtagtagtagtagtagtagtagtagtagtagtagtagtgaagcaggatattaccctgatcccctcgcgggcgggaactggactgcatagccgcttcggtgctggcaggggcagactccactggctcagtctcactgagttccacccctcatgggagaggaagcacaggtgagtgggtacaggagccagggtgagtgcttttgggcgccagcaggaacaaaactctgtgtgggccccatggcagtgtctaggagggtgcccgcgacccttgaatccccagaaggagtgttacagggcccttttatctttgccatctgcagatggcttaagtgttaacagctcagtggagggtcagtgtgacagccttctgtactcgcacttgtggcacctcagatcttgcccattttccaggaggaatgaggtcacacaaactaattggagatggtaaatgcgggggattttattgctgatgaaagtggctctcagcaggaaaaggagctgaaaaggggacagagcaggaaggtaatcttcacctcgagtccagctgtccgcaatcagactcctctctgaagctatgctgccaggctgtccctcggaagtcaagccacttctctccaatgcacaaccatagtttccaacatccagctgcttctcctctgtgccggctgagcctgggatttttacaggcacaggatggagggcagggtgggctatgggtggttttggaaaaggcaacatttgagcaggaaaacagggatgtaagttctcactttgggccacagttccaggcttttaggcttaagggtggggcccttgccagagacccgccctcttctgtccagaatttccctgcctcctgtccctatcagtagtaatagtagtagtagtagcagcagcaacagaagtaatactaactactacataccaagcattatctacgtacttcatatctattcaccaacctaattgttacaactttcactcgcgtccgtgtgaagagaccaccaaacagtctttgtgtgagcaataaagctttgtaatcacctgggcgcaggcgagctgagtccgaaaagagtcagcgaagggagataggggtagggccgttctataagatttgggtaggttaaggaaaattacagtcaaaggggggttgtcctctggtgggcaggagtggggatcacaaggtgctcagtgggggagcttttgagccaggaagagccaggagaaggaatttcacaaggtaatgtcatcagttaaggcaaggaccggccattttcacttcttttgtggtggaatgtcatcagttaaggcaggaacaggccatttaaatttcacttcttttgtgatttttcagttacttcaggccatctggatgtatatgtgtaggtcacaggggatatgatggcttagcttgggctcagaggcctgacattcctgtcttcttatattaataagaaaaataaaacaaaatagtgttgaagtgttggggcggcgaaaattttcggggtggtgtggagagataatgggtgatgtttctcagggctgcttcgaggtggatcaggggtggcgtgggaacctagagtgggagggattaagctgaaggaagattttgtggtaaggggtgatattgtggggttgttagaagaaacatttgtcatgtagaattattggtgatggcctggatacggttttgtatgaattgaaaaactaaacggaataagagaaggagaaaaacaggtattaaaggacgaagaattgggaggacctaggacgtctaattagagagtgcctaaggaggttcagcatagccttgccagcaaagattatttactttaagagttaagagtggtggtttggggatagcaccaagagatatcagctgtgatggcttggagaaacagtgtaaaccagcagtgtaaacaagagcagggcatttatgactagttgagactggtgaataggagtatgactagacagaagataggagggatgacaagttttttggggtgcagtctaagttggtctggtgtctggaatgagactggggcctaataaaaaggagcgtccatacaggagcttaaatgggctgtaccttgtagcattctgaggacaggcctgaattctgagaagggcaagtggtaaaagtattgtccagtcctttttaagttggtggctgagcttggtgaggtgtgtttttaaaagaccattagttcactgaatactaagagcctgagaaactgcttgggtgatttgactaataaagtccagtctgttataggaccgtatagaggtgggaaggccaaaccgaggaattatgtttccctgtgggaaaggcctctacctatccagtgaaagtgtctacctagaccaagaggtattttagtttcttgactcggggcatgtttagtaaagccaatttgccagtcctgggcgggggcaaatcctcgaacttgatgtgtggggaagggagggggcctgaataatccctgaggagtagtagaatagcagatggaacactgagaagttatttctttgaggatagatttccacgatggaaaggaaatgagaagttctaagaggcaggctagtggcttgtactatagcatagcctgcctttgctggtgtgtggccattaggcctggtggaactgccatcaataaaccaagtgtgatcagggtgaggaacaggaaagaaggaaatatggggaaatggggttgaatgtctggtggatcagagatacagtcatgggggtcaggcgtggtatcaggaataatgtgggaggccggattgaagtctgggccaggaacaatggtaattgtgggagactcaacaaagagtgagtacagctgaaggagccggggagcagaaagcatatgcgtcaggtgtgaggaagaaaatagattttggaagttatgagaactgtagagagtgagttgagcatagtttgtgattttgagggcctctaaaagtattagggtggtggcggctgccgcacgcagacatgagggctaggcaaaacagtaaggtcaagttgtttggataaaaaggctacaggacgtgatcccagtccttatgtaagaatcctgactgcacagccctgcacttcagcggtgtgtaatgaaaagggttgggatgagtcagggagagctcgggtgggagcagtctctaaagctgtcttcaaggaatggaaagaggagtggggaaaggatttaggatctatggggtcagctaggtttccttttgtgagtttatataatggttttgttaggatggcaaaaccaggtatctaaagtcgaaagtatctaaccatgcctaggaggaaaaaacttgttgttttctagaagggattggggtttgggagattagtcagacatgatcagcagggagagcacgtgtgtttttatgagaattatgccgagataggtaacaggtgaggaagaaatttgggcttgactgaagtaatgggggctgtctgtgaagccttgaggcagtacagcccaggtaatttgctgagcctgatgggtgtcagggtcagtccaagtgaaagtgaagagaggctggggtgaagggtgcaaaggaatagtgaagaaagcatgtttgagatccagaacagaataatgggttgtggagggaggtattgaggacaggagagtatatgggtttggcaccacagggttgataggcaaaacaatttggttgataaggtgcagatcctgaactaacctgtaaaccttgtctgcttttaggacaggtaaaatgggggaattgtaaggggagtttataggctttaaaaggccatgctgtagcaggcgagtgataacagactgtaatccttttaaagcgtgctgtgggatgggatgttggcattgagcggagtaagggtgattaggttttaatgggatggtaaggggtgcatgattggtcgctaaggagggagtagaggtgtcttatgcttgtgggttaaggtggggagatacaaggggagatgtgaaggaggctttgaactgggggaaaaggcggcaatgaggtgtggctctagcctaggaatagtcagggaagcagatcatttagttaaagtgtctcggcctaatagggaactgggcaggtggggataactaaaaaggagtgcttaaaagagtatcgtctaagttggcaccagagtttgggagttttaagaggtttagaagcctggccgtcaatacctacaacagttatggaggtaagggaaacaggcccttgaaaagaaggtaatgtggagtgggtagcctccgtattgattaagaaggggacggacttaccctccactgtgagagttacctgaagatcggcatctgtgatggtctagggggcttctgaggcaatcgggcagcgtcagtcttcagccactaaaccgagaagatctgggaaggagtcagagagccttgggccagagttccaggggctctgggagtggctgccaggtgagttgaacagtccgattttcagtggggtcctccacagatgggacatggcttaggaggaatcccgggctgcgggcattccttggcccagtggccagatttctggcacttgtagcaagctcctgggggaggccattctggaggaacccctcgcagctgcagttcaggcatttggagttcttctgtgctggagatatggctggggtttgtctcacagtggagggaaggaattgcaactcagaaatacattgctacttggctgcctctactttattattgtacaccttgaaggcgaggttaattaagtcttgtggggtttgagggctggaatttaatttttggagtttaatgtcgggagcagattgggtaataaaatatatattgagaataagacggccttttgaccttttagggtctagggctgtaaagcatctcagggttgttgccaaacgagccatgaactgggcttgtttttttatttgatgaaaaagagcctaaacgctatctgatttgggataaagaaaaaggagcattaaccttgactatgcctttagctccagccacctttttaagaggaaattgctgggcaggtgggggagggctagtcatggaaggaaactgtaagccggaccgggtgtgaggagcggaggtgataaaaggattatagggtggaggagcagaggctgaggaataattgggcctggcgaggaggggagaggtcagatgggtctgtagaaaaggaagattagaaagactgagcgatgcttggggttgggactgaggggacaggtgggagggaaagaaggaagatttggaaggagttgcattgggaacagagactggggaggggcagatgtgtaaaagaatgcctggacatcaggcacctcagaccgtttgcctattttatgacaagaattatttagagcttgtaggatggaaaaattgaaagtgccgttttctggctatttggaactactgtcaagtttgtactggggtcaagtggcatcgcagaagaaaataaggcatttaggttttaggtcaggtgtgagttgaagaggttttaagttcttgagagcacaggctaagggagaaaaaggaggaatggagggtggaaggttgcccatagtgaaggaggcaagcccagagaaaagggagtagagacacggagagaaggggtggggggttcttgtcccccagaaaagcggagaaggggtagagacatggagagaagggttggggggttcttgcccccgagaaaagcggtacttgccgctaaaggtgaaggaccaaggcaggcgtccccgtgtggtcagacacctctgaaatgtgggtgaataatcaggcaggcatccccgcgtgattaaataccaagggaagactcttccgagtccgtgaccggtgccggagttttgggtccacggataaaacgcatctcctgtctctaccagaaaaggaaaggaactgaagttaagagaagggagagattgaagtggggcgccaagattgaaaggagaaagaggttgagggatagtgagaggttggaggagagagtaaaaagaggccgcttacctgatttaaaattggtgtgatgttccttgggctggttagtctgaggaccagaggtcgtaggtggatctttctcacagagcaaggagcaggaggacaggggatagatctcccaagggaggtcccctgatccgagtgatggcaccaaatttcatgcgcgtccgtgtgaagagaccaccaaacaggctttgtgtgagcaataaaactttttaatcacctggatgcaggcgggctgagtccaaaaagagtcagcaaagggagacaggggtggggccgttttataagatttgggtaggtaaaggaaaattacagtcaaatggggggtggttttctggcgggcaggagtgggagtcacaaggtgctcagtggggaagctttttgagccaggatgagccagggaaaggaatttcacaaggtaatgtcatcagttaaggcaaggaccggccattttcacttcttttgtggtggaatgtcatcagttaaggcaggaacaggccattttcacttcttttgtgatttttcagttacttcaggccttctggatgtatacgtgcaggtcacaggggatatgatggcttagcttgggctcagaggcctgacaacaacgatcttgtagataggtactgttgtaattcccagtttacaaataagaagactaaggtatagagagattgagtaatttgcccaaagcccacagctagtaagaagccaagattcaaacccaggtaatatggctgcagacctggtaatcctaaccattacattaggctgactctcgatagttaacttatttaagctagtgttaatcacatcttaacaagtttgagtaataaaatcttaggttgaaaggggccttcaagatctagtctaaatcctttcaggagttcttccacatttctgctagaaaacactttggcctaggcttaaaacttagtgatggggaactcctcactttgtaaagcagcctgttcagttcacaaacaccctaataattaggctgttatctcttgcattgagctgaagttgatcttcccataacctctgcctttctgtctatatgtatgctttggaaatatacacagtaagtgtaaaccctcttggcaaagacagcccttcaaatacttgggaggcattcaattccccccgccacctcccgctctactctcactaccaagtctttagaatagagtacaggtatcaaaatcaaaacaaacagggagtagaaacttagtgccagactttaagtattttttacttataaaatctttttgtgtaacgagtagagcaactcctaactgcatatatgtactaagtttgcaaatggggcaatttgtttttccccatgcactggcatcagaggtggtaaatgctggcctgtcagattcaatgcattttgctgggttagaaccgcaagggctttccaggggaccaagctctctctgctgtaatcattaaaacctgcagaatcctgtgtgactctggggagaagcccagtgctcttggccctcatccaccctcactaggaaagctgcttaaaactaggacagaagaaacaaccactggcttaggatcagtcctcagacctgccttggcactaccccttttattccaaattttgcagtggcacctccaacttcttggtcacgttttgtaccttgtctgtttcctcatataacttcattccaaattccaacccatgctctgacatttcctctccattcttgctagacaggaatttctggatattggatattggcccctgcccataccctgactctgtatattcttttgtcctgctgaccagtttgagcttctgaataacaaaaactccccaaccactttaaagtcctctactttagcttgatgggtccctctcctgtattttctgaccttgactctgctctctgtacaaatagtaattacactcacccccaagcagagaatctgtgtcaaaatccatcaggatatctaagcacatcattatatctgtcaacttccccagactcctgatctcaatcccttattttcaacaacctggcaccgacagagtataatttcttttgtatcatgatgcagtttgatgtgcttttcgaaaggttatggtggtgattttaaagagatctgttttgttagaggaaggaaggaaaatagtgctgtttgcttccatgcagttcctcagagcctatgccagggtgatttcagctcatgagagaatctaaagtctaaagagatgtgtggagattagaaacattggtgtaaaaaatcagattacggagacgtaatatccagggtgtcagaggaggcagggagcttcaatcatgtttgaaactataggtcccacccaacaggatgagaaaatacaggagaagccagaaaaggtacctgcttgtgggtaaaatcaattaaatggaatcaatggtatggtagccatcatttctttcttttcaaattgtggtaaaaacacataatgtaaaatttaccattttaaccattttttagagtatagttcagtaatgttaagtatattcatgttgtcatgtagtggacttgcagaactttttcaccttgcaaatctgaaactgtacccattaaaccacttctcatttcctcctttcccccagcccctggcagccatctttctactttccgtctctatgcatttgactattctaggaacatcatgtaagcggaattatacagtatttgttcctttttggactggcttatttcacgtagcataatgtcctcaagtatcacctattagctgtcattgcttgaacacggttttctgccaagcacatgatctcgttttattcccagcacaactctcaataacaactgtgtaccttttttccctttcacagattaggaataaaaggctctccaagactaggctcagaagcagaagcagttggagagttgcttgcagaaggattattgtcatactgggaagtgctctcaggatttacacctctaagaaactgaaaggggcatgactgcgcagaggaaaagctggttcaccatgcagttgcaattatggctgcagcaggagcatgcagggaagctctggagtaggtttggcctttcagagttgtccccagtaaatcaaatgggtgaagactttaacccatttatgctggaggttgcaaaaatgttttgtgaaaagtcagaccttggcgatgaccttgagcagtaggatataaaaaactcccacaagcttagcgtcccaataatggaacactaggcataaatgagttaatccctgcatcagccagtcattggccctaggtctctccctgagggaggggatgtagctgtgtgaggcagttccctgagggcacattccaatgaaggccccagctgtgagccagcagccaataaggcagcaggtggcccatgcatgcaaaggccctaaagaggaggtccagggtggagcgccacggtgtctactacagatgctgaaagagtaaatacattttatttatttatttatttattttattatactttaagttttagggtacatgtgcacaatgtgcaggttagttacatgtgtatacatgtgccatgctggtgtgctgcacccattaactcgtcatttagcattaggtatatctcctaatgctatccctcccccctccccccaccccacaacagtccccagagtgtgatgttccccttcctgtgtccatgtgttctcattgttcaattcccacctatgagtgagaacatgcggtgtttggtcttttgtccatgtgatagtttactgagaatgatgatttccaatttcatccatgtccctacaaaggacatgaactcatcattttttatggctgcatagtattccatggtgcgtatgtgccacattttcttaatccagcctatcattgttggacatttgggttggttccaagtctttgctgttgtgaatagtgccacaataaacgtacgtgtgcatgtgtctttatagcagcatgatttatagtcctttgggtatatacccagtaatgggatggctgggtcaaatggtatttctagttctagatccctgaggaatcgccacactgacttccacaatggttgaactagtttacagtcccaccaacagtgtaaaagtgttcctatttctccacatcctctccagcacctgttgtttcctgactttttaatgaccgccattctaactggtgtgagatggtatctcattgtggttttgatttgcatttctctgatggccagtgatggtgagcattttttcatgtgtcttttggctgcataaatgtcttcttttgagaagtgtctgttcatgtccttcgcccactttttgatggggttgtttgtttttttcttgtacatttgtttgagttcattgtagattctggatattagccctttgtcagatgagcaggttgcgaaaatttttctcccattttgtaggttgcctgttcactctgatggtagtttcttttgctgtgcagaagctctttagtttaattagatcccatttgtcaattttggcttttgttgccattgcttttggtgttgtagacatgaagtccttgcccatgcctatgtcctgaatggtaatgcctaggttttcttctagagtttttgtggttttaggtctaacatttaagtctttaatccatcttgaattaattttcgtataaggtgtaaggaagggatccagtttcagctttctacatatggctagccagttttcccagcaccatttattaaatagggaatcctttccccattgcttgtttttctcaggtttgtcaaagatcagatggttgtagatatgcggcattatttctgagggctctgttctgttccattgatctatgtctctgttttggtaccagtaccatgctgttttgcttcctgtagccttgtagtatagtttgaagtcaggtagcgtgatgcctccagctttgttcttttggcttaggattgacttggcgatgcgggctcttttttggttccatatgaactttaaagtagttttttccaattctgtgaagaaagtcattggtagcttgatggggatggcattgaatctataaatttccttgggcagtatggccattttcacgatattgattcttcctacccatgagcatggaatgttcttccatttctttgtatcctcttttatttccttgagcagtggtttgtagttctccttgaagaggtccttcacatcccttgtaagttggattcctaggtattttattctctttgaagcaattgtgaatgggagttcactcatgatttggctctctgtctgttattggtgtataagaatgcttgtgatttttgcacattgcttttgtatcctgagactttgctgaagttgcttatcagcttaaggagatttggggttgagacgatggggttttctagatatacaatcatgtcatctgcaaacagggacaatttgacttcctcttttcctaattgaataccctttatttccttctcctgcctgattgccctggccagaacttccaacactatgttgaataggagtggtaagagagggcatccctgtcttgtgccagttttcagagggaatgcttccagtttttgcccattcagtatgatattggctgtgggtttgtcatagatagctcttattattttgagatatgtcccatcaatacctaatttattgagagtttttagcatgaagggttgttgaattttgtcaaaggccttttgtaaatacattttttaaggtcacacaaatgacatatgggacagaacagtgtttaacttcaaaactcatgttctttctgctatactgggccttctctccgaaagaggcctaatttgcacactacagtcaagcttagaatctattcatagttaaaatgtggagtcaaagcccaggaactatgtccttcaattcatctttcattacttacctattccttatcattcccgctgacaccaaccattttttctgacccttgtcatgaggagtgaagttgtatcattgcagcagctttctacttgtactctatgcctaaaatctctccttcctccatctggtcagccaattgctgtcaagttaatcttgcaagaacactacttttgccagtttaatttcgcaaaactcctgctgtgtgccaggagtgtcccagacatcaggtagtctaagataagcgatagtctctgcccctaagccgtttgcaacctttggagagacaacgtcattatcaccaccagcacccccattaagctcagagctaatatatgccagatgagactctgccagtcactgtgctaaggacttgacatacgttatctcccttaattctaacaactactttctgaggtacctctgatgagtagtatcatttttagatacaaaagcagaaacttagcgagttaagtgctttgcccagtggctctcagttgagaaacgaggtagtcacaccaggcagtccaacttcagtacctgagttcttaatcatcatgtttacaactttggctcaacattgtcaccaagatcgggttcaaatacatccattatcaatattctttctgtctccttgtatgtccaaacaaacaaaacaaatgcttccctcctgatgaggaaagtctccaaatcttgatacctgctgtgtctggacagtttttcctgctatttgctgagtgctggaaggattccctcaatccagatgtgattgcagatccagctcaagctcagcgtcctccagggaacctttgaactaaccacccagaaacgagcctttcaccggacactactcattttcacatatctagatcttatttccccatctgaactgtaagtgtcttaagagctgattttgttgttttttaataaaaaataattcttagttttttttcttattaccaaaaaattattcgccattgaagccttctgaatttttaataagaaaactattggtatattgcttcaaaaagaaatctaagcttctagattcttgaaaagggatagtgacagaaccttagaattaatattcaatataactaatctgatgaaaattcagtcattgatacattactgagaactactagatctcagcatttttaattgtagattcacatggagttgtaagaaattatacacggactccacatacctttttaccgagtttcctctaatggtacacctgcaaaactctagttcaatgtcacaaccaggattttgacgtcaatattgtcagtatacagaacattttcatcactacaaagatccctcctattggccttttatagccacacccacttccctgccccccctacctcctacttccagcaactactagtctgttttccatttctttaattttgttatttcaataatgttatatgaatggaaccatacagtatgtaatattttgggatggacttgactcactcaacataattccctagagatttctctttttatatgcagcaagacttgtttcctttttatcgtgagttgtatgctatggtttggatataccctagtttatttaatcactcaccccttgaagacatctgagttatctgtagttttggactattgtgaataaagctaccaacattaatgtacaggtttttgtgtgaacataagtttttatttccctgagataaatgctgaagagtgcaattgttaggtcatatggtagttgaatgtttagttttaaaactgccaaacttttccgaagcgtctgtactattttatattccaccagcaatgtatgagtgatccagtttctctgcatcttcaccaacatttggtgttgtcattattttttatttttagccattctgatatgtgtgtaggaatatctcattgtgcttttaatttacgtttccctcgtggcaaatgctgttgaacaacttttcctgtacttgtttgccatatgtatatcctcctcattgaaatgtctgttcatgtcttttgtctattttctaattcaaaagtttttttatagttcggttttgagagttctttctgtatcagatactagtcctttcttgtgtatagggttttcaaatgttttctctctcatcttttcatcttcttaacaggggatgaaaaagaattttaattttggcgaggttgaatttatcgctttttccttttatggatcatgcttttgtgttgagtctaagaatactttgcctagccctggatcccaaagattttctcctgttcttttttttttttttttttgagacggagcctcgctctgtcgcccagcttggagtgcagtggcccgatcttggctcactgcaagttccgcctcccgggttcacgccattctcctgcctcagcctcccgagtagctgggactacaggcctccaccaccacacccagctaattttttgtatttttagtagagacggggtttcaccattttggctctcctgttttatatgtcttatagttttacattttatgtttaagtctgtgatccatttgatttttatataaagtatgaggtttaagttgaggtttattttttgcatatggatgttcaattgctctagcataattatttgaaatggctggcttgattattgaagtaaggtcagacttatttctctcctgggcttcagacccagccaccttctatgtttcttgtccaccacaacctgaatgtcccacagacacctcagacttaacatgtccccagcagctcattattatcctccttttgtcccaatccaccctcaacatttttccctccctaattgtgctgttcttatgaacgctacgcttcacccaattgcccaagtcaaaaattagggtattatttctgaatctacttttatctttaaatctaacatgatgcattgccaaattctgtcagctctatccccaagccatctcttaattcattcccttatttacacctcccttgactccaatatcttttgactcaaatgctacatagcctctaatttatctccctgatattgttcttgcttccgaatcccttttccacaatgcgcctatagtaatcctcctaaaatgcagatctgattaggtgactctccttattttaaagtctttcttattgttttctcctgccctaaggcagaagttccaacaaatcttgttatcagattctggattaaatcccggcctcagcagtgggacctaagatagtgcctgaatttccatgaacatttattgatgacaaagagggtcttaaataatgagtgatgtagactttccactgtcaacatcacagattctggtttttaatggtattcacatttgccttctccaagagtccaggtttaatgatggtgagacctatcctaagacctggctttgtagtgaggggttacctcatcacagaatcaagaagggacctcgggccgggcatggtggctcatgcctgtaataccagtactttgggaggttgaggtgggcagatcacctgaggtcaggagttccagaccagcctggccaacatggtgaaaccctgtctctactaaaaatacaaaaattagctgggcttggtggcacacacctgtaatcccagctacttgggaggctgagacaggagaatctcttgaacccgggaggcagaggctgcactgagccgagattgcaccactgcactccagcctgggcgacagagcaagactctgtctcaaaaaaaaaagggcggggggacctgggtgcaagtaattctaagaagcaggaataagagaacaagaagaatgaagcgacaaagaaagatgagcaattctctggaactgttgagaagtgtacagaagaaaacaaatctggatataggtagctacagcctgaaatatggaaagccagagcatgtgtatacctgctcctgctcccactggttgagaattgattcctttttcatctgatatgggcaagcattggatctgagtgggacacatcctctccagtgcacccctgccttttccgctgctctgaacttcacacaacgtcggaaagattcaaaacaatgtagaaaatctaagtataaatacaaaaaggaaacaagaagtttttctatcaaagctgtgaactatatgatatgagtaagctcaataaacactgtgcagaagttgggaggggaaaaagagaattgctgccaaagcactaacccctgtggctggctatgcttgcccacccaggaagctcccatgtcatgggggtcaggggaacctagaacagaaagctgaaaggctcagggatcccttttgagaagggatgctggctatacagcacgagttagaacttgcacagaaccgtccactactgctgacactggaatcacaggtgggctgacaagatgtgatgcaagcaccagacatatttgctacaaacctcaaagtggagcagagcagcggcagtgtcagtcttcttggtgtcaatagaatacctgtttatttgttgaattctccctatatgaataataataatacaagaattcaaagcaggataggctttgtgtcattggaggagtatggagaaccatcagtgcagtaagtgtcgtgggaggtttctagacagtttttaaaagtcgatattgagtcaaccatcaaatgtgaacaattctgatatgccagagcatttgtattcttaactcatggggttattacaaagatcaaatgaaataatcattataaagcactttgtgcagtgcctggcacaaagcacgcactcaatacatgttaatgtttatacaattattattattgattgtcagaattatcagccccacatcagcaaagaatagtaggtggtctgtcagcaggaacatggaaacattctcattacatagaagtcagtgttgcagggacagtcattaaaacaggatctaattttagtcttctgagggaaaatgctaggttctccggaaatgttgaatccttcctcgagcatgtagtttaatttttcaaaattatattgcatatcctgtaaaatgaaaatgaaattgtactgctgttcattaaaggcccccaaaaatcttaggcactatacaatataaatgaaaaaaaaggcgttatttttccatagggcataattagaaataaagaagcaaggtcactcacaaatttccgagctataaaggaggaaaggaacaagattttcccccggttattttatagctgccaggttgaactcatacttatccaatgagccccagaatggaataccgttctacaccaactgtactgatgatagtgattcagggagtaaatgataagattccatccttctaaagtgcttttgggattggattctagtaagtttcattttgctattggccaatcacaaaagagactacaatagagaaaagtgaagacatcatgctgaagacagactgctgcatagaaaaggaagagggaccccctaatttagagatatggatggagaaaaaaaggcacttatgctgtagcataagggaaacattaaataaagctataatagaggagaaaatgtctttgaatagaagaaaaaaatcagacagacagaaatagactaaaatgctaaaaaaaaagatacaaaaggacattgaaggggacatacagtgattattacacaaattaaatgcacacagttaaaagggaggtgaaaagcttctaaaaagaatgagtgtgtagtgaacttaattttatcatctttactaagacaaagttaaagtccctaaaatattttaagacacttaaaaaaaaaagtcttaaaattttgagagcctttcagctctgtcaactctagactttccctcctacttaagttttttttcttttttttcttttatcttttttatttatttatttttttttttatgttttttttttttttttttttttttttgagagagagagagagtggatcagccttaataagagaatggtcttctgccaggtggtattctcctaatccctttccagtgagatccacaagggttcaaaaccactttctggggtcttagaggcaccacttatctctcttcctctgctcatatctttctgctccagtgcccgcatagtttgtgttatcagtggtgcgtagcctgagacatccacgacctatgccagctctcgaagtaatgtgattggcatccaaagaaacacaagaagcccatgatttcgtccctttgcaatttaaaatcatatttaaaatgccttttggtcatacaaatttgaaaatgatcttgtaaatcacttccgggaatctatggtcaaaactcagcttagagttctctacttcttaacagagtgcctgccggtaactagtgactgtcaatgagtttgaaaacataaattgatgtgcaaatgctagataatagcaacatcctgtgcaactgggcagcatttctgttgtttggcttttttattttcgtggactctcccaatctgagagaaaatagatttgagttcctttttaatcggtttagacccagacaaggatttaattggtttagaccccattcacctacgtgtgtcactctgtctccaacataacagaggagatgaccaagacaacatgctctccagccaggaggtggggaatactttggtgtcatagcagacaattattgatggaaaactcatgttagaaaatgtaaggtaccttcttctagacggagtaaaaggggcagctgcccagactttcattttaaatagggagcccatgatacaaatcttttaatacaattttaaaaagaagagacatagggggtatctcttaggacctgtcaacaaccaaccctctatcaaatggccaaatcacaggtggtctgcagcttagccaaaatgtccaagtacctttttgtaacacagaatctcctttgaagatccagctttcattaatgatccccagcagctctggtcaatgtgtcttttcacaaatgaagctttttaaaagctttcagtggacaaatgtggctttgagttttcaactaaatctttctgtttaaaaggagtgctgaaatgggcatactttataatcttaaatgctgcacacaaaatactgaaatattattgaccctgagaggttggttcaaatcaaatagcatactcacgtaaacgttctcttttcctaatattagcaacagggaatgtgaaatagagaggggcgggatatgctggataggggtgcaccaaaattttcaaaaagcctcgaaactagtgtatattgataaccttgtggcatctaatatctagtattctttttttttttttttttttgagatggggtctcgctctgtcgcccaggctggagtgcagtggtgtgatctcggctcactgcaacctccacctcccgggttcaagtgattctcctgcctcagcctcctgagtagctgggattacaggcgcccgccaccacgcctggctaattttttgtatttttagtacagacggggtttcaccgttagccaggatggcctcgatctcctaatctcgtgatctgcccgcctcggcctcccaaagtgctgggattacatgcgtgagccaccgcacccagcctagtattctatgtctattatttcttcataatgagactgggggaaatctttggagaattaatgccgcagttggtaaaatcattctataataatgggtaccattctgctctgtcccacatttttatgaagtctctttaaatttaaaaaggcaatgtgctttgtggttcttgagcaacttaaatacgttgctctgaatagttattgtgatgaggtaatttgtaacaacttttaggatcaatgctaattttcttaaatgtttctgtagtttcccctttattataaagtatattaggctggactcttggctgtaagtgacagaaaactcaactcagattagttaagaaacaaaagggtgttggtgacagtggtggctttcagactattgctgcaggcccacctgccatcctcttaacaccctcaacataccctgcagaaaagagagagctactctgacccgagagcttaaagactggtcaagtatgggcttgactctttatggcccaaattgggtcacatgcccacctaggctaggggaatggaatcgtggaattgattgattgattattgttgcaggttgagtcctccaagaagcagatgccagggcagatttattgcagaataacacctgtgaagaaataggggtggaagcagaattgaacaagggaagccatcagatcacaatgcagatcttctagactctgtgtcagcacaacaaggaatgccagagcaaagactgccaattagaggaatactgaattgggcagatctgacaatagtctgtatataactcgggactgttaacttctccttcctcaaccagttatagacatagaataggactctcttatctcaaacatcaatatctgtgtatatgaagtagagggtgaaagtttactgtacactagtggttctcaaccaagagcaagtctgtcccccaggggacatggcaatttctggagacattttcagttgtcccaactggtgaggaggtgctactggcatctagtgggtagaagttgtggatgctgctaggcattctctataattcgtgggatagatagcacaacaaaaaattgcccaggccaaaatgtcaataatgctgaagttgagaaaccttgctctataaagatacatgtcttggccgggcacggtggctcacgcctgtaatcccagtactttgggaggccgaggtgggcggatcacgagatcaggagatcaagaccatcctgggcaacatggtgaaactcatctctactaaaaatacaaaaattagccaggcgtggtggtgcatgcctgtagtcccagctactggggaggccgaggcaggagaatcgcttgaacccgggaagcggaagttgcagtgagccgagatggcgccactgcactccagcctggtgacagagcaagactctgtctcaaaaaaaaaaaaaaaaaaaaaaaaaaagatacatgtcttatgtgtactgaaagaggccacggaaaccttttgttgatacattcttgatagtttttgttcttatatgtagttatgaatacttgagattccatccaatttatttaacttttgaccagaaagggtagattgaattggtgaaacatctatatcctgaatatttaaaagattctgttttttaaaacaaatattaacttgaattaacgtaaatattcttagtagttaaagtccttaaagaccttagtttggtgaacagataagaatcatctgtgttcagcatatgcattgccttatgaagatggtaagtcaaaagtatgagtttatttctgatatttaaatatccctgaggtatagatttgtttactctggaagtttactctgttgtttgtttgtttgtttttgtttttgttttttgagacggtgtctcactctgtcacccaggctggagtgcagtggcacgatctcggctcactgcaagctccgcctccggggttcacgccattctcctgcctcaacctcccgagcagctgggactacaggtgcccgccaccatgcccggctaatttaatttttttgtgtttttactagagacggggtttcaccgtgttagccaggatggtctcgatctcctgacctcgtgatccaccagcctcggcctcccgaagtgctgggattacaggcctgagccaccgcacccggccttactctgttgttttatttcttcattatatattacaaagttgaatgttagggccaggttagatcggaaaacaagttaagtattccttatccaaaatgcttgggaccagaagtgttttggattttttatttttgtggattttggaatatttgcatattcctcatgagatatcttgggatgggacccaagcctaaacatgaaattcatttatatttcgtatataccttatacacataccctgaaggaaattttatacaatattttaaatacttttgtgcgtgaaacacaaaagttttgactgtgacctgtcacatgaggtcaggtgtgaaattttccacttgtgacgtcatgtcagtactcaaaaagtttcaaaatttggagcatttccgattactttggaaaagtctagaaaaagtttgatatcagtgcactgaaatcattttcaagtaggaacaatagcgatactagccctttactcatgcaaaattcacagtttttatctaaacaacacaaaatcattcaatgcttttatatttaatcatctatattcacctaaccataaaaaatcaatttcaatacagtaaggaaaagacaagaaaacgaatcattctaatcactgtattttgaaagttctttgcaaacaaccgtgaaatggttaaaagataggaggatggagaccagcctggccaacagggtgaaaccccatctcttctaaaaaatacaaaaattagccgggtgggttggcgcatgcctgtaatcccgggtactcgggaggctgaggcaggagaattgcttgaacctgggaggcaggggttgcaatgagctgagatcatgccactgcactccagactgggcaacagagcaggacgtctcaaaaaaaaaaaaaaaaaaaagatggtaagagaatgatgacttgttgcttactaaaataaaggaaagattgacactataagtgatactgtttgaaatctcaggaatctctgaatcattaagattatatcacaaatggcatgcaaaatacctgttcaaaaaatactcctcatggacatgagatgctaagctgctgatactgagtctgacctaggacaatgatgttctgtgtcacctcttttctgatgcctcccagattgctcctggcctcactgctgtctcacttccaaaaatacatattgcccttattggtcataacacagagactatcagttcaaaagtctctaattcgtctcagctgcagtcatctcccagcaagacacaaggttcttgagaaaagaaatttttcatgtcccatctttgccatccaccacacgatgaacatacagtacagtgtacatagcagcccttgaaaatgctggtggaatcattgattcttgaacccaactgtcatactttccagatttaagtcctggtaaatgattaaaatcgtatgggttaccctcaacaaaccagctcaagtatttactataaaaaagggaagctagatatggaacttcccctaaagatgggtctgtcaaactcaccccattgtattctgctctgacaccatgttttttgtttgtgttatttttttttaagagacagggtctcactatgttgcccaggctggtcttgaactcctgggttcaagtgatcctcccacttcagcctcccaggtcactgtgagagattacaggcttgcaccaccatgcccagccccaccttttaatacaaataagtaacagttaccatttactcagtgctcaccttataacagatgctgttaaacgctttacacgccttagctcatttttagttaaatacattgtttttgccccagctatggtagggatcttgctaacaatgagaatgaatgataagaggggctttaaggagaattcactgccacacctttcataattttcccatcattcctccagtctttgttcaaccgtccatgatttactgatttgctattacatcaaactatgctgcaacaaaccagtggttccttctgatttttatccatctcctcctcacctagggtgagagtctgaggcttccttgagtctactttctgatattgttacatttaacacagaacatctcttgttttcgtttctggcagcttatcctctcttcgctttctccatgctttcattcatcctaaaacaccattctgacaatgatatttaggttggtacataagtaattgtggttttaccattaccttcaatggcaaaaactgcgatcacatttgcaccaacgtaatatttttcttacttaaaaaattaatgtagagtatggaaatacttgccatcagggaatggggaagaaaatggctagagagacatggtgaaagagagacttgatttttaaataactttttttgtttttcttgaattttattatcatgtgaatgcatttgaaagaaatacaattttaaaataattattaaaaaaatatttgaatgccttcccatgaacaactaaatgaagtctctattcttaaacctgacagtcaagtacagctctggtttgactccaagctacatttctagccttgtattattcaactctttttctgtttatccttcatatccgggcctttactagtgccaaaaaaaaaaaaattgctcattctactcttgtcacccagagtgtttcttctgtttttgcccatcaaaagcttacccaattgtgaaggcccagtttcaaagcaacctccttcattaatttcatccagatactctgtaacccccatagctgtttaggcttgttctagcaatttgcagttatcagaaaaatgagtacataccgagtgccagaaagtggtctctccaactgtgcacattacaacatctcattctctgtgcctccatttcctcatctgtaaaatggtcactatggtgtactttcctcatagtgatgttcattctttcaagtagttagttaggtacctactatgagacaggcactgacctgggtcctgggggtacagtaatgaataaaatagattgagtcctgccctcatcaaatttaccttctgataagaaagacataaatgaaatatacctataatgctcttgaaatagcacttgggatatagtaaatgctctataaatgtttgctattattactgtcattgttggtagtgttgttatgtggtatttctattaacacataaagaaactaaggttcacaggctgttagataagatgctggttaaatagctagtaagggactccaactcaggtcttcctgagtcataaaattcgtggcatttccactacactgatggatgtataccaggctgtacatcagaactatctgtggagacttaaagaaagtaaagattctcaagcctcagcctcaaattaactaaatcagaaattatttagacgagctaagaatctgtatttttttgaaaagttctcaaatagttgtgatacactgtcaaattggggaatgactgcactacattaaaatctttcccataatactttattatgcttatttgtaaatatcaaatctacaaattcactaaagaccatccccttgttttcttatttatttttattttttctgcttcctctcctagcaaagtgccttataaacactcaataagtatttgagtaattaatggcttaattatttaaagttgcacttaaaatgcaaatactcacagctgtggtactggaagcctgttatgaacaatcatttatcttcctagggttatttactaatcagctaaggacaagcagttgggaaagaaaggctgactatttgggaacagaactgagaaggccctcaaaccaaatgttagccacgttattgaacagcctagggccccgccttaactttacctacacttcgttgacaatttcaggtaaaatgcagaaaatatacgctaacaatcaggagattcctccctcacaccattgtagtttcatttcttttaagccgacacatgtctctcttatggaaaatatgggaacaacctgttttaaagaaagaaaaagaatcctttattcttgtcacaccacaaacatggagttcactgctatacgttaagattataaagcaaaatcccaaaaacgcagtgactgattattcacagtagacatatgaagtcaggaagcttattttttctctctttgctaaggcacaaagcctggggctatatgcatttttattacactgtactgtgttgatttcacttgaggattaaaaagagagttgaggcacagtgcacgtatcttgatggattttaggatttcttgctttcgtgaaagaaagaagcttataaagtacctcagattatcgcccagggaagtgtacctacttccatgatgacctagaaattcaatcttttgtttctcctataaaagatcacattgtactttggatgttttccctgtagttttctgcactatgtaaagccacatttggaaaaacaaaatagttttagtttagagttgaagtgaaaatatctgaaatagttcaggaaagtcttatgagcatttggggagcttacaaacagccttgggggtggggtgagggggaatgagggaagagggaggcagggggagagaagaggagggctaggtcagaagtgtgcaaagaagacagagggagagagaccgtagagactgtgagtccatggcagagttttaattctggttctcacacatctacacagagaaacaatggaagcacattgctccatcccctgtcctttactaagaagcgtgaagtaaataacttgtggcttatgatatgcgaagaagagagaagacagaatgttgtaggatttggaagtacagtagatgagatcttccggtttattgatttgtaaagaacggcttgatactggtttgtcagttctgcatcagtgagagaaaagaaaggcgcttttcagtcacttgccagaggaggagagccgggaagtggaaacagggtcttctggcggacaagcttccttgagtggtggtcaaattgactgtgaagggagtcaaggtcaggaagctttggaaatgctgcaaggatggtacgggatttaaggagggttgatttcctcggttaagggttgttgcagacttcagcaaattcccccttccagcctttattaaagaagtgtttagtagaacaaactgaaaatctacaagtatattgttacccaaaatataaaagcttctgccactgagatgaaaatgtttgatttccagtgctttatctttttgcatttatctacctgtttcagtcattcgttaatatgaatttcctaatatatgccgtcttttttttttttttcggacaataccagttctatggtatctcactgatgattatttcaaattgccacttttgttccttggaaatactcctgtgttcaaataccaggaggcataattatgtaattaccatgtgaacattatgctacttatgggccaaaatgcccctagaaaggaatgctccaatggcctcagaaaatttctgtgagaacgatatcttccaaatgtggtataaataaagctcaagaataaatagctaaggctggaatgtaaatgatttaatgtaatgatgttgtaaggtgagagccacttgactttagttcctgttgcaaatcatgagatacattaggaaaacttttaaaagggaacctattttttaagataaaatctgtatcaagttacatcaccttccaggcaaagtaattcaactttcctcttttctctctgagaccaaaaaaaaaaaaaaaaaaaaaggcagaagaaatgcttcctatgatctcttctcttcctgtcacaattttcataagtctgtagatgtaattaaaactaaagattttgacaaatgaaacaggataggaggttgattgctgcttttctaaattaaaatgaatgatacccttaaggtacttgggtctatgaagtcaatttaatgttgatataacctgactccattatcacagaatgaggcagttgcataagcaagaaaaccaataaacaaacatccaaagtgcattttagaaatcggtgaggtgaaagattaaaggcttaacaacggacaaagagcttgctgttttgttctctcttgccttccagtttgatggcagagttcatcagaattagaggaagaatgttcttggagaagcgttgggctggcactaggctaggagtcctattcatatcctgcctcgcttgtcttgcaagcatgcacagccccttcatttgaggcactgtttgcctcagcagagtctgtgtactcttctggtaggttgtatagaacataataaagggggagggctggaggagaaaggacagaaaaaggagggaataaaaaaaggagtcagattaagaaagaagtcagcacagaaatataaaatggaaggaaaaaaagctgtgatgcaggaaccttaaaaggtagattaaggatggtctcagatggcacggcattagtatcaatgccataagtcacacaaaatctattaagaattatgctcctactcagagtgagtgccatgttagcactagttgtttcccgtgatctatcctgaagtcaaacgcaagaaacactgtttaactcctaagtgccctaatgtcaggaaaacacagaaataaactcaaaggaaagacaattcagttaatctttgcattcaacaagcccaggttgttttgccgcagagctatacctatcacaaaacttcattccagaagatggccggtagaggtggctcatgcctgtaatcccagcactctgggaggcccaggagagtttgaaatcaagaccagaacttatctcagactttttttttttttattattttttcagttacaactcaaaagaatcagaattagaataataatggattttaactgaaagggattaccattagttaaaaggattttaactgaaactgtaatcagtctcaggagcgtttcccggataatgtttgggcacgtatttatgagtgttacttgtgaggatttgggagtaagaatgaacgaggaagttcctcccccaacacagacacatgcacacagaaactgtacaaactgaaaaacttcaggacaaaaactcgtgaatagactggagagtcatttgtgtgcatatgtgtggtttatttactagcatcacagcacaagagtttctgtcttttgcttttgtttttgttttaataggctcatttgtgtaagtgtcatgtctgtttcttgcattcccatggatatttatctagggtctagacaaactgagaaccagaaaatcaaaacatacgttcctagttacatattttctctagactggagtaaacatgatttatgtatgtagtaatcagtaagatgtagcttggacactaggaagaaaccacattgcctagcagtgtatttccacatggggaggtaatgcctgtctctcctaaacttctagtgaagataaaactcaaagtagagtaattaacagaaaggtcaaaagacaaagtggaagcccttgagaatctaaaacaaagttaaagaaccaacatttacatttagataaatttatttgaaataatttctaagagccatgatgttgttatcggtcctttttctttctttcttttattcttttggcttatttaaaagcaatgttgaagaaaaaatgaaataaagcttatctttcacaatacacagaggaatggactgagctttgggaaacagtcacagcttggaattaagagtgtgtgtcgtatcgtaatttagttggatgatttggtgctcattcattatacccagaattacgctttcaagtctaccgtattcatacttatctcagtgcctgacaaataagaggaactcaaaaagcctttcattcattcatccattcagtatttcttgatcatcttctatgtactaggcattgtgataaattcttaacaagacagataagatctctgtctttgtggacaataaacttacattctagtcaatatcttttgaatgaatgtagtgatatttcttactgaagctaagaaaggaaggtctctgcaaacagtatactgtctacagaactcatctgaaatgagaagaccaaggagaataatatatagccctcataactctcaaatcttaaatatgattatttaaaaactagagtaaaacaaatgtggaggagatttggacttcagggttgttttataaattgccgttttacatttttaaatctagtattataggcaaaattgaatctaaatggttttcttcttttcttttttttactttcatcatcaaaaatggaagaaaggaagaaaaggaggaaggaagaaaagaaggaaaggaagaagggagggagggaagtttttcaaaagcttgtgtcagggatcttgaaaaagaaatgattcattcaaaatatagttgttaatagtaaagatccgtgaataaacagtacattaattcattcaactaatattaatttagcacctattatatgccaggtactgtgctactcactgaggatttagcagggaaagatgtgtccctgtcctcatggaacatataaaaaaggacctttttttcctgagatgcttttactgaagaattgctgcaacctagattatgagttctcatggaccagatggcagttttctgcccatctgggatagttctgaagaatagaccctcgtgtatcaatcaaggtttcttccagttctaagctttcgtgatctatgatctaatagttgaaacaggatgtatgcttccaaaaagatgttatatttgtattacttttataaaaggaaacagagacatgccctattaattcagaagagattgggttcctcctggctgtttaaatcattctatttaaactcctttatctcttctttcttggctcaccttccaaagctcactcttaccccttttagtctcacttccctttcctttctttaattgctgagacaaattgttcatctctaactggctatacatgacatctccagttaaatgtttcactgttaggacaaattcattatgttccaaatgaattcatacatacatatgctatttcttccttttctgattttcatattgccaccagcaatatcttcattctcccagtcttccttactcgaaatccaagagtttatttgcttcttcagatattaatctccaacaccaaattggatagttcttcctcctttcaaaataccttctcatatgtaccttcttttacattgaatacaatacagccttaattctaatgcatatcaacccaagtctagtaagttacaacagcctctttctgatctcagtctcaggtgccctttcgaatctgttttacactatactgatcttcccaaaccctaactttcctctaaaatagtgagtcatgtcacagaaattttcagtggttctctttgcctgcagggtaaatcttgagcctcagagtctgggacgccttgctttgcatcatcggctttcaacatgactaactaattgtatctcactgtcgtcctcaacaccactgttctgcagccccaagcctttcttcagcttgtcactacttcttacctccaaacctttacacttgcagagatcagggactatagcatttgttttttgcctatctctttcaatattaacaaatacttataaaatgaataaaccaccaaggaaagaactgattgtgccagaacataagacacaggtatatcatttctggcttttgcttcctgttttgtatataccacggtatattgatttaacatacagccagttagaaagatctaatgcatggaggctctcgtttaatagattatcaaatttcatttccttgcataattgctcaaagaataaagtgctttgttcctaagtcccaagctaaagctttcgaggactttggttgctttcaagtttttctcattcataaatttgtttctttatttagccagttgtgcattcaatccacacaaaacctttctccagtgataatttgtggaaagaaatattttatgcttaattcttctcgctgtcataccttctcttaagtttgagttatgaagatggaaattcactttgatctcattttaaaatcttgacaatattgaatgtacactggaaactaccactggagcgctccttgtataagaaggcaaaattcttcagagagaagattgggagtctagaatgaactttgatgctgcatcggctcagtccctatgaaactaacattcttactagagaaagtggcctatggcacagtcataatcctttaccatctacatcttccccttgggatttctttctcagtatgtgcaaagatttctgatcagtgtccactcccatatggcatcttcatcttctcctctctacccccaaacactcacatttatctctagattgatttattcatgaaatgacccattctaaatttagaaataatgacatatgcccaacatttatttgcacgcgttttcccacaacctttctctataatcttatggtatcacattcttcaagaccaggaattgaccttgcattgggccataaaatacgttgaacaactgcagtttcatcgatatgcacactagaattggtctgcattcaataaactgattaaagaaattaaaaagccaattacttattaaatatttataaaatactttttttcaactttaatcttcaggatagcagttaagagcaagacccagactgaatgagtttgaatcctagctctgccaatttactaactactgaagcttaggcaagttttttttttttaacctctcatgcctcagtttttatgtcaatgaagtcggggggaataatattaactcctattgcagagttactgtgaagatgaaataacataattcatattgtcatgccacatattgcttaataaacattagccatttttgtattgtatgtggtgccctgcacattatagtctattgctctccttttttgctttttttttttttttttttgagatggagtcttgttctgttacctaggctggagtgtagtgacacgatctcggcgcactgcaacctccacctctcagattcaagtgattctcctgtctcagcttcccgagtagctgggattacagatgcccaccaccacaccaagctaatttttgtatttttagtagagactgcgtttcatcatgttggccagaccggtctcgaactcctgacctcaagtgatccgcctgcctcggcctcccaaagtgctgggattacaggtgtgagtcaccatgcctggcctattcctctccttttattaaccataatagtagcaagaacagtagctggtaacatttattgagcaattaccacgtgacagaaactaggctaaatgctttacattgtatcatcttatttaattcccacaaaaccctataagttatattattttccacattttactgataaggaaagttaagaataatttacccagggacattgattagtcaaggttctccagagaaatagaagcaacaatatacatatgtatgtatgtatgtatatgtgtgtgtgtgtgtgtgtgtatatatgtatgtctatgtgtgtgtgaatatataaaattaagtattatctcatgcagttggagactaagaagtcccatgacctgctatctgcaagctagagagccaggaaaattggtagtgtgatttcagtcccagtctgaaggcctgagaaccaggggagttgatgatgtaaatcccagtgcaagtgcaggagaagactgacatcccagctcaagcaggcctgcagggaaaaaaggaacatgcctttttgttctgtttaggacctcaactgacaggatgatgcccgcccacattggggagggcaatctactgaatccactgaaccaaatgctaatcttgtctgcaaaacaccctcacagacacacccagaaatagtggtttacctgggcaccccatagtccagtcaacttgacacatagaattaaccattacagacctgcagtcagtgcactcagtgtcagtaggcatacttgtttgttccgcatcgcttctcttctcttctctctctctctctctctctctctctcacacacacacacacacacacacacacacacacacacacacgtaccacatttactcatttactcatccatttgtttggtcaactagtcattaaacaaatatttgctaccatatactatgtgcctcctgcagaaagggttggagacattcgaagagaaaggtaaacaaaaaatggtccctgctatcaagaagtttccaatctattgcaagacacactcatgtccatataactaaaatgaattatatgatagaagtgcttcaggtataaaccatatactgttagaatgctgaggaagccattaattctaacctgggagatgaggaagtaaacatataaacactaacagcattgatctgggagagaagtggggtaagagcattgccgagagaaggagcagcatgaagaagccacgcacaagagttatattggatggaatagtgcaggacaggcaggtagttttggtgggcttagcaggtagagtttgggagtgcagggtcataaggttgggaaggtaggtttgatatgtccctcatgcttttgtgtatataaaataaagtaaatcctgcattgtaggggaaccccacttggttatccacgtatttgggccaagcaaaaatgggcaagtctagggagagagtgaaaaaatgagattgttctggatatacactaggcacttaattgatattggaaggccagagttggtttgagaccaggctacctgagccacttttctgatgagattaacatcgatttttacctctcgggaattctgcacaccacgggaactaccccctgagttctgattgctctgtgcaagctctgatcaacccctagtttagcatggactgttcacaactaaatcaaaatccagagttagagagctaggatgcctggagccaccacttatattggattggcaaaatgccaaataagtaagtatagcatgtcacccgtaaaattattcctttcttccccaccaagaatagaactcactaagttgacagcacactgtgtcaatatattatagaaaaacctaataggaagaaaagaatggcagttttcactgcatgccccctaaaggtatatttcttaataatttccaagtccactgaaaactgaattccgaaaattagttttatcttactacccaccctattttatcccaaatttaagccttgcctgtacttctttgatacttaatatttttttctttgaggtggagtttcactctgtcacccaggctggagtacagtggcgtgatctctgctcactgcagcctccctcctgcctcagcctccctaggagctgggactacaggcatgcgccaccacacctgactaatttttgtatttctagtagagacgggttttcaccatgttggccaggctggcctcgaacttatgacctcaagtgatccagccaacttggcctcccaaagtgctgggattacaggcatgagtcactgtgcccagcccataattaaatattaatcaaccactggttaattaataattatcaataattaaatatcactcaatgatttattatctattaatcaatattgcttctttaaaaatttgtcaaaaacaatagcctaagacttaaagacaagacatgtcatttctgagattctgtagtcacctataccaaatgtcaccctccctaatgtttttgtgaaagtaaagatttgtatttttttatggtactaattgaagcagtagttcatttgtggctgccaatgagttgactgtaaaaaaaaaccaaaatctcattttaacattgtcgagagaggaaatcctttgtgtttggccttggattgataaaaacgagtctggaatactatatacggtaagtgaatattaaaactagagttatgaaatgttgctttagtgttctcagtcttggagactcaaagtatcttatcagaaaggatacattgttttaattgttcctcattatatagaatgagagaacatcatttctctccttttcctcccaggtggccgtcgaggaccgagtcaggcagctgcatgaagcccacagggactttggtccagcatctcagcactttctttccagtaagtcattttcagcttttatcacttaactttattgcatcttgattaataagaataacagttgaaaaaacaaaagaattaagagttgaattatagtaatcttttatcagatgcagtagaagcataaatcatcctgaaatataacttggttgataagttgagaaggttaggaagaggaaggccaattggatcattttgtccagtcttcagctaatgcataattgtttcctgcactatattctcaaatgttaaccatattaatatttttgagtctttttgaaaaatgtggaacactttgctcaggagccatgctagtattctctgtatcattattccaatgttagtatatgggctgctgaagcaaaaacatacttttgagtttttaatttctgcctatcagttcagttcataaagctaataattatgatatcatgtaattataatatgatcatccaatatatgttactgtgactctataattctttaaataattcattaaatgatccctgccttatgaaatgagtgacaattctcaaaagaaggcatacaaatggccaacaggtatatgaaaaaatgctcaacatcactaatcaccagggaaatgcaaatcaagaccacatgatatatcgtcttaccccaattagaatggctattattcaaaagacaaaaaataacagattctggtgagaatgtgaagaaagggaactcttttacagtgttgatgaaaatgtaacagtaaattagtaacagtatgaagattctcaacaaactgtaaatagaactaccttaccatctggcaatcccactactggttatccatcccaaagctaagaaatcagtatatcaaaagggtacctgcacttgcatgcttatcacagcactgtttaaaacagcaaagatgtgaaatcaacctaagtgtatatcaacagatgaatggataaagaatatgtggtatctgtacacaatgaaacactgcaagaatgaaaccatgtcattcacagcaacatggatggaactggaggtcattatgttaagtgaaataaccctggcacagaaagacaaaaatcgcatgttcttactcttgtgggagctaaaaaaattgataataaacatagaatagaatgatagatactagtggctgggaaaggtgtgtgggtagagggggagataaagagagggtggttaatgggtacaaacatccagttagatagaaggactacgttatatcatttgacagcagaatagagtgactgtagttaacaacgatgtgttgtatatttcaaagtaccaagaagaaagggcttgaattgttcccaatacatagacaaatgacaaatactcaaagtaatggatgcctcaaataccctgacttgatcattatgcattctatgccagtaaaatatcacattacctcataaatatgtaaaatattatatatcaataataaataaatactatgcctccaagttgaaacctcagcctatgggcatttcctttccctaactgtttgcatccttcctttttttttttttttttttttttttttttttttttgagagggagcctcattctgtcacccaggctgtgagtgcagtggcgtgatcttggctcactgcaacctccgcctcccgggttcaaactattctcctgcctcagcctcccgagtagctgggactacaggtgtacaccaccaggcccagataatttttgtatttttttagtagagacgaggcttcaccacattggtcaggctggtctcgagctcctgacctcaagtgatccactcgccttggcctcccaaagtgctaggattacattcgtgagccttgtattctccttttgttcttgacctctagccattctttttatttactggttttgctattttattaattatgtttttataattaatactaagagaaataaccttggttaactgaaagtttaagtattagaaaatcctatttatacaatattgcatattaaattggcaagcacctgttttcctctgattaatgttaatttataccactttttatttgattataaaagtatatgtgttgagttttttggtatttaaaaagccatactttaccacatggagttaacatctgttagcattctgatgtatttccttgtggtcatatatgagtatatatgagggtttatccatcattttaacgcaattactttgtgcctagaaatgttacagattttaactagtttaatccttatagcaatcccttcaatcccttaaggtaggtaccattattatacccatttcaatgatgaagaaactgaggcacacattcatacagctagtagatgagggagccaggattgaaactcaagaagttggctccagagtctgtgtttttaagcatcgcactgtaattttacttaatttatatattttatagagaggaagtaattctgtatgatctccattcttctgccatattctttcattgccattttctgatcatttcctttcttttccattctccacgggttaataaaaagatccacgctcacaaatactttaaagtatttgagtagatgttgtcatgtgtgtctccagttggctgttgtctttttgaacaaaatttcctggaaggtgttggtcctgtgtttttgtcatacatcgataatagattaagaagaagtatcttattttctggactggctctaactttattatccgcatgtggtctagttatttggacacagtttcacaatgctttggagttgccaagaaaaagggataagttaaagcagtttatctaaatgagtgggatcgtggcttttaggaacggctctagaaaaatgataaaggctacagatttcgtcttctgcatctttccaaatctctggtctacttaacttgccttggtgacagccattctattcgatttaattgagattaaatgtgataacatactcctaagcgactcataaaccataaataaaaaatagtactattatgaatattaattactcctcagacaccaggtatattcattcatattttcttctccctgactccccctctgaattcccatgtcttacccattaaaacctattttcagaaaatgatatactcatttaacccaagtgataggtaaagtttaatgtgtacttctcctgggttatttgcattttattagtgtgaaaatccataagcctgaggtggtagaacatcggccataagctctgagctgtgaggaaggaactttgaggggccaaggggagcattctcacacctttcaaaccatatcacatcagtgcccacttccagaaaggtcaggcctgttagacacaggtattcataaagagactgatctacctgcctgaatggagccagccccggaagtcatcagtctcttggatgcccatgtggaatatcaatatacgcttaaaagctttgcttgcaggtataaagaaaataccaacttggtttaagggatatttaagaaataggacggtgagactaaggatggattgtttctttacattgtactttttaaaattacaaaggtactctatacacatcaagaaaaatttggaaagcccacagtacaaacaagaaaagaaaaagtatccataatcctatgactcagagataatcactatcagaaatttggtttatatactttctgtatttctcttgtggttgcgtgtgtgtgtgtgtgtgtgtatcaaggttctatcttttatttttttatttttttgttttttgagacagagtgcaatctcagctcactgcaacctcccccgtcctgggttctagcgattctcatgactcagcctcccgagtagctgggattacaggaatacgccaccacgcttggctaattttttgtatttttagtagagacggggtttcactatgttggccaggctggtctcgaacttgtggcctcaagtaatccacccactgaggcctcccaaagtgttgagattacaggcatgagccaccacgcccggcctctctcttttcttttaaaccatgcgcagataaaaacatgctacagttttatgagctgcttttttcccttaaaactatctttccaatattttcgtgtgtttaaatattcttcttcagagtaatttttctaatgactggctaatactctcttctgtggctgtaccaaatttaccaacacaattctaaattgctcaatataaagattatttcacaatctttattatatcgagcattatggctaatatcctttttatacctttacaaatatctcagattctttctacaggataaatgcctaaaggtggaattgtcatgttaaagaatgtttacattcgtaagccttttcaagtgtattgccaaacttacctctagaaaattgcaccagaaattgggtgtgccatccaaaccgtatttgagctaggcatggtgtggctcatgcctataatcccaattctttgggaaactgaggcaggaggatcacttgagcccaagaggtcaaggctgcagtgatccataatccacccccccccgcactccaatctgtgtgacagagcaagaccctgaccctaaatttaaaaaaaaaaaaaaaatcaccatatttgaagcaggacatctctgaagtcacgtatttgctactataaaagcagcttccccccaccaatgaataaaaatatgttttaaatattcctctaaggtcatattaaatgaatttgaattgatacttttttttagacaggcctgagttgatacatgtttagtaatgtgctttcaggttactataaataataatagggtggctcctaaagcttagaaattacaaagaaaagaaaaataaggaggaactactaattgcacccgccagcgtaaacatgcttactgtctctgtttatcttattctctctctctctctgtctcgcacgtgtgtgcactctctctctctctctctctcacacacacacacacacacacacacacacacacacactcccctttggaaattatttggaaattacattaccagctgtctgttgtttatcagaagacagaggcagccttttactaaaaaaaagaattcactgtttcttcctggtggcccaatctctacatgttaaagaaattttttcttttatcttagatctaagagaaaatgagaagagaaaagcattgtgaaatatgacccttctccgctgatagacactaacttgtccttacttctagttttaatacactgctactcctaattgacttctacaacttaaaccaagaaaaaggagaaattctaatagtgtgacttcaaatatgtatataatttacaataaaattatcatttaaattatttaaattatatactaatttatagttatatatgtataattggtaggtatattgtcagtctcttcatatgtctgtgattaagaaagtactaaagtattcattggttggcatagtagtctgaaaattgtccttttcttttgaagagtttaaagatttgttgggcgtggtggctcacacctgtaatcccatcactttgggaggctgaggtgggcagatcacttgaggtcaggagttcaagaccagcctggccaacctggtgaaacccccatctgtactaaaaatacaaaaattagctgggcgtggtggcactcgcctgtaatcccagctgcttaggaggctgaggcaggagaatggcttgaaccctggaggtggaggttgcagtgagctgagatcatgccactgcagtccagcctgggtgatagagagagactctgtctcaaaaaaagaatttaaagatttttcctgaccattatttcaattctctggtcttctgttctaaattctacttttctcaccaagaaagatcactatatatttgggtaaagggagaaatcattctataacagtaaaaagaatccatggttttcttaatattttacaagttccagaggtcccttaaaagaatattttccaagccaggttctttaaaacattaatgttatattaggttttgataactgtcccttgaaaaaaatagtactgattaataagattggaaaaacactaggtttcaaagataagcaagtttatttcttgttagaattcttggaatttttattatacactgagactctaagaggataaggagtctatagttctccagttttaggtgactgtggaagcctttttcaggcacaccagttaatttcacactaaactttatgccatggatcacagtgaatctttgccttaatgtggtatttgccagatgctttaatgacaaaaaatttctgctaaaggttgtagaaacgtgatccaattaaaaagaaaatgagtatttatgaggcaaaagggtcaagtccctctctttactgaagttcccagccccactcccacccaggagccctcttgtgctgtggagtttcctaactggagataagcttagaaagtatctataccagtagtttccaaactctgaggtgtggctcattagcaaatcctaaaatcagtttaatgacttacaaccaacaatttttgactggtatggaatggaatggaatggaacagattagaaaatatcagagtgcattacctaagcaaggttaagtgttgttttggcggtggttaatttgttagatatgtgtgtacatgcgtgtgtgtgtgtgtgtgtgtgtgtgtgtgcgcgcgcgcacgcacgcgcgcacgccagatcacagtgtaaaacgtttttcttctgtgggttgcagtcgaaatagtttgagaaacattgaatcattcgagccctttccttattttacagataatgaaataggtgcagaacgatcaaatgacataaccaaggtcacaaagatagttataatactgggactggaacccagtttctggacatccaagccacacatcacactgccttacccgttaagaagaaatgcccaggccaataactgtctagtctatctgctattgccaacgattattctctcgtatattcctcttcgtttggccatcctaagttgatttacataacctaaatttttctctcaacacctctgggctaaaaactgccttatcaaaatggtatcgatagcggttaagagtaaaagctgtaaaatgaaactgactgggttcaaatattgactcagacactttatgcttttttctttctctttattcttcatctttaaaatagggataatagtaacatatttggtcaattgtaagacacacttttccacccacgtttcaacagttctgaaatcagaatgcaccatacgaccaatgggatattgaattcggtgaaatatggctgtattatttcatagggttacagtgaagatcaaacagttaatatttgtaaaacccttagagtagtgcctggaacatagtaagtgctattcaagtgtttgctattagctttagcattagtatcattattactatcagcttgatagtataacttaatgcatgcctgttagagtcaaactagtcatgaaagtttcattcattctcttgcatttaatggtcagtataagtagttcctctcctttctgaagatgatttccaaggatctaatctgaaagtccagtgttttgcacattagaacggctcaatagttgtttgtataactaacgagtgataaataatcaaaaagatagaccttaatctctaaaatgtcaggatagtattagtcttgttgacagttatattctacagtacctaatgtggtatgtggtacttggtagatgttcagtaaatatttacagaatgaattatgtcttatacccaaaagaagaagaggtaaattcactcttgacattgataatacacagaggcatgagatttagcatagtggctatcacatagtagacactcaataaataatgtgaccttttctgttgcttctcagcaaagactaatagcattcataactttatatggtcgtttttatcaaagtcgactgtaccatgtaatacattaagggaaaaggctgacttcaaaattacagcatgatcacaactatattacaaaataaaataaaaataacagaaatgtacacataaaggaaaaatggaaaataaaaagataccaaaagacaaacagttattgcatcatttctttctttttacttttacaaattttctggtaatagcatgtactacctttgtaatggaaaaaaaacaataaaggtaacattttatactccagcttttaaccagtgacctcttgcagtggcaatgggactctgaaagacaaatttcctttttactatttattctgaatttaaaagctgtttcattgagtgaccttctcagattatgagacactgtaaaaagaaataactgatccattatttcttgcaggctttacaatcttaactgccttaatcatatccctggttaagtctttttctctcttgtcaaagtgactcaagcttttacagtttctccttgatacatagggcctagcagtttgtttctatcttgagagttgccaagctttcatcctggacattccccactacacatacacacttaattttaaaaaataggggaaacctttaagcacatctaataattgctgacatttcacttaacagtgctccaacctatgctaccagtgtcctcaggggacagacaatttgaaatatgagtggggcaataatttaaagcttcagattggcttaaataagccatcatgaggccgggtgcggtggctcacgccagtaatcccagcactttgggaggccgaggcgggcagatcacctgaggtcaggagttcaagaccagcctgaccaacatggagaaaccctgtctctactaaaaatacaaaattagctgggcgtggtggcatgcatctgtaatcccagctactcgagaggctgaggcaggagaatcacttgaacccaggaggcagaggttgcagtgagccgagattgcgccattgcactccagcctgggcaacaagagtgaaactgcatctcaaaaaaataaaaacatcaaaataagccatcatgataaaagtcagaaagaattttgcaggtccaatgtgagatgatttgcaggctaaaattctctttcaagtaaaatctcagggtgaaatgatttgagccagtttcttcagcagtcacatgttgtcccaagtgttaggaatttgggacaaatgccatgtgacctaccagtgatgctgataatgcccctataaattcaaagacagcctttccaatgcccataaaaagcagctacagcagtaataattatattctcttcttaaaatgtgttgtcatggcccttttctcctttagctcaaatgtatactccccaataagctctcagatttatttgctttacagtatcattagcaaccagattttgcatcgttggccctatatatcccatcaatttgaacacatgaggaaacagaacgtttttgtttctgctatgggaatttctgtgctggggctggcttacaatggctcaagagagccaattgtaaaatatacaggaattgtgagctagttattaagcctacctttggtagcttgaaatcaggcatagtgggaagatttactccatggaaattggcaaatactacaaattggggcactttgttttttttttttttttttttttgtgcatagatggtttcccagaaatgactaatttatctatgttatttggatcactcaagtccctgtaggcaaagaatcttcataaacttagcaggaaggatgctcaggatccaaatatttatgtgcgttgcagagtgaccactcatcctggtttgtctgggactttcccggatttagcactggaattcccattttccaggaaatctctgtagtcccaggcaaaccaagatagttgctcaccctagccttaggtaaaatccctagaagtagagccctatttagatagatggggcttcttgtagaagtaatttgttcaggtgaaagggagtgagggaagcaggataaagtaagaaggatgctggtcaaggagttaagtgggaaggaagagactcacttcagcttgatcccacagggagctctggagaacaaattgtccctactttgagataaggggcctgggctttttgtttgtttgttttgagatggagtcttgttctgtcacccaaactggagtgcaatggcgtgatcttggctcactgcaacctccgcctcccaggttcaagctattctcctgcctcagcctcccgagtagctgggactaccgcgcctggatttttttttttttttttttttttgtatttttactagagacggggtttcactaggttggccaggctggtctcgaactcctgatctcctgatccgcctgcctcggtctccaaaagtgctgggattacaggcgtgagccaccgcgcccagccagggctgggcttttattttcccgtgtgaattagtcattggctgtggatttctggggagtaggagatagcaaagcagttcccatttggccaagggaggatttctggtgaaaggaccaatgaggccttagcaaccaacactcacaacaactgcggctgggtgaaccagctcagtaaaagggatctgagtggaacaacaatagtattaacctctcctagactttatgaagctgctatcataccccatgcataatctggctttagagctgaatgggcgcatttagctggatcactaaccaccactccttcgtcacggacttacatggaaattagcccggtggcatggaagagatgagacaaatgtctgtttctttcttatttcatcttcctcattgtgacagattcttctgggcctcatgaggagctagggccaagagaccagcaccagagttctgaatcagttttataacatgggcactattttggtggaatgctggctctgaagggtgtatttttacactacccagaaaatgaaggcatttgtgaatttggcctggggtagcattttgtcatctgtccaaaatacaaagctttgcacaacagaaatagtgggatcacatccctgtgggcaagaatcattactttcgtttttccatttggatgttttccattttcagaacacaaccagtttgggattacaaagtactttctggtgagaactttgaagtgaggacaaaaggcattttgttctttagtagacttacataaactgttcctggtttaaaaaccattctagatttttaaatagactttcagatatctgcagtaaaaatcatcttgatttcaggcgactgcaggtactgctctgttatgtgctatgtctccttaaggctgtaagggacagggataggcttaggtgataaggaacattttcaggatacagagaggcatgaagaataacatgggccgggcgcggtggctcacacctataatcccagcactttgggaggctgaggcgggcggatcacgaggtcaggagttggagaccaacctggccaacatggtgaaaccctgtctctactaaagacacaaaaaattagccaggcatggtggcgcacacctgtaatcccagctactcaggaggctgaggcaggagaatcgcttgaacccaggagacggaggttgcagtgagccaagatcacaccattgcacaccagcctaggcaacagggcgagactccatctcaaaaaaaaaaaaaaagaaagaaagaaaagaataacatggaacaacagacaccacgaaacatgtttgcttctttctgtatatgcatttgctgccatagacttcagactattacagtatcatatcttctctcttctctccacctaacaccttctacttatagtttctactttcttatgacttccattttcttcctttgttatccgactttttaaacttccccacccatctgtcatctctgtttatctctgtgtattacattcaagctctccaagacaaagcatctgattggattagttatttattatccatctaagggtaatgccatctcacaggccacaggccagactgtaaactaggctttcttgacctgggcactattggcatttggggccagataattagtggaatgctggctctgaaaagtgtatttttacactactcagaaaatgaaggcatttgtgagtttggcctggggtagcattttgtcatctgtcctagaatacaaagctttgcgcaacagaaatggtgggatcacacctctgtgggcaaaaattattgggggctgtcctgtgcattatctctggcctctactcactacatgccagtagcactcccctcccttagctgtgacaaccaaaaatgtctccagacattgtctgtctgatgtcccctgttgggtgaaattgcccctagttgagaatcactcctttataccaatgcctgcacaatttgtggtaatgaaagtcatgtggaacactaaatacagtgacctatgcctgaggaattatttgaagttgcttttctgcatccttagggaccctttagtctctcgatgaaagggagtgtcctcagcagacaatcttcaggaattgcatcagctgcctcacccaagatcataccccttacaggggcagctcttcctgatcagtgtaggggaataatgacctggccattttggcccaactcaggagaacattaacattctagctcaagagctcccatggggttgaatgagactgtcactgggtctgcattcaccttgacttctccctatttctattcctgtttctttcacttcccttccacagttgtctatcctgctctctaatcattgccttagagttggcttcctggaggaagccaatctgtgagggggcaatgaaattgacaggcatttagaagcatctaagaaaaaggtattataataggcccattacagtcactgggtaatttgatttactcttgctttcataatgaggttgattattttgttcaggataagtagtgattattattatttaaggtgtccaacctcatgatctccattaataggtaaggactttggggacagcataaaattacatgaatctcttaccttaaaccttaagctcagcagcatacatgcccatgacaggcaagagttagaacgtaagatggtcagtaacatagatcttgaaaggaaatatgttggagtgtgagcactttaagggcatagggcctgcattacttttttattaaaaataattttgcatctaacacaacatcttgcatattagatgcaggatatgccttgattgaatgaataactgggcacttaaaagattgttcccagtctaataaaatgaaagaacttagcctggtgcttagtctaatgtccagaaagagttaatgaacttcactttatcttcagtcagttaagaattgattcactttgttactcaacaaatgtctgttgaatgaccaatgtaaatcaaactctgatctaggaactggggaaacggcagtaaataaaacaaagtttatttattgtggagcttacattttaacaagagaagatggacaatcaggtcatgataagtttgatttaaaaacaaagaataaagcaggctaaaggggctagaggatgggagaaggggacccttttagtggagtggtcaggaatggtgacatttcagtagagatgtgaggaagtacaccagtcagatattgggggacaaagtgttccaggtggaggaaacagtaaaagtaaaggatccaagatggagcatgcttagagggtttgagaaatattaatagcaaggaagccagtatgactgaagccaaggaagaaagatggtgaatgataggaggtcagtgagtgaccaagggccagacgaggaagggtcttatcaactatggttggctatcgttaaaagcctttggcatatatgctttgtgagaagggaagtcatagaattctgagctaagaagtgacatggtgcctgtagcattgttacttactgtgcctgtagtattcattcattcattcctatatttattaacaaaaacgagtcacctgaaatatgaagataaaaagagaattattgccttgggacatttaaataccaatcacaaaagacagacctataaaaaatgacctcctacagtggtagtaaatagtgggtgcaatgggagtagaatggaagggaggaatccattccacagtgagagaaaggagatgttctatctagttgagtattaacgcatattgtccctgaggctacatgcaaatccaaagtagagggtattccttttgataggaacttagcaaagaatgtttataattgcttggtccctgatctcacctagcaagagtcacaagatgcattcagtgatgaaaaatcagtttctcccttctacttagccattctgataagatgaatatctcgggccgggcgcggtggctcacgcctgtgatcccagcactttgggaggccaaggtgggtggatcacctgaggtcaggagttcaagaccagcctgaccaacatggtgaaaccccgtctctactgaaaaatacaaaagttagctgggcatggtgacaggcacctgtaatcccagctacttgggaggctgaggcaggagaattgcttgaacccaggaggcggaggttgcagtgagccgagatcgcgccattgcgctccagcctgggtgacggagcaagactctgtatccaaaaaaaaaaaaaaagatgaatatctccctttccagtttcgtgtgtagtctccttaccgcccttctgttcagaaaagggatttcttacgtatgtataatgaatataaatataggttttagagagcactaatgttttaatgagatagaaataggcagacgagagagaataattgaaggattagtcaacatgagggcaatttgatagggaaagaaaaagtctgagcaggaaatgtctgtggaaaaaaaaaatcgaagaggaatggaatgaaatgagctcatttatggtgtgagttagggacagaagggatttattctcaggaggtgaaaagtgaaggagttcatgttatagaattcgacctagaccagctatcaagggaaagaaagtaattcaaaagacttggtccaggagatctggagcagatacatctattagaggaagattcagttttgaactgcatcttcagttattcctggaacccaacacaaaagctcatgacaaccttgttatcttcaggcaaaaaaaaaaaaaaaaaaaaaaaaaaggcgggggcagcaaggcttatgtcttaaacaagacagcacataacttcaggtcagagaattccattaacatgaatcacccacaccaatttaaataggaaaaaaaatagtaagcttggttatgtaaaaatttagtttaaaaatcagaaccaacaattgaaattaaacaagaatgttttatttatttctaaaaatatttagctatttattttgaattctgaagcaatactaatatagtatataatgataaaacacagttgattttcatagtaaacatcagcatcagaatgccaagaggaagatttgtctccgttcatgttttattactctgagaaccgcgtaacattttttaaagagtcagaaaatggctagaaaaagaggaagaaagattatttccttaactagttccctggtcccatgctttggtggttaacagtcagtttaactctagaaccatggaaagtctctgtcactttcctggttaccctgggattcctcacattggcagtaagttcgtgaatgagataaatatcctgataactagctacattaatgatgaaaataattataaacgtaggagttggaatttttaaaaagtatcgagcgctctgtgctcttaacacagaggaagcattttgcatagattaacccgtttaatcctcacaccaacctttaaaataaggactgttattgtctccatttcacagaagagaaaactgagactagaacaatttactaacatattcaagttcatacttgtaactattatggattatcagccttagaaaaggggttccagacaccagtgaatagcaacccacacgtctcaactgcacagaccaaagaggatgataatccccattaatctttgcatgttagtagaggcagtggctagtaacaaatgggagagactttggctggaggatattttttattctttaatctttatgatactgtttcccctctccccttctctctctactcctctctctgtcagctgtatccacaataatgccacaatataactactatacaagaatataaagcttctgttctcatgcttatgggtctacaggtcaactgtaattcgggtgatctggataaaacttgactggaaagctctacttcatactgaagcatgcctgggttcgcctctaggctgtgagttcagtttagatggtttctaaatgtgttgggttgtgagccccagactaaaggatcagaagcaacctggggcatgttctcatggcagattgccagtgtgacaagcctctgttcacatcatatctgctaaagcaagtcacatggtcaagcaagccaaggtcaaggagctaggaagcacactgcgctcaccatgaggccatggctaaggtatacatgtttagttctttcacaactgagtgaaaaatgggccccaaattcaatctctcctatactctttttgcgttaattgctagttctttctcactcttctcgctttctaatggatgtacatcccatctatgatcatttggtttttaatatctgagttgctccctactgtctcaggtttcaaattttactttccttgaaatttccctggtgcctaatacaatacctttcacacagagagcgttcagcaaatggtgtggactgcctgtcgtcttttaaaagtacatctgcagagacagtaaaggcacctggcgatattgcattgacttgttagtaacctgacttaacccagatggcccaaagactgtaaccaccattacctggaggaaagttccctggtaatgcagtcagccaattatgttcgaatttactcgaaaattccttgagcataaattattcatggctctatttatgtaggtatctatcttcctatatctgaccttaggaagcttgattgctttcttactcttctaataatcaccgtgatgtttttgaagttttctataagtcggttagaagcagcttttttttctttttttttttcatgagtaatgccgcccaactttggctattagactttgtgtgactgtgcagccatcagcactggatattagatatagttttatctctgcaactcagtcaccttgccaagaattttagtatgaactcttgacttcccagatcaaatgtgagcctgatactctaaatgacttggcaatctactgacaaatcccatggtgtggtattctgttcaccatgtgcaatggtctcagagctcagcattatctgtctgacagctcatataatatttacaggttgttattcgttaggaattttagttagccataaagattttcacagctatggcagacattagaggtctcattcatcactcttgtgaccttcctctctggaatgtagcccatctgtctctgctgttgaaatctttatggaaagtctgcccatctttgaaagtttagtaagtgatcttaaagttttcattgaatctttacttttgatatacgatatagacatataaagcactatccttattttaatttaacgttttgaaaagtgttaaatttaacttggcctttcatttaaatgacagaaaacttactcttgctacaggaactatatgcgtcacatcaaaagaaaatagaaatcatacagaaaaaaattggaatgggaaaaattacacatatatacatatatattcaacactaataactacatgaaagcttaaatactgtattataatcctgattatgactttaggaaatgaaaacgatagaaatacattttgcatataatttaacgttataaagaaaccctaagcaaattcagtaatgaagtgaactgaataggctgggttacagagcacaagagagggatgaccaacaatcagatgttgcccctttccatttctgttttcctctttttatacacaacttctcaaatgcttgcttcccctccgtctactccctccttcagcctctgatcactagtgtgaaattgcccttttgaggtcaccagtgatcgtgggatcaaatacatcttcttcttctacacccttagtctgtcaggctcaagaattgcttatacttcaccagctaggctgttcttgtgtttcatcccactttattctagcttctgtattatttttctttgacagcagttctactgccaccgccatttgggggcatttgccagggtacattcccttttgttttcctccactgtactcatctttttttttttttgtacttttatagctttcttggggtataattatatgcaaaaatatgcatatttaatatatgtaatttggtaagtttggacatatgtatacacccaagatactattgccacagtcaaactaaagataacgaacatattcattacctacaaaagttttgtgtccctttgcttttgtgtgtgtctgtgcatggcaagaacacaacatgagatggaccctcttttttttttttttttttttttttttttttgagatggaatcttgctctgtcgccaggctggagtgcagtggcacgatctcagctgactgcaacctccacctcccaggttcaagcgattctcctgcctcagcctcccgagtagctgggactataggtgcgcgccacctcgcccagctaatttttgtatttttagtagagatggggtttcaccacatcggccaggatggtctcgatctcttgacctcgtgatctgctcaccttggcctcccaaagtgctgggattacaggggtgagccaccgcgcccggccgaggtggaccctcttaatccccttaagttttaagtgcactacacagtattgttaactataggcactatgttgtacagcagatctctagaacttactcatcttgcataagtgaaactttatactcattgaataacaatttctcgtttcccctgccctgtcttctggcaaccacttttctatttactgcttctatgaggttgactatttcagacacttcataaaagtggagtcatacagcatttatccttctatgactggcttatttcactgagcatgtctgcaaggcccatccacattgtcaccaatggtaggaaccttcttttttttaatgctgaatggtattccattgtatgaaaatgtggtgtatacatgcagttctctttgtacgatcttccttccttaaagagtccagccattctcatagcatctgctatgattctagtacttatggtcttgtcctttcacttgcatttcagtgaaaagaaccaaacttatgctgatgcaaatacctgtacacaaatgttgataccagctttattcatgattgccaaatgctaatcagtctatgggcctctgattttcactgcataaaatatagactaatctgtttatcattcatgctgatgaatggtggataaatggtctagctaagaatgaaagatctgttgtatagatgtcattggtctaggaagacagagatgtagaaagaagtaccataagcccaggcagttagatactattcaaaggcatttctctctgccatactttatactacatgtggcacattaacagtagttaggagtggattcaaggctgcagataaatgctgcccaggtgagagagaaagaattggttccacaattaaccatcattcagacaacacatcatagctatgtgattacaaacattatttgtgtggtgattaacattttacaaagcaatttcatattgatttcctcattttatcctgacaacattttggtgagggagatatcattattcccattggaatataaggaaaataaggcttaggcaggaaaaagactagcttaagatcatgaagtgataggggagtcaggactcaaatccagttcttctgaatctgtactctggacattttctgctatatccagctccctctcaagatgctggattgggctttgaaatagaaagccaacatcctgagtgcctttctaaactctgagttttacagtctatcaggggaagaggagagtgtgagaggaatgttcccaaataatctactgtatcaagcagtatatctaacttgctttgagaattatgccaactaaatactattgacctgcagaaaattgatttttctctttacacttatatcaataaagagaggcttctgctgccataagtgtaatttatgtaaaatgtttttaaaacattcatagcctttaatcaagtaaatatacttctaggaattttgctttaaaaaagtaactaaaatatgtgcaaagatttatctacaaagatgttcactgtggccttacttagaacagtgaaaaactggagacaacttatatgttcccaaagagggaatttattcaataaatcatggtacatccataagtgggaattttttagcaatgaaaaatctgttgtaaccctacaagcccactcttaagcattcatcttagagaaatgaaaacttatgcttatgcaaacacctgtacacaaatgttgataccagctttattcatgattgccaaatgctaaaagcaacctaatgtctttgaacaggtgaatggataactaagctgtagtacacccatataatggcatactacttagcaatgaaaagaaacaaatcgttgatacagcaatatggattatgcattatgctgagtgaaataaaccagtatcaaaaggttacatactgtatttatatgacattctggaaaagacaaaacaagtctagtagatcctccctaatgccttttgttcaaccccagaggtgagttttctattttacctccagtgattgctgtatcggttatttatctaaactgtccccacttttttgacccacctatgttatcaaactccaaatccaccaagtatgagaaaagtagagagatgaatgaaggtatttgtgttggaattccagaaagtgctcttttggcatgtcttaaaataacattagcattctttttaattttctggttaggcccctatgttgattaaaatatgacttaacaccagggtgcatcacttggaacattctgttcatcatgcatttaaaaacggctgaaataacaacttcccctaaataatgtggcctgtgcttgtgattttcaaaactaccttgggcacaatattgaatcctgtcacctcaaggaaggaaaagcatttgaagatagaattgctaccctttcttgctcttaataacatactgtgtctgtaacacaaaaggaaattcagaggttggttttgcaataaataaatgcatgtgtagtttgctatctaaattcagtggacaataccccatgatgctggtgccgtatgataatggttgatttgtacattcaagaatctgaatcacaaagctgccctggaattacacgtagtggttataagcacatctgtataagaaaataccaaaggacaacccggtgtcatatagaaactatttgccgataaatttgcttttgatgggctactaaaaatggacacatcaggcataaaagatgtgtgtgtctattacgtaggctagctttatgaagaatgacaagcttccactggtacactgagataagaaacagctgttgttggcatcagtactgctacaagaaatgaaaaaattctgtggcacacttgtgagcactgccacatatttgatcaacttttgaatagatggaagaccagaatcatctggcagccccaaatgaaattgtcgacaacccttaagaatctcttgagaaggagcactgaacccaattccgtagaactatcatccaattgtgtgttatttctaaagcaagtagttccagtgtgtgtgtatgtgattatgatggggcagggaaggaatgaggggaggctgttgttattttcctttttttttttttttttattgtgtcaaggacatttttgagcataaaattgtaaggtttcaaacaatgactgcaaagcagttgcttaggtgaatttataaactgtgaatcaaaggggaaaaacatctttcagaaaaaaaatacactgaatctcaccattggacctatttgatggctacacataagacaaaaagcttttttaaggaaaataaatgaacacttaagaactgcaattacaaaagcttgaaatttcatattgatctagaatttataatatttttaaaattctttaaaaatattttcagctatttagttcaagcatattctgataacttctctgacatttaattgaaaattttccccttttaatgtaaacataaaaagtcaactctagataccctacgtaggtcttcccattagctcagccaggcaacgccaattttcctctgtctctcgctgcttagaggttgtttctttcaggccgaaagcccctaagccaggccaggcagccagcagccctctccagcacacttctttctgagagacgcctaagaatagtgtaggaaatccaaagtgattcttctgctatcagaggatggtctagcatcctccaaattagaaagaatttctggaccactagaatgataaaaaaaaaaaaaaactagaaaggtataataagagaaattgtgaggcctcagcccatagatacctttaaggaaagaatagccattcttttctcagtttaggtattcacaggcttggcattcacagccagtgagggctggaccaagagctctctggagttctcttcttccttttatgatgctggtattttaagaagaaggtacactgagcagccaggagctataatttctggctctccaccatgtttcctgctatagagggctagctttttaatatttccataacaacagactctgaccagataggtcaggaagtctagcccatggtttgtttgtttgtttgtttgtttttcagttggagttttgctcttgtcgcccaggctggagtgcagtggtgcgatttcagctcactgcatcctttgcctcctgggttcaagtgattttcctgcctcagtctcccgagtagctgggattacaggcacctgccaccatgcccggctttttttttttttttttttttggtatttttagtagagatagcgtttcctcatgttggccaggctggtcttgaactcctgaactcagatgatctgcctgcctcagcctcccaaagtgttgggattacaggcgtgagccaccacgcctggccttagcccatgtttttaaatcagatcttatttactctgtgaacttatttggacaggagagctgcatcctacagaagaaaaaaggacaagagaagagttgggaagagaatgagaaaggcaaagatggaaagggaagcagggaaggcaggaggaagggaaaagaaaggaatagagaaagaaggacagaaagaaatggaaagtcagagactacttcaaaacagcagctaaatgtcttttttctctgtattaaaaatttccgtctgccaaaatgaaaaagcataattaccggccaaatacaaatccatttcctatatcgtttaaatgacatatctccaaggtacaaaacagcatgtctggttaaaggttgggtgatttgatccctctattactctatataaaacaaagaagctggagtttcattacgcttaaattgtctggcagtgggtgaagttaacttttattagaagctgttctttcatattatacagtgtagtcgaggatatattagctttgacgttttcttacatctcaatacactgcggagtgaatttactgtgagactaatttaaaagggagtttttcataggaggaaataatggtcagcatcagctgtgcttcaaattattagcagaatgaaaattcaggggaaaaagtatagacacataaagttgctagatattaataagaatgcgtcttttatttctgtttctgataatattctgtgtttcttaaagctccagtgtcttaaaactatattcaggaggaagattatattgttgaggaaatgttatagtgcctcctcaacaagattattttgtcttaaagaaagaaaaaaaaccatcagatcaaacagtatataaaatatatttgtagaggttcagctttagggaagaaatcctacaacttaagcctgaaaaaaaaaaaaacaatgcaaagatcattcatttgaccaatacacagtgaagtcataataaaacaaattcctagtatgtgaaatgaaatttcacgtataggattcatcactcataacaaaagtcttattacgctctgatatcagtagacattccctcacttttggtcaccttttctaataagatcacactggtcagctgacattttgaggcaccaaattaagcatctatttggtaagtgaatttggattctctttaaaccaataaagataaaaacaaccatatcagagtgataagcatattactttagcttcaataacttagaatgtaaatatatcacagagggatatttcagctactgaaataataaaatccagtcagtcaaatagtaaaaaatattgagaaccagcaacaggaagtattataaaaaaaagcactcaagggagacacatacaagaaaccccgtcagtctactcattcagtttcttatctgttctataggtttagcagtggaaatgtttgtgggttttttttttcttcgcatttatctttgtgcctgaatgagttcagtttcgcttagattaggacagaaatttcagaacagcaggttaatccatcctgtcttcatgggcagctgagcaaacagaccaatatcagtgtaaaattgtaattctggagattaatgttgtctttcctgtttgcgatgaatttgacctccttgcctttctttttttcctcccttcttttcagcgtctgtccagggtccctgggagagagccatctcgccaaacaaagtgccctactatatcaagtaagttggaagtatcacatttttaaaagagcatttattgtgactaacctgtatattcacaagtgagtttatttttaaaatgcgacattagcctggcctacaatacctgtgtcttttttttcctgaggaagcttggataaaaaacttattctaaaattaccattgtaaatttgctgatgcaatggggaacgacttttaagaaaagtttatttaatgcaggatatatggtgtgttttgtgacagagggggcggatttttcacaatagaaccaaaagctccagataattttattgatagtgggagtcaatctttgcgagaacaatttcttttatttaggggttttctcacatttcttcttccgtcaaagatagaagatttccgcagttatatgtacacaactgttttgggtgaatgaatactacatgtttccaaaaggcagaaagcagcagtcctcgactcgtagggcttagttgttcattcttgatacataacactcagtatttgtcacctaacaacagaaagatactgttttctggaaacatttgtgccagtcaaaagaatacgagtgcttggaagcaccttctgtagtattttgcatgaaatataaatgacaatacattgggtcaacgtggaagagagaggagagaggatattgagtgattacgataccttcacagtctctcatccattgtgcactagagtctaacttaaatttaactttgaattggaaacctcaacaacaattacaatttactgggttcataaaatagtcctcgataccaaccgaagtctttgaacttgcttctgccatgagtctgactaaaaatattagatgttttcccatttttttccgcctgccatcttttatcgaatctgtttttattctttcactgtccatcaattcttcttaattcggttctaaagcaataacagcagtcctagatcttcattactacagtcctcaagaaatttgattttatgcctctattttgttaactcagaaaaatgggagtgaaggtagtcttttgactctttcaggagaaatacatactttaggaaacggtttaccatttgtcttattacatttttccagatgaggtatctcttaacttgaaaattcttttttagtatgtttgattctgctttttagttttcatattttatgaatttaattttattattgttatatttaattcattagtcactcaaaactgtacattttaaatacctatttaaatcacatgctttattaaataatatattgctgtagacatgcactgtatattaccttacatccactgtatattttatggaacaattttcttcaaactctagacagtgatttcctacatcagtgtctttgtcctcacaaatttttatttccgactaagatgtttgagacctgctacttcttcaaccaattcataaagctctcacttttatccaattcctttatgagctgaaataaagactctttttctcctttcatagatgaggttttaggatcactggagaattcaagacacctttaagctattattctccaaatgactacttgtttggggctcactagaggtctcacatggattgctagggtctccccggtcccattgtcctttccctatatattcatcttctccctgatgttacttctactacaagagatcccagtacattgctgtgagggaatggaaatgaactccgtccaaaaaataataaagagacaaattccagaaaagctgtaattcccttctgtgtattagtctcttgctgtttctcagtggaattagagagcagctacatatcctatttgtccaatgctccttcatgtacctaaagaccatggtgatggtattgataagggcacagatctatgaataagaaaacttcaattttagtcctccagtctagtcttagaggctctgtcattaggcgactgtatggctttaggcaagtcacttaacctataaaaatcttggtttctttctttttttttttttttttttttttttttgagatggagtttcactctgttgcccaggctggagtgcagtggcccgatctcggctcactgcaacccctgcctcccgggttcaagcaattctttcgtcttagctcccgagtagctgagactacaggcacctgccaccatgcttggctaatttttgtatttttagtagagacgaggtttcaccatattggtcaggctcgtctcgaactcctgacctcaggtgatccacccgcctcggcctcccaaagtgctgggattacaggcttgagccaccatgcccagccaaaccttggtttctaatttataaaataaagagttggactagatgatatctaagatcctttttagctctaagacgtaatgagcatgactcattcagttgtcctgtccaaacttaaaaaccgaagatctcagcttttgttcgataatatctttatttttaaaattcattattttaatgaacataatgtaaattcttactttaaaaaacaggaattttatttttccactgtttaattagctttagatatgccctatcaacccactccaatttcaccacacacctctttaaagagctcaaatcttggtatataatttaggattattatgcttcctggctcatgataagagagagagaacaataggcaggaaaatttgccaaaaggtgagtatggagaccttaaaagcctctgaaataatcagttccttgaaatgaggaaattacgtaatttctcaaaaatatctctgaaaccttatggagagcaattctctctacaattataatctctttgaaattagggatggtataatttctcaaatatgagtgtaaaatgttaaactgtaatatagggaaaacatacatgtttataaaatgaacattgtcagtaagcagatgattaatggcacttgtgtcttattagccattactattatctaaaatgttctatggaaaccaaattaatttgatgtacaaggttcggtggactttatgcacagcttaatgccgttcataatctgagatgccgtcttggtctaaaaagaacaaaaatacgtttacagtgacagtgcttcaaccagtcctcatttttcctcttttttatcttgtttgtcttgacttccagtcaagagtttttaccacagatgcccagctgcaaaaccaggtgtcttctctggctatgtttttaatgctttgtaactttttcttttcaatgctgggataaagggatcgcccacataacaagaggtttctataccagtggcacagttcctgttggttgttgaattgtgcactcattcttgagattttaagtcattaacatcttttgctctagtttgcaaatcaggcagtgtttatgcctgcatcctgacatcagcttttcatatgaggctaagaaccttgattttgatacttcaaactacgtgtttgtctagtttatttgtccacagcatacatcattgttacagttttcatattccctctcccttggggctcccttattcctgccagcatctctttcaggttatttgattacagctttcattgccactgaaaaaataatcaccaacaatgttcaacctgttacaactgccttttctactctctgccattttgtagttttttggcctactgtcaaactcatgaaaatttcaatataatagcctttaaccagctgctgcattctgttaggatttctttcacctttttatgttgcatgctcccatatgggtaaaccaaacagagccaagagctgggactctcttgctttcttaatgagttagaaaattgttcttctgtattctggactgtcaaaagaatttaggaatcccaaacatgcatgcaggatgttccagtatagatgtcataataaaagcataagaaatatcacactgggtcagaccaacagggcaactagcccggaactctgtcccagatgaagataccaatggttgttttgtcaggtaacctagtacattttaccttaaaaattcggatacatcatgaccacttcttaataatgcattgtaaatcaactggcagtgagtttatccaatggtgtcaaacttttcctattccccacttcagctttgtcttaataataatatgttccataaatgtaccgacttctatataaatataggcattttaatttctcttgaatctgcatcctttaacctcaaggaatggccttaattaaattctttgaaattcagtaaaaacatttatatttatccagagtcgactttagcctcacattcccctactaatgcttttcattttcatcttcccagtctgagaaattctaatcctttttagtcttttagtctgtccttgacggaaagataagctttccccttgattatcttagttgtttttccctggatcttttccagctctgttatatcttctttgggatgtcgtgactagggtggcccaaatattggttatgaaatttgttagcattgtctctagtttccactcactcatgaagaaagtaaatgttatttgctgtctcccattggtgcagaaatggagagatcaattgaggtcataacctcttctgcatatattagttctagccgaaggttggttttctgctacttttctgtaataccagcaaaagtgtttgaccttatatttctgccagctgtcccttaggaaggatttgatttttagacaagctggtcctttcctccttcaaagacgctgtggttgctaaatattgggaagaattcactaatgaaactcaggagtaaacctgctgactccatcagcagtaatgcatttcatcaggttccctttcgaaatatctctgaagcccttcacagaagagtgaaagatggggttcttgggaacttgctaactgctcagctttttttacatgcaatgctcaagaagcaactcatgtccaaaggagtgtttatcttttcctgctggtaattttgaatgttgtatatacattgctgtatatgttgcctgatgaccttgatcgacccttctcttcactctcaatctcaggcatgtttccacaaccatttattgcatctgagttttgctcacaactttctgctgcttcctgcttagcaaaatgcgatataaaaccttattggatgaagttaacagttgcttcagtcaacatttcttgttactgttgctgtttgtgctgacaaaattgctgatttgggttctgactgtcctgtcttcttatggcctaccattcctatagctctatttgtacgagtatttgactctctgcctggaactgtggccatctgtctagatttaccttttggtatatgtggctctctgtatcctgttggtctacattctggtttgaactcacggatcttggtctggtttttagtaccagtgttcccctaactccagtagcatctgaatcttgacaccaccttcccctgccccctactgtattgcctctattactactttcatggcaattttttcggattccaaatatgtcccatgcttaaagcatatcttgctctcattcttgttctagcccctgttggtaccaggcattgctccaattcaagttttggttggttgatttcttccttcataatattgattgctatttcagtacctgtatttatatacagagggagcagtgcctaactacatcttagccttaacagcaatcaacgtgttaaatatccctgtgttggctggtttgcagtagacacgtcttctgacaatgagatgggctcttattataaagaaactggagtatgatatcaacatagaaaacatttcctcaggccgggtgcggtggctcacgcctgtaatcccagcactttgggaggctgaggcaggcagatcacgaggtcaggagatggagaccatcctggctaacatggtgaaaccccgtctctactaaaaatacaaaaaattagctgggcgtggtggcgggcgcctgtagtcccagctacttgggaggctgaggcaggagaatggcgtaaacccgggaagcggagcatgcagtggacgagatcgcgccactgcactccagcctgggtgacagagcaagactctgcctcaaaaaaaaaaaaaaaaaaaaatttcctcatttcttattccagacacctcactcttctaagaatgatacaagtcttctgacattgggtttgaaaatcagttgaattttgtcataatctttcatacaatgtgaacacatcatgtagtatataattttgtgctatttctggtaagatccttcttatgtatatttttcttcaaaatataccttttagcagctaagacaacattaaataggggaaattttaaataggctaggcatcgcaagacttgaattctagttccagctttactgtcacctagctattaatacttgaccaatgggaaattgcttattttctgtgggcctcagtttctccctctgtcatttaaggaagcagaatgacatgatatcataggtcatttccagtactaacattttctgattttgtgaatgttgacttcgaaatagaaattgtttgtgatcattttccagagaagtgaaaatgaatcttcatattgcccttgaggattcttattgcaccatcaatcttatcgggatagaaaggacaaataatattaaatgtttcacttaactatttagcactattgatgataagaagtggatgcaacagagaatcagctgtctaatttgatctgtcagtctttgaggatgctggtgaatgattcggggtaattaaatttttgaaatcactgccaaaagcctgatgctctgacttttcaaaaggctttagtacacaaagataacccagaggtcaatcttctctgctgtgttttctcctctgccatttgatggtttcaaaggtcacgttacctgagtctcagtaagctctggaaccacaatgaaggaatagttggtaatacattattgatgatataatcatgaaaacaattcaggttaagatattaactgaaagagagtgaaaggggtgccatagtgttgtgcagagtgctgagtctggttttggttttatagatcttgttgggagatgtagatgttgatatcatctgtgtctcataggttcatgaaaaaaaccctcacatccttttttgtagtttcataagctgatttgtatcaccttgactgaaataacagactccaggaggatagctgttgttatctctttttctagcatagtgcctcacagataacaggtacttggtaaatattggaatgaattcatgaacatatgtcagtaattctatgtgcttttcagtttgctgactcatttcaccttcaaaacaatcttgtagtatttgtgtgtcaatttagatttaccactcaaatccatctctcatgccctctagacatgaactttagtgttaggaagcatgccgagtgtttgatagagtttctcatagctcctacagtttggtgcttaagggacagtccttggcatggatgtatgaatggtacataccaaaacatgagttctagattccgttctatcttaatctaacaatatgataaggagtataacttagctcaacctcaatgagaaggttgaactagataatgcctgggaccactctcagctctagctttgtttcagtagaactagagtctgtttttcctaaatatcattcatgaggcttcttctggttttctagtggtcaatagagctttaaattgatcaactactgtttttcactgagcattgtggacaggacctactttttgggccaggatatagtagccactgagtcttaacagaatgtcatcaatgatacatttttattttacagaaaaatgttgtaacattctatatggcatatgtcatgtggaaaggtggcaacatatatacatacacctatacatgtggcagctaaaatttaatgtgtgtatggggaaaataatcctgtattataatacacatggtatagcattccctgcctcattcgtggcacttttggaaatgtgagaatgagcatagaacatattcaagttggtttatccaaaagaagaggagtaaattatttcagctatttccccattttctttttctaactttcttaaacatgcactttcttacataatcacgtgttagaaaaaaaccagtagtcacatcaaataaatctgcatttgaaacaactgtatcatatcccaactctgttcgtttgagccatttgcttaacgtgacacccattctactttatgacacataaggaatattgcttaagaaatgttaattggctttccttttctcctctgaaactggattgaagtcttattgacctctattagatactgagtgttcaggtttttaggaaaacactcatagagatatagccccagtgtgagctgcatttttagaatattttctagaacccaaatatgtccctaatcaaagttagtttattttcattcttagcgttcccacgtaatttggggtatgtgtgaattcccaaacattcccgggcctctcctaggcttctctaattgcttcttattctgttcccctgggaagcagcatcctgttcccttcacaaaggtcagcagcaacagcccaggcaatgttttaaaataacttaataaccctgaactgcctctctcttctttgggataatttccttagagcattagtcctttgaacactgacctggttgcagaaaatgcccctttctcagtgggaaaactccaaatcccattcagtcttcccctccttccttccaggggatagggtgggggagtagggggtagggagagggtattaaatactttcttcaggaaaaatgttaacacggtaaaacactctctctctctctctctctctctctctctctctctctgtgtatgtattcttttttaaagaaatagactgtgagtgcattgtataaatcagtgctgtcacgttgcaaattttttaaaccgttgtacaagatagaaaaacagtatctctggatattgactctggaaagcttctaagagcaggtcctagatgagacttagctcactgtcggcattcggcaaatgatcacgttttctgtgataccattaactcctggggggatgaaactgaaaagcctcgctgctcttcctgaaactctcaactgcttttttctgtttttctttctcagcttatccacatccatcttggtccccaaagccattgcatgtcagatggtcagtgcaatgtgtaatttttaacttgcttctttgttgctttagaaggaatcgttttgttgttttctttccttttggtcactatttcttgttcatgagttttctgtaaacagtgtgtctcatagataagtccatgtaatctgctagacaggaagaaaagcaaagtttaatgtgtgcctactatgtgctaaatgacaaagtgtttcatctgtatcttcccatttaatccttgtaacactccacttattatccaataaagaaaaaaacggctatcagtcgggcgtggtggctcatgcctgtaatcccagcactttggcaggccaaggtgggtggatcacttgagctcagcagttcaagaccagcctgggcaacatggcgaaaccccatctctaccaaagatacaaaacagtagctgaatgtagtggcatgcacctgtggtcccagctactcaggaggctggggcaggggaatcccttgaaccagggaggcggaggttgcagtgagccgagatcacaccactgcactccagcctgggtgacagagtgagaccccatctcaaaataaataaataaataaaagttaaaaaaaaaaaaaaggaagaaacagctgagattcaaaaaagttggaggcttatccaagtcattctaataaaggggaggggggagaattgatacttaaaatcatcatgataagaaggatagacattggagattcagaagggcagaatgctgggtgaggggtggataatgagacattacttaatgggtacaaggtgcactactttggtgatggatacactaaaagcccaggttcaccactatgcaatacatccctgtaacaaaactgcacttgtacctcagaaatttatacgaataaaaataaataaatcaaataaaataatcatcatcatctcagctattgcttctagctgtttcaactttctaatgtttttgattgaaaactggccatttgtataaccaaatgtggccaatccaccactgtgaggctgccatcttgggcatcaccaaaactactctagtagtccttccctgcactgttaggtggattttccttggcgtatcttcgcaatcaagttgcagagacctaagttactctttgctgctttgggcaataaaggggaacaaaaaacaaaatgaaacaaaaacttggccagccctgatgtaagcactcttctacctccctgcaggctgagaaaacaaagtatttcttttttttttttttaatttttaaaatgtttgattctggtctaaatcaattaaaatgagatctccccccttcttttttctttttttcttctaaaaaaaaaaaacacaccaaaaaaccgagatacatgtgcagaacgtgcaggtttgttacataggtatatgtatgccatggtggtctgctgcacctaatgacccatcgtctaagttccctcccttcaacccccaaaccccaacaggccctggtgtgcattgtttccctctctgtgtccatgtgttcttaatgttcaactctcacttgtgagtgagaacatgcagcgtttggttttctgttcctgtgttagtttgctgaggatgatggcttccagtttcatgtccctgcaaaggacgtgatctcattcctttttatggctgcgtagtattccatggtttatatgtaccacattttctttatccagtctatcattgatgggcatttgggttggttccatgtctttgctattgtaaatagtgctgcaataaacatacatatgcatgtgtctttatagtagaatgatttatattcctttgggtgtatacccagtaatgggatggctgggccaaatggtatttctggttctagatccttgaggaattgccatactgttttccacaatggttgaactaatttacattcccatcaacagttcaaaagcgttcccatttctccacagcctagccagcatctgttgtttcctgactttttaataatcaccattctgactggtgtgagatggtatctcattgtggttttcatttgcatttctctgatgatcagtgatgttgagctttttttcatatgtttgttggccatgtaaatgtcttcttttgagaagtgtctgttcatatcctttgcccactttttgatagggttgtttgtctttttcttgtgaatatgtttaagttccttgtaaattctggatattagacctttgtcagatgggtagattgaaaaaatgttttcccattctgtaggttgcctattcactttgatgatagtttcttttgctgtgcagaagctctttagtttaattagattccatttctcaattttgtcttttgttgcagttgcttttggcgtttttgtcatgaagtctttgcccatgcctatgtcttaaatggtattgcctaggtttccttctagggtttttaggatttggggttttacatttaagtctttaatccatcttgagttaatttttgtgtaagctgtaagggaggggtccagtttctgttttctgcatatggctagagagttttcccagcaccgtttactgaataggagatcctttccccattgcttgtttttgtcaggtttatcaaagatcagatgtttgtagatgtgtggtattatttctgaggtctttcatggataggaagaatcaatatcgtgaaaatggttatactgcccaaagtaatttatagattcaatgctattcccatcaaactaccatgaccttcttcacagaattaaaaaaaaaactgttttaaatttcatgtggaatcaaagaagaccccgtatagccaagacaattctaagcaaaaagaacaaagctagaggcatcacaccacctgaattcaaactatactacaaggctacagtaaccaaaacagcatggtactggtaccaaaacagacatatagaccaatggagcagaaaagcaaaggatttctaagtcatattccaccacctccatcagggcttccctaagatagagagtatggccaagaccatacttaataaatgtcatggaatgtgtttctcttcataccctcaattgtaagtctttctgaaaggtagcgcgtggtcaatttagatggacaagaagtgctctgcaggagcctttgcaacatttgtgcatgtccttgattttgacaccaccccccgccccccattccagaacagatcgtctcatccttcccttaagccagaggcctatggttctagctttactaggcaaatatatatggtctgtggctataagtcacaatttctcccaagccttgagctgggggaatactgagtctgcccatgtattacatgcagaacatttcatcttattgcagaatgatactttattcttattgcagaatgatattcattattgcagagtgatattctttagtctttattttttatcattataactacatggtgcaaaagaagtatttctcatactttttctcataatgactcaaaattacaaaagcaatctgggcaattaatatgtttttgaagataaataatggcttatgttttctgaagattaagaaaaatctctgtctgaatatagctgggcacagtgtctcaagcgtgtaatcccagcactttggggggtcaaagcagaaggaacacttaagcccaggagttcgaagccagcctgagcaacaaaatgatacctggtctctacaaaaaaaaaaaaaaaaaaatccttggcatggtggcatgtgcttgtggtcccaggcacacaggatgctgaggcaggaggattgcttgagcccagggggccgaaagttgaggctatagtgaaccgtgtttgtgccactgcactccagcttgggcaacacagcaagactctgtctctaggaataaaaaaaaaagaagaaagaaaagaaaaatctctatccgaaaaatgtaggcaccctgtgttaatatgtaaatacaagtgctttatcaaataaaggctagattaattgttttttctcgctcttacttatatcaatactacaagaacttttctgccaaaaaaaaaaatcaaataatagaaaagaatgaatcctagatagagcaggaggggctgagcaggcacagcaaaagttcaaggtggaaatatctttatgcatccaattaaaagtaatttgtgtacattttactcatatatctatatgtacacatacatacatacacagacacacacacatatatatatatatatatatggagagagagagagagagagagagagagaggacaacgaagaggaaactaaagagaataaagggtattaacagcaggtctgtgacttattccctgggggatgtgaagggaataaatgaccttaatagaccacttcataaacatgttaatgacctcccagaccttcttgtttatcttgttaatagtggttaactagaggaaagatacctgcaaatccctatctataaaatgattttagtagggtatacctggcctggctagatagcttattgtaaataaacctggaatgtttggatttatgagtcgtggctggctggagaatagggcatagctacatgaacgtttttctatttttgtaattgacagattataaaatggaaaacttttgagactgaaatgatttcctttcaatgtttctgtgtaaatttttaaaaacgtatctgttaatatgaaaccaaagcacatcataatgggaaataacatggatgttttggaaacgcatgtgtgattatttcaggttccccagggaaataatgttctatctgtgcccagcacttccctataattctttcagtcattaataaagattggtactagataagaatctgagatttgtgtgagtctgatgtgagatccaaatgttatacttacacaatttgtgtttattttagtttaaaaattatctttgccatgagcaagaggggaaaaaaaggaggatgagcgggcctacatatttttccttaacatcttgtcccaagttttaggaaatcacaagtctaagaaaaggccagggtcaggactaggaagtgatataacagttatacatgtctacctttaaaattatataagtaataattaatttttaaccttattttaagcagatcctagaaatagcaagagcctctataacgtcccagctaagaccccaagttttctttcttgtttaactcttgaaatattttgttaattttcagatcccttgtctcctcagttcagctgtaaactctctgacaacgcttgtgccttatgcatctttgcatcatccctagcatgtattatatatctcacatgtaaaaataataataaatacttgatcatttgttttgattttgatgattaagcactggaagctgagctatgatcccaataggtatgcttatttaaagaaaaatagatggcagtccaggcgtggtggctcacacctgtaatcctagcactttgggaggctgaggtgggcaaatcacctgaggtcaggagttcaagaccagcctgtccaagatggtgaaccccgtctctactaaaaatacaaaaattagtctggtgtggtggcagatgcctgtaatccccactactcaggaggctgaggcaggagaatcacttgaaccctggaggcagaggttgcagtgagccgagatcgcaccattgcacttcagccagggcgacagagttgagactccatctccaaagaaaaaaaaaatcacacacaaaaaaatagatggcacggcacagcagcttatgcctgcagtcccaacactttgggaagccgaagcaggaagatcacttgagtccaggagtttgagaccaggctgagcaatatagcaagactccatctagaaataaataaataaataaataatttttaaaaaatagacaataacagataaagaagttccatgttatttttttaaattctagatagccccactggtgttacagtttattaaattacatttggaagcgattttttagcagtccatttattttgtatatttcagtttgttgagagcagatggggttgagtgttgatggggttgattgcctggctagattatgctataaactataaatctttgaaagttactgttttgaagaaagcatctttaagtgaatatattccttcagtagctcctattaccaaaactgttgtgagaatatcttaggaaaacaccttaaaatcctcttctatcaaaactcccaagctttcttcaggagccagcattgttcagtgaatgcatgtaagcctatgtcttaatagagggatccctaacctctggaccatggactggaacagcaggaggtgagtggtgagcaagtgaacattactgcctgagctctgcctcctgtcagatcagtcgtggcattagattatcgtaggtgcacaagccctattgtgaactatgtatgcgagggatctaggttgtgacctctttatgagaaactaatgcctgatgatctgaggtggaacggtttcatctcgaaaccatacccccgcccctgcctcccagtctgtggaaaaattgtcttccagaaaactcatgcctggtgccaaaaaggctggggaccactgtcttaatagatcttgaaaaaagttggagtaaggtaagtggtaaatcctaagacatacattgaggcagagctgcagtggtatccagtagggaagaaaagacttcaagtttagaattcagttatactcaaccagtttttgcctttctctgttaaatattagatatcattaccagacacatacaaaagattttaattgcatgaatgcccgatgttgatacaagagagccgatttttttttcacacatagttttttggggtttttttggtagggagaaacatcatctcatgatatcgttttaaaggtgctttattatcaaggaccttagagctttttctctcactcatatttcatatactcttagtcctcaagccatttctttttactgaaagcactatagagtagcaaaaggcatcattatattgctcagcctcattcatcatcaacaaaattgccaattatattccaagtccttgaatgtattgtttaaaaagatgtataaggtgaaaggaagcagttcaatgttgaggtggaagatgaaacatactgactggtagattcagagcatactaatcttgttttcacttgtgaactggaaaaaattaacatggagggatggagaaaacatgttcaaactacaaagtcattttttctgagaagttatctgactgtaactgtaactgtaactataactcagggtatatcagagggctcaaatgtggaacacttctttaaaattaaaacctaaaagtcctgatgtgtaatagaacgtgtaaaaatagcagcctctgaaggatctgagatgagcagaggaacactgaataatataatctgacagtatgggccatacccttacagtagttgccgtggcctggaaactatagaattaattcagtaaaacatcagaaaaaaagcaacataaatataaaatattttaaattaaaaagactgaataagaacagaaaaaaatcccctagcaaatcaatattgcttggggaagcatgaatcccagaccagcaatattttaatccaaataacttttagttccatcgtgaacacctttatcaccaagttttataaagagtggagtgaagaaaaaaagtacttgaggttgttggaaacacttctcaaagttggtggctttattcagagattcatgcttgactgtaccaacttctgtttaatttatacgtagtactttgtcaatttaggaatttggtttacttgtcctttcctaaatatgtgtattacaaaacaaaaaatagagaaatgataaaataattacaaagatgattaagcaatagtgttggctatagtgaacagattattgccattttatagagtaataatatacctaaggaaatctgtgggaaatttaatttgggatataaaacacagaagtcaggcggagatgaaataataaaccaataggaaattaaatttaggcatgagagtccaaagatgtaaattctatagatgttataaaataatatgtatgcccttacataatttcattactctctgaacttcatttctcagtgaaatatggggaaatgatactgaacagtgcagcagctcttccgcttatgaaccaaccagaagatatataaacaactcttaagggttatacattataaagatataatttagtctggatttttttttaaatttgaaaactaattttatataaaccctaattgggcaattctccattctttgacttgaatattatagtaaatatgttttcccaatttccaagtttcatgtattattttcaaagaaaaaagacaaacttttaaatgtccagctacctgggacttcctctgattatcttttaaggtagttcaaatatatacaatttcaaacaacaacaacaacagcaaaaaatattttgccagacaatatgtcttgtttgtttttaatgttcacaatgtaaagtacacttattgccaaacctcactttcaatggtgttacaaattagccaagtataactagtttgtaaatactaataagaaggttgctgaaattcagccctgaatatttcttttctgcaactccaaagaggaaaatttttgaaatgcaaaccttgacctttatcaaagcctaggtgaagtttgttggaggtgtttggttttttgctggtgctttgttataatgcagtttgaaagtagactagattggcaagacataattggctgctgtgtggagaatgcatttggtggaacacgtgagttaggggtgaggaaatatgaagagccagagtggaagcagggagaccagatagtagtgtgggaagcactggtgttagataagatctagataaaggtagcagtggagatcacaagaggtggttggaatcagggaatatggtttagaaacaatcacaggtcttgctgatgcattggaggtcaggagggacagaaagagggcaatccaggtgtctcctcggctttcagcaggaacaggtacttaaagaggaacaaatttggtagggaaaatcaagttttagtgttccattgcagtacatggtaaccatggctaataataatgtctcatatatttcaaaattgctaaaagaatagatttttaatgttctcaccgcaaaaaataaatgatatgttggtgaggtaatggatacgttaattagcttgatcaactctttctacaatatataccaagatcaaaacatcacatcgtatcccataaatatacaaactattatttgtcaattacaaataaatgaaataaataattttttaaagagatgtcttaaagggtggcttgaagagcttctgtgctccaataatacctgcccattagccatactttgcttccagcaacaacaggaaaacatttaatctaaacaaaaaaaaattgcttgtcaactagatagctactcttccgtgtagaaaccctagagctgcctgggtttagacatgtttaagtttgaggtacttattgggtatctagctgtgcagttcaaaatttggatctgaagctaggggaagacgtcaggacaagagctttaacttttgtaatcatcaatatatacatccttcttagagtcatggggtgggatgccatcatattgggatgagggaggaaaccctgggacttcacaatatcgagctagtttctgttttgcaaaaggcaaatgtattaatgaattcattacattaattaagcaaactatatttattgggggctattgtaccagctattgtaaattttatattttatattatatatatatatatataaaatgctcacaaaataaaggaactaagtcataaatatgcatatgatttacataaaggagctaaaataaggatctctgtttctgtttcaattctttattaaagatctatctaagactataaagacatatataacaaggtacaggaggtaaagagtatattcttaggcatctaaaaatttttcctatgcttttgaaatctgtgtgatttactttcttgaattggcctgtaatataggagtacaatatcattgcagagattaattagtgtgtttgtgaactgttctcaaatgctaaaatgaaagcataaaactataaaatggcatcattattccttaaagaagcatagtttccaagggtgtctctgatcattgtcacagcataaatgaccaatttcacccataattagccaagttagtaagaagttattttttactgggtatattttgtttaacctcagttatatttgtaaaagtagaaactgctacttgttactgctttcagaatttctcacaaatgctaaaatgctttttaattctaatgcacttaaatggtttgattctccttacctaagaaaaacatttatctaaagatatactcttgactgattcattcattgattcatttgtcaatagatgtttatttatcagaatatgtgcaccagatacattgctagatgtaaagggtacatttggtgagcaacatgcatgatacctccaaagtatagccagggaatagataatggaaatgacactaagaatgaatacatattaacacaaaaagagagagagagtcatgtgtcaaggcaatttagcaggagggaacttgtcaatacaagggattaaaaggacagcatgactagggctggaggaggtgaggagaaaactcaaaaagtcctctggctgatgcaaatgaattggatgaggagcctatgaatacaaacgtttgaaggttactgatgaaagccaggtgagagaagatgggatttggaccaagatgatgatagtttggatatggtgagaaaggcatagatttgagagatttttaggaggtaaaaatccttaagatttgaggatagatatcataggaggaagggcgcaaagagaaagcaaaacatgtcaaggaatcacacctagatttctgggcaatgcacagttggtaattctttacagtgagttagggaactctaaagaaagatcagatttagggtggcaatttgattgtaaatgtttggatttcaaatgattggtgacatccaaaaagcactgtaaatagacagatagtgtgcacctaaagaaagaaggaggcgcatctgggttggagtcactaatttacatattacttgtatatagctagtaactgaaaccatgagtgtgaatgagattctgatgctaaattctggaaggtcactttttaaagtgttttgctttttgaagtacaggtgcaatactaaaaataaaaaagactaatttttaaaaattaaattaaaatgaaaagcctggaaagataaacaccaaagttatgatactagttgtagtatgggagagggggcatcagagaggatcggaatttcatcttgaatggtgtattttatttcaaaagaagctttgagcaaagataaaatgttaattctgagcattagaaggaacacatttgtttttttgtactgtggatctttttgtatttcctagaactcttaatctaaatcaaatattgcaaaatatatcactgtaaacaactggttggtcactagctttttaaatactttgtagcaacttggttgcttgtcagaggtcttctttgagtgaagtctttaatttatagttctttatgcttgatcagcataattgcaccaaactgttacttaatctgaaaaatagctgtttcctagagccctacttaatactgaaaacctactgtgtttgtattgcaattgcatttttttttttacttttccccctgcttttcagtttgtataatttctgttaccctatattcaagttcactggttctttccttgtctttgttgaatctacagatgagcccatctaaggtatttttcttttctgttactgcttttaatttctagcatttccatttgattcacttatagtttccagctctatactgaaatatactgaaatatagagctggaaactataagagtgaatcaaatctaatcttgcatattgtcttctaatcttacatattttctatctaatcttgcatattgtctttcttttccctcaagagtctttaaaatattaattatggttattttaaatttcctgtctgatagttccaacaactgttacatatctaagtctggttctgattcttgctttgtctccttagactgtgatttttcttgcttaggcatgctttgtatctcaggggtaaaagtcaggcatcttagatagcgtaatagatactgaggtaaataaacctttgacatggtaatttatcttaatctgactgggaattgggctgtgtttgatgttggtagttgctttggttgtcattgttgagttttgttgctgctgtggccaccagagacttcaaattcctctggtaactttgtttcctcattggaagcttgttagtgtagtggttgagtgtcgggcagaggcattctctaatgtttgaattaatacacagttggcctgggtcttggggatgtggtctttacaattatttctttcccttcctccagaggtagagtaacttcaacctcccattcccttcctggagctgcagtggatatccaccagtgttctcagtctatggccccaaggccctttctcctgcataaggctgaaaaacaacaacaacaacaaacaaacaaaaaaaaacaaacaaaaaaagaacaaaacaaaaccacacatagatgagatctggtgttcccttcccctaaaatgcagtggtatttcctcagtgcctgatatggtttggttctgtgtctccacccaaatgtcatgtcaaattgtaatccccacatgttggaggaggggcctgatgggaggtgaatgaatcatgggggcagatttctccgttgctgtacttgtgatagtgagtgagttctcaagagatctagttatttgagagtatgtaggactttccccttcactgtgtctatcctgctgctgtgtgaagatgtgcttgcttcccctttgccttctgccatgattttaagcttcctgagggctccccagccatgcctcctatacagcctgcagaactgtgagtcaattaaacctctttgctttataaactacccagtcacgggtagttctttatagcaatgtgatgtcttttcctctgaagagaagggtataagcagattcatggtgactagctactgtgacccttccccaatcagcaacacagagggtgttggggaggctttctccagattcttcgcatcctccttgtgaaggcaaggtacagttcctgaaggaagaagcttgcaaaaggttgggactccacctatggcagtagcccccaggatcttcacactctcaggctagctcccacatgtcccccaacaatttaatctccctactagtttatatggcatctgctccagggatccaaatgctcaggcactgcttctggctaaaggccaatctctctccagatttcaggttgttctataatgtcatttctctgatggactgatgaaaagtcattaatttatctgtccagcagttttcttgctacaagtatgggagcaacctctttgcagctctccatctccatctccaagttgaaactggaagtctgagcaatacattttagaaattaatatttgtaagttttccgtgtcataacaaaaataataaatgttcactgtggaaaacatagaaaaagattaaaaatatttaagtgcccatcaccacctagacaactgcaatgaacatgttggtaatgtcttcttccagttttttaaaatctgctgataaaatacaaaagatattgtttatataactttgtatcctaccttttcttgagcaatgcaagtttaaacctaaatacgaagatactctaacttcctactttacatttttgacggcagatgtcagctgtcttcccaagtgcagtacccttggcttaatatcaggtagacaaataaggccaccacaaattcacctttcacctcaataacacaggtaatttgatagttctacagaccctataatattacttgactgaagacccagaatacaagtctttcaaggattactctagaaactatataaagtattggtatcatctcccttcatcatatcttgccaaatccaacaggtttggaacttctgtaggaagatttttgtaacatgaaaaatgcgtgttgcaccttccatatccagcaaatacaccatcggttttttgttggctgcaccaatgacataaaatgatttcactgaatagggggtgacccagaatggaaatgtagagcatcgaaaataaaatcaaccgacgcagtctttgcagcaaaccatgtggaaacaaatttaaatatggaacatactctttccaactcatcttcagatgttgctttaaaatttgtgcaggtgaaaaaaaaatctttattttaaggtaactcaatcttttaccattggagagaatagaattatttttgtttcctcttgtatattcccagttgtttaaatgttctctgtttccttgtgtggacacataaatccaaatatatctaatatcaaggtatttaccatatgcagcactttttcctcagatagttattttttgaaatattcaaatagcttacctgtatcatcccccccatccttttttttttttttttttttttttaagacggagtcttcctctgtcaccaggctggagtgcagtggtgcgatctcggctcactgcaacctccacctcccaggttcaagcgattctcctgcctcagcctcccaagtagctgggactacagttgcatgccaccatacccagctaatttttgtatttttagtagagacagggtttcaccaatttggccaggatggtcttgatctcttgacctcatgatccacccacctcagcgtcccaaagtgctgggattacaggcgtgagccatcacacccagcctaccctattttctaaacgaacaattagttgacttttcttcagttcttactcagaaatatctgaccctaggttccaacttttgttttgctctttgcagttagtttttatgtgtactgttagggagatgtgctttttttttaccttcaaatttaaaagagagagttttcaattccttttaagtcaaaatacaactgttctactctaaagctttctttaaaaaaagaaaagtaccaaatcctcatccgtagtaattaattttgacagtgtaggctcagtagtgattcacaaacctgtattttgtgcatcagcattccttattattctaattaaagtggaacattgtgccctcgctaatcattaatgggttttcattttgtaaatgacatttgcagaagttaaaacagcgagttcatgtgaagtccacaggcaacggtgttgaaattagcatcaccatagcaacagtcttccatcattagcattcagggcaacaggaggtgttttgttgtgttttgtttcccaaaaaaagaaaaagaaaaaaacttcaaaggtaaagcctacagaaactctctcagaagatatttatgttccttgtgtgtatgtgtactgtactagacctctaagtctacatagaattttttttaaaaattgcaatgtggatcatctcctttccagatttgtgttttgcctagtatactagctaaatttcatgatctttctccagctgtacacgtctgacctgctgagcagcatttactcattgccaacctgctgctcaccaatagggtttcctacgtggatgaagagagtctgtattcatgaaaatatttggttcaatctaaaagtattatgtgtattcatgagtttttaatttaattcatggaaaatagatttatgctgttagatcctctggtgaactcatttagtcatgttgtagatataggtcaatgattattctcattcatgtttagacggaattaaagaggagtcaaatagagaacaatattatcttaactgagtctctggcagtggtattaccactattactctgtatgtgtgtgtgtgtatgtgtgtgtgtgtgtgtgtgtatgtgtgtgtgtgtgtgtgtttgaattctaatattctgggaaactttaaaagtggcatatctagcacttatgtttttctcagtactaaaatgcataaaagagcaccatattgacctaccagctgcttctaaatcacaccagtagtaggtaattatgaaattcaaatgaagtttaattttcatttattatacaaaaatgtcatagctcaaacccagaagtgttacccccaagcttggatatagacaggtatgtgtgtacattttacttttcaagatgaatcatagcagtcttctccattacatgtaaggactagaagttgtacattccactcaggtacctaaaggcaagcctgtgctagcccacactaacaaagcaaaatgaagcaaaggatctatctggctttcaatcagggatgcatctatgctatcatcagctctgtcacataataaatgagtctatagataacttgaactactcagccaatgggctgtaacccagtgattctgtggtattgaaaggcagcaacccccagaagccacatgtctcagtgtgcactccaggactgtaggcccatagaacttgtatgtatgcacacatgcatatgcattccccacttttctaatggcgatccaatctaggcctaatccacagctagtccagaaaagaacttttttaggttttctgtctgccatcactttgttgagaggcagtacaagccaagcaggtgtctgtatttataatatgcacaatgttaggataactcaaactcataagggaaagattaatggctgactactatgaaaaccgcttctagccttgtgataccagcacctactatcttcctttttctcttatatgatgaaaagatttcaatgttggcttttcattctgatagaatgtgcaagccaaaatctaaataaagtccagtggcaatgatccccttaaacattatatctttcttctcgatatgctgatgttttcccttataaaaatctatgtaagtttcaagatttatatgacagacaaaccacacaaacaggaggtccctcacattcactactagtcacttgctctatcactctgggaatagcggtcttcagattgcatctctactctacctcttgctcttttcaacccctctcctcttttttagaccatacagggcatcagacaaggtttagtttaccactaaactttgggatttggaagatggtgtataaactgatacaggtagtccactcacagatgtagtatataattacagacttgagttttcaggggctcttctccagtttcctgtcaatcaatttccctggctgagacattagcatttgtcagtgaccatgcttactatatacatacacaattgtgtatacacaattgtaaaattaaatacgggctttagaagagattattttttcttaagagtaggttactctataaatgccaaagcatgtgttatgacatagaaattcaaatgactaagaatagctaattgtttagaaacatcttacttgatgtctattgttccaaaatttgatccaatttagagtggtaccaatccatggtgtagaatataaaagctaaaggataacaaaaatcctaggaatctcatgccagtaagaaagttctaccagtcagatgagatgttgagagcatttatgacttggcatcaggaatattataagtaaaattcatgtgagcagtaattgcagctatgaaccatgttatttgttcccacttgtccaactgtaattctttcacttagctcagagtagttctttgtaacattagggcccactcatctgcctttaggtagggttttaaaagatgcctagaaaatagttctgtgctagaaatcagagactcttgacctactgtaaagggagcagtaagcacgtttcctcaggagaatctttctacatactgcagattcccataaaaatctttgtgacaaaattgcctttactgaaaccatcatccattggattaaaaaatagcttaccattagctttttgaaaatagaaaacgttgagccttttcaatgatactttcaatagtttttcacaactatgagtcctcaagctatcagtcttatttttagataccatacttataagatagttatagaatttatagagtatggtttaaaagactattcaattatagagcaatcattcagtttattcccatggcagaagtaaatggaaaccactccagatcaacaagaatctactctcttctgattcagaaaagagatttcctatcttttcatgaataatccatgttcaatgtttaacacctcaggaagattttcttaatagcttcttctggtcataaatccttggtctgtcatcagggacatattgaagagttagttaccaaagttcttaatgtctcccattgtaaaaaaaaaaaaaaaaaaaagtcactttttggattgtttctttcatagagtccatgcttctgtacgcttaatactttagcttttgacttcaagctttaggtaatgcaaatgaagctattacatcaccaaagttaaatttttcttgtaagtatattctcaacattcacaattgagagctgcctcttctttggctggtataaggttttaatttattgtagcactttcaccctagaatggcaaaaaatgttgaaatcaattccatatatcaccaatacaaagtactaagtcaaggccgggtgtggtggctacgcctgtaatgcaagcactttgggaggccaaggcgggcagatcacttgatgtcaggagttcgagaccagcctgaccaacatggtgaaaccccatctctactaaaaatacaaacattagccaggcgttcatagcgagcgcttgtaatcccagctacttgggaggctgaggcaggagaatcgcttggacttgggaggtggaggttgcagtgagccaagatcatgccattgcactctagcctgggtgacagagcgagtctcaacaaacaaacaaacaaaaatattgaattgtacaccttaaatgggcgaatcgtatggtatgtatactaaatgtcaataaagctgttatatgaaaaaaaaatgctaacacacacattctgaaagtatattaaaagcaaacctacggccgggcgcggtggctcacacctgtaatcccagcactttgtgaggccgaggtgggcggatcacaaggtcgggagatcgagatcatcctggctaacacggtgaaacccagtctctactaaaaatacaaaaaattagccaggtgtggtggtggacgcctgtagtcccagatactcgggaggctgaggcaggagaatggcgtgaacccggggctggagcttgcagtgagccgagatcgcgctactgcactacagcctgggcaacagagtgagactccatctcaaaagaaaaaataaaaataaaaaagcaaacctacaatgtctcttacaaacacaggcaactattcaattccgagtttacactactgaaacacacatgaatatgacactaagagaatcacgtggatctgcactcttcaatcaacactacgtctctgagcacaagaattttacatctgatttccatttggggaaatagattcagaatgccataaaccagatacttcttgccttcctttagtggtcatttctgccattatcatttaagggaatggatctccttctcccaaaactgttaccctaagattacaagcttgtcctttaacttatctctgaaagcacacctctataacgggtcatcagtattcagtcagctaattagactgcagaagtacgtttactcaaatgtgaggagataaaattgtgaaatgtaagaggaagaaagaatgtcaaagataatccaacccaaactcttcatcttacagataggaaaatggaagtccaaaaggggaaagtaattttagtaacatggctaaactggtctagaaaaccagatcttctgatacctgatcccatggtctttctaatgccatggatgttcgggtagaggatatattcaggtagataacttatagatagccccatgtgtttgtatagcactttatcgaacactttcacctctattatcacacttgattcttacaatatcccatggaatgtttgagtatcatatatgattattcttattcccacagacttggaaactgaggctttgagatgtctggatctatcttagatcatttgctatggactagaatctgggactaagttgcttttgtctaagctgtgtgtttgttctgttgtgccgtattgttaattcatttctgttggtaaacaacacaaaggaaaaacttctataattatgtttctttttcatcctcaggtcatctatcctactttttatctaagctttggaaaatattatgtgctttccttttttttgtattttcttttcgtagagatggcagcagggggtagtctcaccatgttgcccaggctgacctcgaactccttggctcaagcgatcctcctgccttggcatcccaaagtgctgggattacaggcgtgagccaccacacctggcctattatgtcctttctttagcttgctcgtttaaccatttgtttggcagggggagtcagaactgtgttttacttagtcgattaactgataggacaatttaatatctaccctgcactggcagtaacccccatagccccgctctgtgtctcattctgtgccctgaacaaccttgtcttaaaaacattttaaaagcagcaagtatggggagatttcttatctccatataatacagaagcaagtgtagagtatggctacggaaaacaaccagcaggtgaggctgtgacataacaattttaacccaagcctcactgccacattgaggtatccttgttcaataaatagatcagaaaatatggtgtagtttttccctaacgctgtctaaacagcaacaacaaaaaatcattacccatagtatttcagtaatgtgttgtattgaatgcattgttttcgagggcgttttcaaaaaataagttgattgaatctcttttttttgcttgaagaatgacccacattcagaaagtatacagatgaaacatgttcagctcaatgcaattatcacaaaatgaatacacctatgttcgccatctaggacagtaaataaaacattatcagtagccctaaaccagattacacacacacacacacacacacacacacacacacacacacactaaaccagactacacacacacacacacacacacacacacaccgggttgggggagtggtgagagagagagagagaaagcgaatattatgttaacagttggggagtctaagtgaatggtttatgggtgttcttttaacatttcaattggtttaaaattttcaaaatgaaaagcttgaggagaaacatagaatataaccactacctcagaaatcaccaccctacctcacccacattccctctcccaatcactattcctccctcatcttaaaggtaactgctactctgccttataacactatggttgagttttgcctgtttatttgaactctataaaaatggaattgtacagtatataaccttttgtatctaggactcaacattgtgtttatgagattaactcatgttgttgcatgaatctgtcatacattttcattgcaatttgatatcccatttaaaatgtatactataatttatccattctattgttggggaacattttggttctttccagtttgaagacattatgaataaggcctcctatgaacattctttaatgcgttttttggcacacacgtgtgtacaactgtgtttggtatatactttgcagtaaaattgcctatgttgagggtaggcatatgctgagctttagtagatactcctggttttccaaagtggttgtaccagtttacaccatcattagcagtatatgaaagttctagtagctccacatctcaacaatacttgatacttgttagtctttaaaattttcgccattgcagtgagtgtgtgagtagaatctcattgttattttaatttgcaattgtctgattacttatgaggttgaatatttttacgtgtatttattgaccattttggatatcctgttgtgtgaagtatctattcagtctcttgcctattttttttattgattcatccttctttttcttattgatctgtaggagttttttttacatattctagtttgtagccctttgtaaattgtatgtgttgcaaatatcttctcccattttatagctttccttttaattaaattgtttttttgattgatagttcttaactttaatatagtccaatatgtaaatttttccttagggttaattcttttgtgtcctctttaagaaatctttcctaatacaagataatgaatgtatcctcttttattatcttctagaaacttactattttttaacttttccatttagatatatagtacacctggaattgaccttttgtgtaatatgtgagatagagattgagttttatttttcataatatggatatctagttggcccagtacttgatgctaaacattcatttagaattcatttgatagtatttcctttagagttattgcatctgtgtttattagttatattggtctgccattcttgtcaaggtttggtatgtggattattctggtttcataaaggcaagtagggaagcattgcctcttctagtctctggaagagtttctttaagattggtatttctgccagtgatatgatttggccttggaattttcctagtgggaaaatttataattacagtgtttatttcttaaatagtacagggctattccaattttctatttcttcttttgtcagtgtcagttgacttaaagcacactaagatactctaagattgctatggtcagcctttgctggtctaaaccagaggttgcaaactgaaatgccaacagaggggctagcctgctactgtaactgggcaaggctagcgaagcgtaagttaatgggagctggtagggactatagaatacatgtgccgttatagaatggtggctccggaaagttattgtcatgcaagaataggagcccagcatggacaaatcattccttttaaatgagaagtcagaaggttggattattctgtaaaatatctctgaatatttaaatgttgagtaattcagattaaaaaaaaaaaaactgtgtgggctaatcaaaacatttgtgcatgccaaatttagcccaaagtctgctagtttgcaacttgtactttcaactaatgaaaagcgtaatagcacagatataattccattttcaaataatataattcatttatagttgacatttatttaatttacacttaaatatgaatttgtcatttaatttaccatattaaaaaagtttagattttaagacatccaagtctgcaaataactagaatattttcatttactctcatgtttgtgtacttatttttccttaaatgttattttcatgatatacttagtgtcttgtggacattccaaaaaactgatttgacttaaattgtcctcactccaagctttaaaattgcttagttcatagcctaccttgcctaaagcaaacctggtagtctcatttcaagttactggattttttgtttgtttgtttgtttgcttttgccttgtttcttttcaaggttatatagagtgaaggaatatcagacttcttttaatttttgcagggaattcagattgctgtggattaagatcctatatataagatgcttaggatagaggcatcatgaatgaaaaattattcatatgaacacactttttagagtattatttttattcattcagcaaataatcatagctgccatactaggcaggtagggaccatgaagactactgtccttgtagtctaaagtcttgtagactaataagatatgtataactgttaaatagtacactgaaaatacaaccttaaacaatcaaaatatttgcaaattgtatttagttgacatgattgcataattgtatttatgtgacaattatatttgttattcacatatttagggagtcaatatgtacttaaggtaatctttgagctattttcaggatgaggtattagctcattactattaatactaccatcaccaaatgcattacctacttatctgcatttccaggaaaaattcaggaaattaggatttttaaaataataaaataatagtaaataagactgggcatggtggctcatgcctgtagtcctagcactttgggaggccgaggcgggtagattgcttgatgccaggagttcaagaccagcctggccaacatggctaaaccccatctctactaaaaatataaaaatcagccaggcatggtggcgtgcacctgtaatcccagctactcgggaggctgaggcatgagaattgcttgaacccaggaggcggaggttgcagtgagcagagatcatgccactgcactccagcctgggcgacagagtgagactctgtctcaaataataataataataataataataataataataataaacagaataataacctaagtgactatatttgatatatagttaagtgatgtttttgtagactttactaaactaaaaaataaattagcagttatttaattttctagtttataaagtacctacttacataaagttgcatatattacttcatttaattttaaaagaatatcgtaaaatatgtaggatagatttccattttatagtcaacaatacttattatttcaatacattatgtgattttttttcccccagtatcacagtgttagagcccaggttcaaaccagcattttctaactgtaagtctggaagtctgtctgcttactctatgtaagatgccttatgaagttcatagaggagacagctcagtggattcaggcctggtcttatattttgctgttcatcttgttttaagtgttatgttaagcaaataaaacataactttaaacattctgtttacttttaaaatttgatttagagctaacaaaaattagaatttgtactccatttacaacgaacagaacaaccaaataagcaaaattgtatttgcgttgtcaattacaataaataattataatggtatatcagagtgttaaattttgatttttttttttttgagatggattttattttattttttattttttttttttttgctctgtcacccaggctggagtgcagtggactgcaacctccacctgctgggttcaagtgattctcccgcctcagcctctcgagtggctgggattacaggcacccgccatcatgcccagctaatttttgtatttttatagagatagagtttcaccatgttggccaggttggtctcaaactcctggccttagatgatccacccgcctcgacctcccaacgtgccaggattacagatgtgagccgccacacctagactaaaattttatgttcttatatttctttaaggaaagcaaaaatgttgacagagagggttaatactagttatatatacaaaaaacctaaaaataagattttggattattctattatatgattattcatttattgaaaatcataaactaattgaatgactgagagcagcactaatgtgattactttggtaggaatctgtcctccaaagttgtcagttgtcagttattcttagcattttgaactgaagtctatgtaattaagtcacctgttgtttctgacaaaatgagcaaacacacataaaatctcttggttcgtcttcatgtctctgtggcagagaactgaccacattattcagttcctttgtcctttttagacaaaagccacctctacatggccctataagtcttcaattcaaggactatagccgttatcttaatgggattgtacttggttatctgataaattgtcgggaacatacccacattgcttcctttacctgacataaaatttagtcagctggggctcaacgattgaccagctttatcttgcacgtagtgaagggaaggactttcttactcctggatgtgcctaaatttaagcctttgaaaaagattgaagataccaattggcctacctgccctaagtagatgcttcccacagacttaactggtgaagtgcttgtctaaggtagacagaattttttctttagagaggagcaaacaaaaacccaaaaatactggcgtgttcttttgatgttctatttcccaattgatttccgggttcacactactccacaacatcttactgtcccattgcatcttaaccctctctcctctcccgcccccactttttttttgtctgtttcttctgcttccaccgttgcttctgctctgaagcaatcattttctctcccttcaaccaagggtggaattggcacacagtcaattggcttgggagactgcttactgatctgtcttttttgaacactggaatcttgacactggttatcattttgaggacagcctggtttggatatttatctattaagaggaatccttaattggtgtctttgactggagtatttgaaggagtctttaattgggaggttttaaggcaccagaaaagattcattaggaatgactgacctcatgttatataaatgagaaatatttaccatttgctgtacacgtaattgaagcatgattatacataaaagcatataattaaaaaatgtaaataaatacctaaataaataaatgcctataactagcatggcaaaggattctgatatcagctttcaatctcttttagtagagactggacaaatcagaaaaagaggatttatacctgtcctcctatagattatgctttcttctcccatcatccagttttaattgaatctcctcattgtgctttctttcaatcttgagctgcacaagttgttttctcctgtcagagcttttaatacacattgacaagaattattagtctctatctgcagttgttccaagtgcaggtttgaaataaggagtcgtcatcaatgtgctaacgcgtgctacttttggtatttatacaaagtgcctgctgccagttacttgccacttagaatgtgtttttcttttcctctcttgcgttgtgggagtagaaggattctctgtttcttttggcagacagagaaattttcagattggggtctaatgaaagaaataggttccattatacagatgtacagatgttctaaggtcacgatacctcctataatattcttatgtgaaacctcctctttatgttcaacctgtgtacgttacacttatacatagcaggcatagtagccatcaatattagttactttaaaacccaggcctcctaggctgtggtttgtactaaaacatcatattcaaataaaagcattccaatacaaagtggagaaacagggacaggcatggtggcttaagcctgtaatcccaacaggctttgggaggccgaggagggcagatcgcttaatcccaggaggtttagaccagcctggccaacatggcgaaacctgtctctactaaaaatacaaaacttagccgggcatggcggcacatgcctgtaatcccagctgtaatcccaggctgagttatgagaatcacttgaacatgggaggcggaggttgcagtgagccgagatcacgccgctgcactccagctttggtaagcctcggtaacagagtgagactctgtctcaaaaaaaagaaagaaaaaacgtgtagaaagaaagagaggatctgattaagctcacaggaacattgcttctcaaattttaatgtgcatacaaattgtctgggaatcttgttaaaatccagattatgagccagtgggtctaaaatgagacatgatgttctgcatttctaacaggtgatgctaatgctgctaatctgtggaccaaccacactttgagaaggaaggaagtagactattatatttactcattcacttgttccatgataactcttaaaacagactggtgactttaatacaattcagagcaccaaataaagattgtcatatgccttatttttaacctatcgtcttatatcaaaattatctgataaacttcccaagtgtgcatatatattgtcattttaaataggtttcaataaaatgaagattcgtgagtaagaatataggaataaatgacattaaaatctttctttataatttatatttctactttcttttgaaagaatttgtagtggcttaaacataagagcacaagatgagccagtgacaggaaaaaccaagtgcatctgacatcttagcttattaggtctagaagacaacctccattacttggtagcaagcggctgggaatattggtgttcaaagctgtgctttcctgaaggcaaaaacagcatcaaaatatgaaaagctttttacttctggcatgagtgataaagatgccgatctgagaagcaggtgaaaaaacttagcttatgcttctaaaggctaattttatataagtgttcttgtccagctgttcttggtaagtccagctgctagttgaacaggacaggtggtaatccctgttcagtggctcattatcacccagaggctttgatctggctaatacataatcaatcagcttctgaatattaatattcttcctattttcatttcacttgttttacctaaatttattttccaaagttccagtatgtttttgttttttaataagatttttgatcatttatttattttgacataactaggctcatgatatgccagctggagtttattacacccctgaatcacaaactttttttcttccctctttatctccttacaagatccaaattgcaaaacctaaggataaagttctaattttggaagcacaaaagactgaaactattttagaggagagcgttaatgaaaatcaatatctaaaatcctcattttaagactgtgaaccctatagtctatacttctagtgtcttcagagttgtgatatgcatacattaaggactaagaaacatttttttaaatagtcagatttgggagcattagatatgtttgtagagggaaaaatcaatttatgataaaaattactgacaatggtttaatttgtattagttttgcccacttccctgttatctcagaatggcacctccatggacagtggaatggtcctaacagcctaaatatggtaagctttaaaaacagatggcttggggccattctgcttattatatcattgctttcaatagcataactgttcttctccaatggccctctttgttgtttgcttcattactggcacatttctttaatatgtaatctataacattaacatgaaaatggctctcaaatactattactttctccatctgtgacccagtactgtttatcatcatctaatgatcattcttattgcagatggccctctttaaatgtttcagaatagcattttaaagacattgagggtgcttcctacgtacattggcagactgaatgttttaatatcgaaaatctcggtctacacgatgtgtgataaatgactggagatgcaaggcaccagtcagttccaaagcaaggtgtaagagggacaggaggagagtgataaaaaagaatacatactttgcgtgtgtgggtgtgggtgtgtgtgtgtgtgtgtgtgtgtgtgtgtgtgtgtgtttaagccattagatttatctttaaggaagcattatctttaaggaaagttggagtaggaagaacaaaatttaatcaaaagaaacagttcttggccagaggaggtggctaatgccggttatccgaacactttgggaggctgaggtgggagcattgcttgaggccagcagttcaagacctgcctagtcaaggtagcgagacaccccacctctgccaaaaaaaagaagaagaagaagaagaagaagaagaagaagaagaagaagaagaagaaacagttcgttattgcagttcttaaagaaggagtttgtgtttcctttctgatcattcaccatggcagtgatacaaaggagtgatatcaaattgataaatgagttccctaaggctcaacatatactaaatgcctatgctgaacttccaggtttcaagtccctagagcctctctgtctgaagatcctatcaccaaggattctttgtcttcatctagtactttctttctcctctctctattctttcctcatttgcggatgcttgctggggcctgtcaatcaaacatagatgatccctgacttacaatggttggatttaggatttttttacttgataatgctgcaaaagtgatacacattcagtagaaaccatacttcaggtatccacacaacccctctgtttttcactttcagtacagtattcaataaattacatgagctattcaatgctttagtataaaataggctttgtgttagatgattttgcccaactgtaggctaacgtaagtgttctgagtaagtttaaggtaggctaggctgagctatgatgttgagtagattaggtatgttaaatgcatttttgacttagaatattttcaacttatgatgagtttattggtacataacctcattgtaagttgaagagcatctgtatctgggttggagcagaagtattgctagtaatgcatccatgagtcaactgtttgcttaattggtatgctaccacacatgtcttgagcttgttcatcccatggcttgccattgtgttggaaaggaaggtgttacagcattgccgttaataacatttctaaatgggaccaaaaacagtattttctttatctgctagatctttttattttcttctttctctgtatacgtgagctgttcccaaaatttagcacacatgttttatgattctcaacataacgtttatggtccttaacattaatctcatattagaaaataaatcatgatgaaggtgaaatatagaccaagcaggggcagttatgaggaccaaatcgtcagtataaaacttttataattaatattttcatgaattgatagcacttgcttcagagagctaaactcagaaaaaagagaaatattctaacctgaaaatatatttttaaaaactcataatttaaggtagggggcaagtagatttggccatattttgggctttcttcaccaattcagacacgataatgactacatttgtatcctagatttaaatttgctagatggaaaagaaacacataaatataaaccccatctgcgcaaacaaacataaccattcacattcttatgcaggattctggggtaggggagggctttttttgtattataacatagcatgttaatttttaagataaaatggaaatatttttgtgcttttgttaatttttatgttaaaaatgacattttaggcacctaatcaaattctctgagttctttcactaaagaattttgcctaatatttgattaaattcattattattaaagatcaatggaatttctttcagtttgaaaagttgaaaaaatgagttgacacattgattcatagaaaaagttatgaaatttgagaaaaattattgaaccaattttatttaaaatacatatagatattatgtgtatctgccttcattttcaggataatgaatgtcagtgttaaatgtggaaacattctaaaattggaaatcagactccacttggttcaaagaacaccttattttagataagccttttaaaataatgattgaaatccagtcaatccataccctcacacataatcctcatgcatgatctttgtttttccctatctctcctctaaatgtcctttacaaagatgagaaatgttcttcccaacacaaaattcctttgattgtatattagaaagaactgacactttgcagcaaggtttaggaaaagctaacgtaagtagagcttctctgaaaactgttttaccaaaacatactggatttactgctgttaaataatggatttttttttttttactatttatatttgctcctcattgaaacttgtaaatgactttattagtcttaggcaacacatttcattttgcattggataaagatgcttcttcagtaaagtgttcatttatagcattgagaatcttgaaatataaccggtgtcatcaaagggtaggaaggtagaggcacagagaagtgattaatcacttttccctccaatgaatgatctactgtcaagttcaataatcatatttcatctataaagagcactttgagcaaagcctgttttgcacacgtcattacatttgattacaattaagtataaatatatgcctattatttagctctagttaaaatctgcaaaaatatagaaggcttgtgggtgatgtaaattggagatttgcataggtttagggtacaatattagaaaacactgtagttttatttttgctttatgactaaaaggcactagctatgttatctcgtttgttcaccaaactaaaaaacaacagctaaaaagcaatgtaacaaatttcctctaaccttcttaacccatccactgctgtcgcatgactctcacaaatcagaaataaagaaccatttctctactgaaggtcatcaactcatttgagggccatagatcagtaaaaaataacttagtctgagacattcaaatcacttgctttttaggtaaatattttggcttttaaaatgacacaaatctgaccaaaatgttactcagctttatgggaacgggattcttttctagataatcttagggacgatcttaactcatattgtttttgttcagagactaggtctaatttgttagaagtgctgccatgggatctcattctactcaacaggagtgcattcttcttatccagtatccactaaaagtcactcctcctcccatgaaaagagttgccagtggaaaactcagagaaaacatgggaagggattggtgatgtcatataaggagattagaaaacatttttttaacgtttaaaaagtaaagagatgaattttaaaatttacaaaccaataagtttgatgttgatgagcaacaaaatcctggaaaatgacatcgtactgattattaatgattacataggataacatgctgctgggaatcagcgtgatactctcaaaatctgccatgtcacatgcacctcattttcattttttttatggctgcttgatggttagatgagaagactgttagagacagcataacttaggattttacaccacatttttcaagttctcttttgagaatattgggtacaagataaagaacagtggggctggctaataggctgaatttgaagctgattaaataatgacatctaaagaatgtcaattaatagatctagatcaacacaaaatagagtctctgtcgttggccctgcctttgcacatggctgtttcttcttcagtcatctcttaagctcaactcagccctctgcctgaagacctcatttggccagttttgcccattcattactactgtgaactctcttttgttatttttttcctgttttattctgagaatggattgagctagatatgtggaagttatgggaaagcatattttaactaaatattaaagaaacttttgtaatcgagctctccaaaaaataaaatccgccactttgaaaagcattaaactccctgtacagtagattttcaagactgaaatgactgtctcacccctaaaggcaatttctgtattggatgagaggatataattcattaacctttaaggtcacttgtgaatctaatgttttgatattttcggaattaatcagaagggaactgacagcatgacctgaatctgtcctatatttatgtaaacatcctgtgtgatgcacctcattctttgtgcagttgtatgcatttttgaatgttaaatttgattttagggcaaacgcttttttaaaaaaattttaaaataaactttattaaataaaaatttacacacagtaaactgcctccatttaaagtggttcagcgatttttggcagatgtgtacttgtgaaaccaccactgcagtcaaatgacagaacgttcttactcccccaaaagcctccttgtgcccctttgcaggtcatttttcctttcacccctgattctaggcaaccactgatcgtctttctctcactgtgtattactttgcattttcaagaattttctataaatagaatcatacagtatttttgtatgtatctggtctcttatattcagcataatgattttgtttccagcttgaggatattatgaataagactgctaaaaattgtatacttgtttttctaaataccccttataaaatcttacttttgagaagcatattactaaaataacttcccaggttatatgtgtatttgttctttctgttcatttcagcattatcttattaacaagcaactggaggacatgcaccaaggataaattgactaggtgctaactgaatttgtgagaaaggcctagtttctaacgttctttcttgggagcagatgtgtaacagctacttttgctgtataacagaccaaccccaaaacttactggcttaacactgaggtcagcaaacattttctgtaaaggacaacatagtaaacactataggctttgtggagcactttgcatctttgttgcacattctttttctttttacaactctaaaaatgtagtcatacttagctgagaggctgtacagaagcaggccatagaccaaatttgaacaatagttcataaactctataacacaatggccagccatttacttagctcactatttgatgggtggattgggccatttatgtggtgtgaccagttgtactactgtttgccaggcatgcttatgcatctgtagtcagctggcagctggataagctatcgtgacctgactcatatgtctgatggttgacaggctgtcatctaggaacagatgcaactaggtttgtgtgtatctcatcatccaacatgctagttcaggctagttcacatggaaacttctcaggtttctgcttgtgtcatgtttggtagtgtccattagccgaagcaagtcatgtcatagggccatcccagatgtaaggagtggggaaagactccacctgttggtgggaagagatacaaaggcacactgcaagagctggacaccaaggagagggctagaacttttggccatgttgcaagatatcacaaaatattcaagaaaagttacaggaaggttcctctgtggactaaattctcttctgaatttagatgtaggtaaaatggagtgtgctgttaaaattcatgctttgtgagtaatcattgctaggctaaactgtttgtggcttcacagccaatggtagacatacagcatccataatctagtgcttttaaaaatataagaaatactgattacaaacatagttaaccacttattagtactgggaatttaatgaaagctgctgtgattaaatactgaaaaaagaaagattgtgggtttccttctggtaactttcaaagctggtcactcttttgaaaggaattttattcttaaagctgttatttttactcataatatgcttaatacccccatggctgcagactgtctaaaatgttcctacaattatatgagaatacttttaaaaatcatgataattatcagtcttcatggacacttattcagattaatttccccaagcacttaataggatgaatttataagcattaaatagaatggggaccatccagccctaaaatgtgaccattctgtcaggcacacacttgccaatttgttggcgtggacctgagcacactagcaaggactttgaattaggtctcactgcaagatggaagcagaagggcatttctcagtttatgttttgaagtgttttgttcagacaggcaacgtgcagttgtgtatagtagtgtgagctacctgttactccccttaacaatacttttagcagcaatgtttttcctcctgcaatgtgacaatatcaccatgccatttggaagaaaacaaaaaggctgagtgattcctggtatactcccaaacagccacccaaacgaacagctggcagagaagacaccccctaaaacttggagcagattctcagcccctgcagcatctcatgtggttagaacttcagacttgatgaacgcctccccaacttgctccccctcctgaatcttttaatcctcctccagtctcttgtaatgttccagcccttaccagggaataagactgcaaactgtcttccgtcaacttctttccaaatcctagtctagagaaattataatgatgcatgattgtccagtgggcatgtatagtttgtccatttctttatgtagtaaagcctgtagctttcatcttttttgccaatccactataaaaattaattttatatgtcatcctggtacacacacacacgcacacacgcatctatatctgtaaatctttttctgtctattcatgcttgtatgattgaaagaaaagtttcacaaaacattacttacccataccaaatagtacactttcatattttttttttttttttaatttcaacttctattttagatacaggaggtacatgtacaggtttgttacatgggaacattgcatgatgctaaggtgtggggctcatgacctgttacccagattgtgagcatagtacccaataggtagttttataacccattttccccactccaacctctacactgtcatattttctattcttttctgtttcattaagaacaatactggtaatgatccactatatagatttcatgacgtactaagggttcatgacctgcagtttgaaaaacactgtagttagttttatctccacctcaggccaggtcatcagaaagctgcattcttagaccactttgccttggcccccataagattgcctcaactcaggtgtacctcggcatcatgttcctggcttatgtcgaggggcactgaaaactgctgaagggatttttctgaaagtcgacaccatgcagtgtctcccaccttagatcccatgcagatctgtttattcaatctaagtcattccagacttggattttcctttgtttcacttacactctttcctccttatcaataatccaaataataaaatcgatcatatttccttttatattttttcttttgctttgacatctacaaaggccacaaccaaattatacccaccttttaaaacacttttttactgaaatatattaggcatgtagaaaataagggagatgctggttaaaggatatgaaacttcggttaggaggaataagttcaagagctctattgtacaccatggtgactataggtaatgaaaatctagtatagtcttgaaaattgctaagagagtagatttaagtattatcaccataagaaatgataagtatatgaggtaatgcatatgttacttagcttggtttagccattccacagtgtatacatatttcaaaacatgttatacatgataaagatatacaatttttatttgtcaattaaaaaaaaagaaaaaatggcttaaacttatacagttcagtgaattttcacaatctgaacacactcatttaaccagcatccaaataaagaaacagaacattaccaacctttagaaggccctttgtgtgcccttctgatagttacctgtcctccaagggtaaccacaatcttgattttgaacaccattaaatattctggcctgttcttgtcctttatataaatgaaattgcacagcatgtactcttttgtgtctgacttctttaaacctggattcatccatgctgttgtatgaagtggtggattgttcattctaattgctatgtaatatcccattgtgtcaatatcctgcagtatattatatactctactgtggatgggcatttggtagaaaaaaatgatgttataaacattctaagacatgccatttgatgaatatatgtatgcattcctttgaggactatatcaaggggtagaatttctgggttatagggtctgtgtgtgttcagcttctgtacattcttccaaacagttttccaatgtggttgtaccagtttgcactcctactaacagagcatgagagttgtagttgctccacatcctttctaaccctgtgttgtttgtcttgctcattctggtgggtatgcatagcaaaattttcataaccacatcatgcactgtgatcttcaaagctgtgttctggctgggcatggtggctcacacctgtaatccctacactttgggaggccaaggtgggctgatcactagaggtcaggagttcgacaccagcccggccaacatggtgaaaccccgtctctaccaaaaatacaaaaaaattagccgggcgtggtggcaggcacctgtaatcccagctacttgggaggctgaggcacgagaattgcttgaagctgggaggcagagtttgcagtgagccgagatcgtgccactgctctccgacctgggtgacagagtgagactccgtctcaaaacaaaaaacaaaaaacaaatctgtgttctaaattttcctcgcttcttaaagttttatgctatttatatttccttagtgctgggttttattaatttttaagagttatacattgttataagttgccctaaagcctttacagaacaatgcacagtataaatatgtacatagtatatacacaaatatgaatccatgaatgcacagctaatagggccattatcaaaaatcctacacttttccttttcctctagccctcacattcaattggctcaaaagtagcattgattttattctataacctgtcatgaattcagcctctccacaaattcccagtgctcctttcttagttcagactttcatccactcttaactgggctgttgtcatcatctacttggcatacatttccattctgatccctaccctcttttccacccttgtttcttcccacctcaaatttaattctattttaaaaagaaagatattcaaaagtacaggtggtgccaattttttcttctctatccatcatatgcaaagaggcttccaattctttgtcgacctgtttctaagggatgagagtaggtcaagctgtgaggacttcaattcccacgtgaaggtcttgttcatattaactcaataatgtgctttgatgtcctaatggggaaagtagtattttctgccagttagccttcccaagatatcaaatccaatattggccaaatacatttttgaattcctaaaaagcctaaactgatgtcgtaacacagctgtatattaacataaaaactctgtaccttagtaaattattaatatgagcgattagctcacagagtcaatgtaagaaacttgtttcaactcttcatattctagcaaaaagaacacacacacacacacacacacacacacacacacacacacacaaaacctgatttaagaactaactaggtgattaaagcctacttagtttttaattgaagtgcatattctctaatcccaagaggccaaactaatcacctttccctttttgctgctttttttctctctatttctgtaattattataatctgtctgatactgtgtttagctatatatgggtctatcttctctcattagatcataagctccttaaggaaaaggccatatttccttgggatcccacttaaaaaaaaactggattacaatgttgaaatttttatatatttccatgtcattctccaaacactccccagtttttaccaaccataaagaaaaaatgagaagagtttaaatgataagcaaatacatatgtaagtgttccataaatacactatgtttgaagttatttaaagaacttaatataggataatatttaatagagaaacttagtctagatagagcacataaaaaacattcttggaaatttgtggataaataaaagttccttgcatctgtattttcctttcatcttgaaaacatgccttgacaaaagtaagccagagctggagtacaagattcagacattggtagatcattaattggttaaactggattttatcttatttccccttttatggatccctgtctttgtgtggaattcctgccacttgctggctgttcaaggcttgccaccaggagactttctccatcaagctaggggatatttctccctcactgtcccccaccaaatcaatattcacttgctctctgactactccaggtttctgctgtctgagaatatgaacatggatataccttttaacatgcgtgaatactattcatattttaatctcggccccactgaatgatagcaaacgctgtgaattttatgcctatctcaggctacagctagtgccttatcttgcacacacacaaaaaaaatcttacttttcctacttgcttccttcttaagtgtaaaaagcaaaaagaggaaaggtgccttttgtaaactgctaaagagcagtttacagaagagcagtttactaaactcagacctctcattttccctcacacgacaatctaaaacagaatgttaaagtgaatttatttggttctgtatacctaactattcctgaacatactgagttctcttttaagaaatcatacctgcctgacaggctgctttgcatgaacacagcattccccagccttcaaattgctgtcagagccgttgtgtcattttgacccacaatatggcagtattatccacattctatagatgagttaacaaaagcttccaagtggttaagtgacttgcctgtaaagggttaagtgacccacctctaaggggtagaattggtctggacactctgcccctctatcttcatgcctttgctataatacacagctacgcttgctgaagattaaggaagctgcttttgataaagcgtgattcttgtagatattcatctcaggaaaaaaaaaaagaaaaacgctggtgtcttcatctgtagcatttgattattacattttccttatctgtttcaacttaggatgacttccttgttcgcttaattgactggtaattcctttgtttacttttttccaaatctcaagaagcaagtctagagtattaacaatggttacattagcatttaaaatttttttttgaaatttgagtatttcagaaaggggtaatttaggcaggcatgtatgtagaactttgcattttaattaaaaagactcaaaatgaaatgaacctctgacagtaacagatgactacttctaaaagctgcattactacttgatatatgctcagtattttcttgtgggtaagtcctacgacttgtttcaagaaaagtgacaggactaaaacaattaaaaaagacaaagctgctgttttttaatcatatgttcataaataaaactaggttgtgaattgtttccagagaagcaattgacaaagtatgagtaaatcactctaagaactaaagctgcgttgattttttttaatgttcaaccaaacatctatccttgtccaatgatgaattttctttgacaaataaatatttacaaagtatgaaatatagactctgtgcctttcctaaggccaaagcatactgtttaaactaaaatttaattttttttctcacctcaaatacaccaaaataagaacataactaaaaattaattctctcttgtagtagactgtccattaatcttttgttagataatattagcattgtgagtgtcaggtagaaagaaaaactgtaatttctagattgatcagaaaatgtgagtatttatggatttgaagaaaacaataaagtctgataaaatagaattttctgtaacctcccttatggagtcaagaaggaggaatctttcaacatcctcccattttgcagtgaaaagtcttcatgcagtaaatagtttgcttgggtagatcaaagggttaatttacttctgatttgagaagagacgcagacttccctgatttttttacaaaaatgtgttgtgtgggaggaaggtagaggcctcagaatgaattcactaattggggttttcacctgctgtgagtctaatcgaatacaaagccttatttgtagctgaagaggaagagagattatgcagagtgtaagaatttctgcccagttttgaaattccgcttatttggcacaatcggtggggaaaggcagacaaatagttacaagtttgagctgttaaggtagaccaggaatgctgtagtcagatatacttgaaccacattaaccagtgatccatttttagcaggaggtggtgtgggtcatatacatgggttatcgctatagctggcaggctaataggtactccaaattctttcccatgaagcaaccgtcggcctgtgaggttaatgaagtatggctttattttagtgaagatgctaaaattcacatctttttagatgttcggcttgatataggtggctctgtgaagctttgagaaatcttattaaaagaaaactgtgtgagagtgaagcagagctcgactttatctggaacctgtctggtgaaatctctggtttagatggcagctggctcacagagaactttcctgagtctggcttactctgcctccctaaagagacagggcctggaaaaataggcttttgtgtgggtgtgaagtgctctgtgtctgaacttagaggcctcttcatttgctggttaatgtgacctggctggatattcttacatccagaagatgttggtttcagattgatctagggggattgttatatatatatttcaattagtatgctataatatttgccctaaccagcaatgattcaccatacaccaacccatttgttagatgtctgagtcactgttcatggttagtacttgtactatgcaaagaggaatatggaattcttatgtctttattgtatacccaaatgctgacattttactatagaatatgtattcgagttaattgaagtgatacctatactctaaatgaatttttataaagtgatgcaggttatactaaaacttagggcgcactatagatagagagaagctgaaccctaggagttggtgaagtctctcgggaccatccctccaggcaagtacccagttcaaaccattccttgtctttgtcctttcctatgccactctgcatttttacacagctagcatcaggccaacattgaaaccacatgcaacccagaaaggaaaaagatgtgtttgtggaaggtaggaacagcctagtttcagctgttggcccttcacagcctccactagatgggctcattcgaacccaagacccttccaacagtacactgcaaatccatagctccaattcagacatcttccctctgagctcaagactcagatgtccaactgtctcttggatacctgcacttttacatcaccacctccaattcattatgttcaagactggattcatcatctctttcctaaccctcttctgccccctcctcctgaaattcctagctcggagaatgctactcatccaatctttgttgtcactcaaggacaatggtccttaaccttcactgcatattagaatcacttggagagtcttagaaatcctaatgtccaagaccaattaaattagaatctcagggtggtgagacccaaacatctaaatttattaacaatccctgagtgattccaaagggcggccaagcttgaggactattgctttacttcttccctctcttccattcatacatccagtcagtcaagactcctgtagttggaaccttattgtatcatttctccacctcctctgccactgctgtaattcagatcctcctcatactgcaatctccttgtacctgatgtctgaatttcagactcttgtcttctgatcaagcccccataccattgcctgagtgatttttctaaaagacaaaccggacagagccacactcatgctttaattctttcttccttaaaaagctccctcatacctttcaggatacaagtcaaactccagattgtcacactaagccctttccagtttgcccatttctctaacccttatcttgacattctctccaaaagatcaagcagaccgttgaagctcttgtaaagaacaagctggttgcatcctttttaccctcacatctgctgttgtcaccatcataattgttgatatgcctttaccctcaaaaggccagaagctctttgtgggcctacagaggaggcttctctgaatatttatccaatgactgagtctcatctgctttttagccccagagtggggggatctgactttctcctctatcagtagtccccactcagcatcaagtctattgccccagagggtggctttggctggatgggtctcagtttggtcagggtcctgggagaaacagatggtacattcaaacggaacacttgaagagagtataatgaaaaggctatttacaaggctctaggcaggctaggagaaaaaaaaaaaaacaaggaatggtaaacttttgcccaaagggataaagggaggaatggtttgcgtaactggtggaatgctattgctgtaggaaaggactggccaacaagacttgtggctgcaggtcaaggaactcagcagctgccaggccagagatcagtaggagggaacctgaagaataaatacccaaacatcaccttcctcctgtcctttcctctccttctgtaggcctttcatcactgcctcccaattggctgaaagcaaaaggaagccaaacggcaggaaagcctgattgatgtccccacagaggtccaacctcctgggccacagagcagaatggagaaggacaaagaatagagatggatgggagaatggggaagcatcctgcacagtcccttaggtcagagatgcccttattctctaaagataccctcaaagtttaagtggttcaaagaccagagttttggctacgggaaaatgtactgggtcgccttctttgacctcatcccatttcatttcttctttatctctatttctagcaaatttactcttctctgctctgagccatcagtgagattgtctatgagtatactagaaaaaacacagacctttctcacaggaaaagaagccatgtctcttcatggcagcatagcagaatagctaagcgcatgagtcttcgagctggattccccaattccaatccttgcaccattctagacagtggtactgggaacaagtaggtcatggctgattctgaagtcaaaattttagctgaagtttgttctggtagcagagcttcaggctcttttcatgtccgtggttcatatcaaaacagtaataataataataataatataatcagaaggaggagaagaagaaacatctactataaacaaacaatatattatcatacatggcatcactacataatttacatatgacacgaaggtatatcaattatgttcttttccaaatgctttcctctaataagcaaaattcataatctgactgcaattgaacaacaaaacagtctctgtgatgcccgcgtcatttcttaatactttcagtatttaattataatatgacgtcaagatttgggaacaagtcttcaagtgcctataactccagtctaaaaaagaacttaaagatgtatttttgaggattgccatctgtcaatttttttaaaaagtctgaatagtgatttcttattccattcttttttcttgtcaacagattattcttagtagttttctaattggacactgagaaaagagacttaagcatttatagagaagcgtgtcagaactcctgaattttgagcaggtaatttaaaagtgtaaaacaaacaaacaaaaaacaggaaaggaagagagtgacaaatgtcttactatccaggtgttacaaatccttagtttatcgatttgtaatatttacaaatgtccatgctctgaggcttctgtcttttcgttgaaataaacataaacagtagttaagtgatttgccacactgacacagagattggtgtctctgatttactgcaaagggcactacttcctcattacaggacactaatccctcttccccaaggatcggagcagacctagaatatactattagaccaagggacaacttcagccaaagcaaatcttagtgtgcccccctcagaccgtaatagcagctgcctccacaactcactagcttaaaattgctaaagggcaacactaagtaatctcagtgtatgagccagaatgccagaagaagtgccatatttgcttaaaaatagcaataccgatcatacttacatgcacatatctttagtgataacatttacctttatatttggtttgttaaaggtaataaagaatcctggcattcccttttgcttttgtccagatactttatttttgcctcttttgccatgctatagcattagataaagcaaaacgggtgtgcttccacctaaaacattctagggggaaaaatgttgagcagaaaaggattatttcaaaagaagccggatatggtggcatgcacctgtcatcgcaggcacttggaggctgaagtgggaggattgcttgagcccaggagttgggagaccagcctgggcaacacagtgagacccccatcccttaagaaataaattttaaaaaggggaccacatttaaactgtagaccgaagtggaatgaatcaatcggaaaggagagtggaaagcaaatgtttgaaagaaaataaaaagaaaagcaagccaacaaaataaatggacaaagaagggcagtgaaaatatcactaacagtttatcgtaagatgctctttggatgctaatctaaggtgttatgtgaagtttgcagaaaattcttgtgctaatgaaggctttcttcttcttttgagtatttccaagcttgaaataattgtgtgtagttaacttctatcatcatactgcaaactctaaaattagaattatttgaactgttcaggccctgtaacttttccaataaaatattctattagaaacaagttccttctagatcttcctaaaagaatactaaaggaccaaaccgtgcaacagcactggtggtattgtcttaatttagagagtccataccagtgattctcaaacattagtatgctcagagtttctggttcaataggtctgggccgggcccagggaattttcatttctaagaagttcgcaggtgatactgataactgctgttcccagggtctacattttgagatccgctgctatgtcacaaatccaaatccaaagtctttttaacaatcccttttagcccaggatgagcctaacggcaatttcacgtccttatcgccggccactttaatcttcaactgaggaggaagggagagtgagaattatgtatataatttttttcttttattttttaaaaagaaaactccaagcccacactcttaattatctgggatgaggtcatttgcacctgggtcatttatttagacaacaagtagtcttgctagaggctttaaggaggtgttagcagagcggtgtgtggcttccaggttcctgggtctaccttaaatccccatcctctttctttctttctttctttctttctttctcttttctttttcctttccgttttgaaagccccaactgcccagtctctgggtgtccgggttcccaggtccctaggtgggggcggagcccgacacggccccgccccgtctgcccgcagcgccccctccccggcccgcccgcgccggctcctccgcagtgctttcagctgtgagcttgggcggcggcggcggcggcgctccactttcggggagcccggcggctctgggaagctcactcctccactcgtacccacactcgaccgcggagcccttgcagccatgagggaacagctcaaagggtaagtggatcgcggccccggccccgtctgatggccgcaatccgtgcacttgtggcgcgagcagggggcaagctgaggcggtcaaaacttggacaggcgcggcggctggacccggggcgccgggcggctgggcgtctaggaacctctcccgcgggttcccgcggcgcggctgcaggtgcgcccccggggtttctccccaggcgccgggctagtgggggaacctcttccctcggctttgggacgggctcggagagaaaaagctgatttctccccgtccccagaggggataacgcgttcctcacgcggggattggggccgggggagcttttcactcctttccaggctgccagtgtggacgtgagcaaggctggctgttcctaaatcgtcgctcttactcgtagaaggaaggggcgcacgcggcgctaccttccattgcactgcaagtgccaaaaggtcaactttctgcctgatttcttccgaggattccaactgacatttccctcgctgcattttctaccgtgctcattccatgccccaagacctgcagaaatcaggaaagaaagaacaaacaactaaagcccagaagtcaaagatttcagggggtggggatttttgtttgtttgggcttttttttttttttttttttttttgcccttcgggattgggtgtggagtcatttctagggtgttctctcgcatttctccaggtgtctgtgctcatcttcaagcaaagtttgtcactcccaatcccagcacggcaataaaaagggcagaacactttgcttatattagtcaaatttgaagttaagtttgaagctttaaattgaaggggtttagttgctcgagggaggcataatattaattataaactgtttttacatcatgaaaaaaatccatccgatttaagtggtgaacttttaagtggcgtctttaagtgaaatctacatttttccttgggcaataaactcttcttggtcttctgctttatccctgtcatctctccttgtcacccaccccccccccccccacacccccaatcaacctttctttttttgcctagcttttttattgccttttactcaagcccctctttggaggatacatttgctgttggagaagcgagtggagcaaatgaagcaacacggttatatgaaaggtctctgacccttgaacaccgtggaattggtttcagtcatcattgtttgatctccgattggacacgaccctgaaaagaaattgctttgaccaaagttgagggtgggtaggagttaaaccttgaaaagcaaataaaacggaggacaactaacagctggaacagccaccgaggcaatcatctttgccctggctttagccagacagaataaaatggtaaatatcccagggaacaagaaatggggaactagaatggatttctgatgcttatattgatgcccacccctccaaacccctgccccacggtagcagaaactttaaaatatattttaccatccacaccctgccagtattccagcaatgcaagccaagttcaacaattcagcacgcaaatgccaaggttcctctagaaaaagagtctgatcctcagattaaagggaaatcatttgtgtgtgtggatcaatgggctccagattatatatgaaaccaaactctaatcctctgcaaatcgcaagagaacgctccctttttatattgctgcatagcgattagttttctccctgggaagtagtggacagatagttttttaaaaaggcaactgtttggaatattttcagtaccaaataacaatggtggcagaagaaatcttattttaattaggcaactgccattttcccagccacagcagtagatatttgttactttttataagtgtttaatgtttgtttttaagaaactaaaaaagcaattccaataagtctgattattccagcactgacagcaggaacagctctgaggcagttataataaccttgcacactacttgaaactaaagcaggtgagagaaaatttaaattgtatggtaggaaattaggtcagccttgtgctcagtagagtaatgctttaatttcttattattgacaagtaggtgttgctggggtcttttgtcatagtcgatgactttatattttaatttgcatcagggtcctatcaccgcctcaaataaaagggaaaaagattatcatggtttgtagaaagaagaaggagaggggaaatcttcgtataaatactgctcagagaggcatatctgatgccaggctttggaaccagcagggccaaaatcaataacattttttaaagatgtaaagagcgttttaaggattatttatgaagctgatctctgtgttaatgtacgtacagacttgtgatctatgttgaacattgttgttctcagaaaggccaaacaaagatgtacccattaacatgtgaacaggtttcagaatttcccttttggttgttcatggtatatggggagtgtatttccgatgtggagagtgaaatgcagaaaagagacaattaccaaaacagtgccacccacccttccactccctcctccctagcacaccgtgtttttctatatcgtctgcatattccaggtaaatgtgggctcttctcatggagttactgagaattctctactgttttagaaggcaggcacagagtaagaaacgaagctgtaaaatcggtattgatcacagacaaaaatgtggtttgtccttcaaggtacaagatagatatgagttatgcagatttgtgcttacagtttcatccagtccatattcatagttcctatctattttggagggttaaatgtgtcccagtggggctctggattcatcacaggtagaaaataacaagccgtgaagtgaatatttggttcgtcatatagttaccaaagaatctgaaggttttttggctacgttgccaagcatttttagcattaaatgattaaaagactatttttctcgttttaagaattagtcacaccctttattcttttcttctttccacttgtgctcacttcttttgcttagaactgatttgcaattgaagtgaaactaagactgcaaaggtgaaatctaaatctgtttttctagttcttttgcattgcttagaaataaaaggtttgtgtgttgaaggtgagaaaggttagcttctggaattgtttgaggagttcatttatctatgttattcaagtcccccagaatcacagataactgggagaatagtacctatcaaggactagtatcttaactcacaaatgggcaatggaattgggggcttagaatttcctccttcttccagtaaaggagattttcagttttgccgaggactgatggattaaaaaaaaataatttctaaaacccttttcataattttaaccttcaaaataaattctttaaaaaggcaggaatgtatgtatgccaacagtcatgaaatttctttagaagatggggagctccatgaagccctcattcattctatgtgggattctcctgtaaattgtacacactgtttccctttccttttagaactgtgtttggtacaggtttatttcttgcctatgttcctctaatttgaagtccattccagatggtggcttttcaccgtggttccctgtctctgtctgatcaggcttatcagctcagctaaatgtttttctgcagacctatagaagatgctacggtccttacaaatatcctggagatgggacattgttgttacacagtgtgactagtaagggcctgtgtgagcccttgtacatgtgggcacacatgtgtgtgcttcctctcttcgctcttcctttctccctggtgcttatatcacatctggatgacctttggaaatagaggaggcctgaatgcagggtggtctcaatagaaggtaacctttccttgctctgcacttatatatggaattggtatacactcactttccgagctgagaaatgcctgagaacaagcaacactttttccacgaagctgcaagctgcagcctccttgtgctgtgcatgtaaagtaccagtcctgcctaccccttctccagatcataaaccggcttggtcatggggtgtcctaaaaccccttaaagcatagagaccatatctcctgctcttcttgctctttaagacttgaatgtcactctgttatattccctcaactgataagcccttgttatagtcctcaaatgtgagttgtctctatggaaaagtaaaactgaaataaacgtatttggaagacagtgaaacagcacttcacaagtgaacattttcttgcaaattgatttcagtagccctcactgttcaatcactgactagtaaatattacagggatggtctttgaagttgtacagtttggatgatttccatatgtctttatgaggtttatgattgtgttccatttcttaaaccaacttaaacggttgttttaacttattttttttaaacataggtgataacatgtagtgtgttggttttgctctctaggaagggtctttcttcgccttgattgacttaattacagttggatccacatctatattgtaatcaactaataacagatttgcttttaatagatgacaatttgaggggcacatgataccaaaagcgaccacatattgagcaccaaatggtgccggtcacttacctatttcaactaatcctttaaccctccaaggtaggcaggcttgctttaaatttcaccgccagtagggcgcagagccctaaaattcaaaacatacgctaaggccattcgacattgttgcctctccagactcctctttctgtgtgaggcccctgtactttctggtcctctggaaatgccccagtttaagcgatttctcttttttccttccctccccttcccctcaaaagtttatgaataggctctgcatatgagtacccaaatatcattcagaactgcattttactgtatcaaagcctgtcatgcaatccctgaaaactggaaatatgacgctatggtgatttatgtagatgggccaaagtaaggaaaagtatatgtagttatttctccagggtttattcatgtaattgaatgaggaacaaaggtgttttgttctttttgtggcaggagctgatagccagcaaccacacttcaagaaatggaagacagctgtgaatgcttcattcaggcccaagtaaatataggaagaggtgtagtggtgtatagcgtactgcgtttaaagaaaaaacactctgaaataatgggaagaaggaagttatgatatattagtcaggcagtagatataccttaagctgaaatgaaatacaggtatcatggatatgagatctgtatatgtagaggaaagagtaatggaaaaatgtcaggggcagtgaaagcaaatgagaagtgagatgatttatatttattgaactaatgtccggtatctctttgacagagttgaataataatcagttgtcggtgtcctttctgtagtgttccacattggatgggtgaagaagtcctgatagtcgattattgatcacataacaaggtcaatttatcataactgaagtgcgatcgatttgtgggtgcaaagaagaaacaaattctggaaccgaataatgtttatattgcttttctctttggaaacaaagcagaaaggggcctttctgcttgtaagataaacatttcttcaatacactatggaagcgctttgaaataaagattccgaatggttcaaaagcaaaaatcatgttgttgttattgttgttttcttttttcctgttttcttgactactcattgtaaatgctaaagtctttctttatgttttgtgttttagccacgagactcaaacaacttgctgggaccatcccaaaatgacagagctctaccagtctttaggtaaggacatggccatgtttcctccaagttaaatgacaggtgacctttaggataaagtagtttgcagtgtgaaagttacttgctatataaatacatcactagattgtttcaagggtgaaagcagtggcaccttcctatccaaaattgacagtcagctttctttttatcagaggttccttaaaaacaagttttagaagttgattgattcctaaaaattcaatatacctgagagggcctataggtctttgtagttctctttggtgcctaaaatgatggaaaaacagttgcaatttatggctatttttttttttcttcccacgaagatagaaaactgtttcaggtgcttgttgatttcttccgtgtgaaaccaagacaacccttttgccaaaccacaaatgttgtgtaaaggaattttctgccgtctttccggtgctcacaattcctaaggcctggcgggtcattaatgtgaacatttaaatgatttctttagtatggcttgttttgtgtttatgtaagagcctgacagttctgttttctttcccctcataacttgaattattttgaatgggtacagagcatacaaataagggtttgaaaacaccagtctttttacactggacaaatgtccagatgtctggtttgtcgttttagatctacaaggaatattctgaaatgagttatcttaagttgcagcttgttttgggttttgttttgggacagggtcttgctctgtctcccaggctggagtgcagtggtgcggttatagcttattgcagcctcgaacccctgggctcatggcggttcttctgcctcagcctcctgagtagctgggacaacaggaatgcaccaccacacccagctcatttttaaaatttatttttatttatttttgtagagatgggtctcactatgttgcccaggctgtgtttttatgtatttttttaatataaaaacgtcatgtcttttctactttttcaagcctgcatttctgtgaatggacatattgatagaaaaacacataaggcgatctctttggatttaaggttatgtgatgaacactgtgggaatcagggtacttaaacataaattctgtgtaggtatacgtaagtggggtgtgtgtgtgtcagggggtacgtagctattactgcttttgtgtcatagattctcacaaaatgaattgcagctatagagacaccaaggactagagaagagatattagccaaaaaatggttttattaaacatttttctaattataaatgattaaatgtcttctagaaaacctgaaaaatgtaaataaaaaacatgaaaaaggaaaaacaaagtcacttatactagccagagagatccaatacatttcgagtaatattatgtcatttcagtctggttataagtgtgtaaacgtttaaaattttaaataaaattgggatcagctaattttcaagtgctacatttccagcccctacagaatgtttttggcttataattgtggactgtttataccacaggtggaaaacgtgaatgcttatcttttggcaaatgagagaatgaaaaggcttcatctgaagtgggcagcagctgtcctgggcaagctggtctttctatcccagtactcccaggacccctgattgtacaagagaaaaactagaaatctgtccacaaagagctaatttaaattagtctgtgggcctcctgatcgtaacctgtggtttacacagatttagcccacttctaacatttcctactctaattacagtaatttctagttgtaatattttaattcactcttattttaaaatcattattattatagaattaatacctattcatatttttgaagtttaaaaatatagacaggctaacaataaagaagagacaaatcattcgtaaccccacttcttagagttagctggtgtttaatagtctaggatcttcaaaaatgtctttctatacatatatttttatagaagttgaatcattctgtcttataacttgctttttttttttccactggaaagtaatgtattaccatggccatatttccattttgttgtatagtattctctaccactttcaattactctgtaatgagaaattgcaaacatgtttgatgaaaagctaattatggactatcaatgaatacatgtttgctcctttaatacaaattaaatatacatttaatcattatatttctaaaattttctccatactttagatgtggtgataaactcaaaactgataatctctcatgacttgtgacattgggcttgtgacatcactcaattttgaattataacagaattttacagttgcaggggattttagaactcatttattgcaaactttctcttttatgaaatcaactttcaggtataatttttatataataaaaggaagtcatcgtaagtgtgtgatcaattccagccccctttgaaattctgtttcttgctagcccaataacaaaccacttgcaagtgaactaagtgttgaagtttgcttttcacctttcagagttaatatttccaatagttttgtaacaatcaaacattcgttgggcttttatccaagtggtgattcatcagataacatctcccatttattgcgggcctattgtatgttttccacatgggatgtgccagcaaccaacctgcatggtggatggtatcaacatccacatttcacaggacagcgaagccaggctcagggaggaattgatcagggctacacagctatgtggggctacacctggatttgtcctcagttttctgttagtactttcactgttctcattgattttatttactaggtaaagtatatttatgttggttactacatacctgctacacgtatataggaattgatagttttacctatgaatagtaagttacttgagtggtatttctggaaatggtatggtgggtcctaaacaatgggcactcctttcactgttgcctggcacatatagaatgattgttatatggctacatccttttttgtttgtttgttttttgagacagattctcactctgtcacccaggctggaatgcagtggcacgatcttggctcacggcaacctccgcctccccaggatgaagtgattctcctgcttcagcctcccgagtagctgggattactaggcacccgccaccatacccagctaatttttgtatttttactagggacggggttttgccatgttggctaggctggtctcgaactcctgacctcaggtgatcctcccaccttggcctcccaaattgttaggattacaagcgtaagccacagcgcccagcctgcctacatccttgagatcccatataagattaactaccagcactgcctttccccctctccaaaattacagtgtttcagagtcgaaacataagcataaaatactgaaaagaaacttttcattgattttagtttttacttattagtttatatttttcttcttcaagaggtatccctttaggtccaaattgctctttgagctggatgaaatggtcggaagccttcaactacagtcagttggtgaaaggtatcttgaaagcagaaatggtgttgtggtctggcgtgtcaaatgtttaagaccacatctagccccctctcctaatcgaacctgaacctcatgtctctggtgaggtgctgaaaatatcaagatgttgctttttccctctgtacccccactccaggcatactctaccgtggaagctacagtggttcacagtatgcatggtaggttacacattcctagagacgcccacttctaaggagatttccattctctaatttgccaaagttcccaagcagcctgttcaacacatgtttatgttacctgccttgccctcaaaagcattcaggtgttcccctgcacccagggtttgaacacaataggattagaaggtgaaaacattttgttagaactgaaaaagtagcaagtatttactgatgaaaagctataatattgcttgagatattaccattggagctctctaatacattctgggtggttttctttttcattccttttccactgattttctacaatgaatttatattatttacagttagatgtttggtaaaaaagtttcttcgtcgatacccccattccatttcttacttagtgtctctatagctacaattcattaactaatgagaacttatgacagaaaagcagcagtagccacacacacacacacacacacacacacacacgccccacatatatgtagataatttatacttaaggaccctgattctcatggactttgtcaggtaactttaaactcaaagagatcatctcatgtatttttagtctgtatgtccagttgtgaaaaatgcagatgtagacattttagtggtagagaaaatagaacttttttgattaaaaaatagataaaaaacaatataagataattaattttagattatttccaacagatctaaaatggctttgcagaggaggtttccatcaagtgttagaaatattgtgtttccctcatttatcggctgtgtacctacacaaaaaattgagagaaaatattgccagagtcctacacaaacaaagcaagacatagtaaagaaataatttaaaggttcactatgatgactgaacagtcattaggaatttgagtccccagaaaattttttacatcacattaatggtttgacaaaagcattgtcttggattttcacagggaataaatcactaaaagcaactggaaatcagttttctttcagcatttgtctgtgactacccccaatagtcatagaatggtagtagagaatagtagtggagtaagtgggatataagagaccaagtgtctcatgtctattttttgtagaccttggtgctttatctttaaaatgtgaggatattggggctgggcacggtggctcacgcctgtaatcccagcactttgggaggtcgaggtgggcggatcacctgagtcaggagatcaagaccttcctggctaacatggtgaaaccccatctttactaaaaaaacaaaaaattagccaggtgtggtggcacatgcctgtaatcccagctactcaagaggccgaggctgaagaatcacttgaacccaggagtcggaggttgcaatgagctgagatcacgctgtagcactccctcctgggcaacaagagtgaaactccatctcaaaaaaaaaaaaaaaaaaaaaaagtaacgatattggacaagtgtctaagatttttgtttttcttttactttgggctgagggtggggcaggctgtttctaaacttgctgtgatcattatttttcaagaggtacctttcggctaactctgcagacaagtggatttctaaaaatgtaatcattcctatgttttaaaatgtacattctgagaaaacaaacaacaggagaagattatgccacccatccgtgtcttacaggctgagtgaggcaagctgttgtcaaatagagaggctcttgagatatttcccattagactcctctgggtcattcatttgttattgagagggtacattcttcgtcactccctagaagtaataatatgtttgattcatgaggtgagttttagatttctattagcatttttacaaatgtaatggaaagactgttccaataggttagcttggtgatttaaaactctgagctcttcaaggctccagaaagcatttacaacatcagtagatgttagatagtaatatgctctggaatttattttgaaatactaatataatattgatttacatgaagtgcaattatgtggttaaaagcctgtccttttctcacaatttatgtctaggtccctaagttcattactgaaattttaagaaaatattttttaaaaagctcaccctgcccccacacacataatatatgctgcttagagatacttttattggggtttttttttttttttttgacagcatcttgctctgtcacatagactggagtgcagtggcctgatcatggctcactgcagctttgaacacccaggctcaagtgaccctcccacctcagccttccaagtagctgggactatagccgtgtgccaccgtgtctggctaatctttttttaaattttttgtagagatggaggtcttaccatgttgcccagcctggtctcaaactcttgggctcaagcgatcctcccaccttggcctcccacagctctgagatcccaagggtgagccactgcacctggccttcacaatttccaatgtcaaatcttactacaaatttaagtaatcaagagtatttacatatggacagatatactgaccaacagagtagaatttaggctgggcacagtggctcacatttgtaatcctagcacttttggaggccgaggcgagcagctcacttgagctcaggagttcaagaccagcctgggcaacgtggtgaaaccccgtctccccatctctacaaaaaatacaaaaattagccgagcatggtggcatgtgcctgtagtcccagatactcaggaggctgaggtgggagggtcgcttgagcccgggaggacgagactgcagtgagccgaggttacatcactgcactccagcctgggcaacagaacgagaccctgtttaaaaacattatttcttagcctgtcttattgggggggggtctcttaattataaatacaataaaatatgtggttccccaatggttcctttttaaattacaatgtgagtttttttgcatttgtgatactgtcagtatagtacaagaagaccagtttatgaaggagacatgtaggtaaaaataggataatgtgaagagagaatcgctgcacttcagaaagctgattttatttcaagcagtttattaaaatctagatgcaccgtatgttctggtgttacttattccaatttccttttccttcattgaagccctcttaaccacaagtgttttctcaaggggtactggttttccttttcttaagttatagcgttcttcagaaggatctagccctttttaatctgttgcccaatttttggatcctactatccagcatgatgctcacctgaatgatgcgaaagctctcaattttcaaaaatggacttctgagtgtttttggaattcttaggaaaagtggtctttaaaaaccataagatttgaaggcagtctatcagcacgtagcccttagcttcatgtctatggtttgcagagagcttcagaatgttaaaatgagggtttaattttagggtctgctgggcctgaggttaggggtgtgattcttcagcagttctagttaggagaactagttaagtcctagttaagtcaatggggctaaaagctttttaaagatacatcaatatcattataaatcagcaatttgcaagagagttaaaaacactgctatcaaaatccttgtacctctttcctcagcttgcccaagaggaagggatattgtagttatttgttcactctcctcttttgataggctttctacattccattaagtattccctcctgaggatgctcttgggttagaaactgcaggattctgaatgactatgaattccttccttttgcattaggagcttgtcctaatgcttttctcagcatattttgtgaactaaactgttctccactaagctactcaatatttagctttccttggctcttgcttctagttccttaatatattgctcagtgttaaaacctctgccttttgactttttactgccataacgctttgaactggaaaggatagctagattcagatgccagctttggtgtgacctcgggcaagtcccttgctttctattggtcttcattttcttatatgtcatgttggccagtgatctttcatcattaaatgactggttttgttttaacccctggctagagtaaagcttggttgtatgaatgttgtcagccctaaacccccagttcctctttgtcaccaccaacctaaaggatatgaataataggataatcatatttattaatttaattttttttttttgagacggagtctcactctgtcgccaggctggagtgcagttgcacgatctcatctcactgcaacctccaccgcccgcgttcaagcgattctcctgcctcagcagcctcccgccaccatgctcagctaatttttgtatttttagtagagacggggtttcaccatgttggccaggatggtctcgatctcttgacctcatgatccacccgcctcggcctcccagagtgctgagattacaggcgtgagccaccgctcctagcctataatcatatttgtaataattgtactttatttgtgtagcactttacaatggcgaagagttttcagaaataaccatatttaatcctcacacagctatagagtaggtggcatatgacctggattttctatcaatttcagtttcagattttttgtcctgtcatccctttgagtgtccttccagtttttgatttgggaaataatgctaccataccggtggatggggcaacttttcccttctttccatttggacttgagcagactgagactcaagacttgatttgatttatactcactatggtagaagataaggaaccaagtccagaacacacattttacaaactccgagttctctgttctcaaaggaacatccattactcttagcatgatttataaaactgctttatcggcataattaaactggaatccatatgacattctttattccctagctgacaaaattagcacaggagatttactcaaatttgttattaaggctgttataaatgttcttcctttactattcagcttataaaagaaaaaagaaaaataatctgctcttttaactttgattaggatccattgactttccccatttgtaaaatagaaatgtaacttccaaatcaaaatttatggcattttaatggactgttctaaatattataatattttttcttgttcaaataacttgatttaaagcttctaattgaagaacataatagatatttctgaattgcatctctccaagcttatttcagaaggaaactcaaaaagaattgttccttagactttgactggtttacagttttaaaagagctgccaaattgtagtttactgatctaaataagaggaacattaaggttacacctgcagctagaagaaaagtgctggatatgtacaattttatgtagctggatctgcagaagatgatttttgcacacagagtaaaggcatctaaaaacgtgtctgctcttattcagacatttccaatatttcttttttaagcccacaagtctgattacctctgtatgtctcttgggagctgcaattttgctggaaagagattcagaacagtcagagcactcacataaaatagatagtttttaaagtctgtaccctctacggtagtaataaaatgacctaaaaatattctgaaagtctctcttatgacatagtggatgaatcattagcttatttatgaattggtgatattctgtgggaatgtttcaaaatttgctattccacaaagcgttcatcgcttgcataactccaggaaagtcattacaccccctcataaatagaagcttatataacggagacaaatgttgcttatattgatatatttacatacagatttctttaccaagcattaattttggtaagaaagtgattgtttttatattttactttcttggtctgtaaagaggctatcactttaaggccaggcatggtggcacgcacctgtagtcccagcgcttccagaggctgaggcagaaggatcccttgagcccaggaatttgagtccagcctgggcaatatagcaagacgttgtcttagaaaaaaaaaaaaagaagctatcactgaagagcagtgcttctcaaactggtgaagggccaggtttttgttggtggtgggtttttttttttgtttttttgagacagagtcttgctctgttgccaggctggagtgcagtggtgcgattttagctcactgcaaactctgcctcccgggttcaagcgattttcctgcctcagcctcccgagtagctgggattacaggtgtgcaccaccacacccagctaatttttgcatttttagtagagacggggtttcaccatgttggctaggatggtctcgatctcttgacctcatgatctgccagcctccgcctcccaaactgctgggattacaggcgtgaaccactgcacccagccgcggtggtggtttttaacatactacacatcacagatttttaggtggtgctaatgaaactgacaagtatgcattcacaccacatgtaactcaacagtcaagttcaacaacacttgacctcgtctgtaccctgctccatgagatgaattcattgatcatgaatttggatgtcatggcaatgtcaaattgctatagaagttacttaacacactgtccatatctatgcttgtgaaagaccatattttgagtagcactgttctagagcacttaatttttgaaagtataaatgtaaactcaaatcaagtgactcaggtcgggggaggataattaaccaaacaggaacacctgaaaatgttatttatgcggtttaatgttttgccagttgagtcaagttcaggcagaggagggatctattttctttcccacttggtagctctccttagcaattgttttagaagacaaagcatagaaatcattgtgttacaggaaggaaccagagattaagcggcagagccactgctgcctagtttaatgtctctcgcaccccctataattaaatataatgtatataatgtgataagtttaaaatacaggtttgcttttatctagaatataaactgtgatatatgcactctttatggggtgcattcagtgggggaactaattgattatactgtgactttcctattgtcactttatgagtttaggtttggaggcaatgttttgcagcaacaaaattgttcattgactttgaggctggatttaaattctgattctgtcaccagttctctgtggtcaaaaaggaagccactaataattttaaacctcagttatgtgatgtattaaatagttatgatgagacttatcttgtgttgtgaggattagaatgacatatgtaaggtaacagaatgtctgatgtagtaactgctcaaggaattataattgctattagtgatatgcattattattattagttattattatcatataccagtgtctctccttatttaataatctattgggttcctgaattgagataccaagaattcagatagtgagagacacctaggtttaggtcttcacatttgacactcaaggagccactaaatttttctgaagtattttacttcttaaccaaggtgataaagatcacctgatcacaatttatcctaacttttggaaagcatacacgtactttaatttgacatgcaaattaaaataatacattttgtactgtgttgtttgccctcccccaattctaaaataatatatcattcaggataaaaaagactacactttgggaggccgaggcaggtggatcacctgaggtcaggagttcgagaccagcctgggcaacacggtgaaaccccatctctactaaaataaaaatttaaaaaagccagaagtggtggcgtctgcctgtagtaccagatactcgggaagctgaggcaggagaattgcttgaacctgggaggcacgggttgcagtgagccaagatcgcaccactgcacttcagcctgggcaacagagtgagactctgtctcaaaaaagagcataaatatctaataaatgatggtggtactagtctgtggtagtggaggtatcacagaatggctgtagagatgaggagggctaaaactgtgaaaagccttatatggtatgttgaaggttttttatactaaggtttttgatttggaagatgtatcaatcagggtctgcctggtcagaaaacataaaccctctagttatttcaaacaaagggaatttaatgcgggaaattggttactcaagaatggaagtgctgagaagccacacacacagcatgaagtttctgttatacctagggctggagggacaatgacaagaggtggtatcaccagagccccagatgtcatgggcatcaaggcggagttggaacctttggccagctgggaccaatgagggaggggctccgagggagctggagccaggaaggagacacagttagccagacctattgccggaggtagaatgaaaaaggaagtacgcccggcttctcctttccgcctgccctctaggcttctgccagtgactcctattggccaaacttacttggaagccaattggtaagggagcaggaaaatgtactgtaataaacagcagagcagagaaaaggcagagaaagtatcaaaaaccaacaagcaaatgattgaagtacaggagatcccatggacagtaaggcaaccaaccctctatgcagatatttcgggaacaagaaacataaaaaaactaaaaagctttcataggagtttgaggtgacatagataagataccagaaggacatcctgggttcaaaggaaactgatcttaaaggagaggaggtagcaattaaaacaaattatctgcagagaagtccaaacactaaggataagcttccatgcatttgatgaaagtacttgcgacgtttacaggtgtttatgctcatgactctcaagactaaatacagacataccttggagattttgcaggttcagttccagaacacttcagtaaagcaaatatcacaataaagtaagtcacacaagtgttttggttttctagtacatataagttatgtttactctataatgtagtctagtaagtgtgcaacagcattatgtcttaaaaaacaatgtacataccttaatttaaaatactttattgttaaaaaagctaacgatcacctgagccttcagccagtaatgatccttttgctggtggagggtcttgcctcgatgttgatggctgcacagcatggtggttgctgaaggttggggtggctgtggcaatttcttaaaataagacaacaatgaagactgccactcagttgactcttccttttgtgaaagatttctctgtagaatgtgatactatctcatgaaaccacttactttgctcatccataagtagcaactccctatccattaaagtttgatcatgaaattgcagcaattcagccatatcttcacgccccacttgtgatttcaattttcttcctgtttccactacatctgcagttacatcctccactgaagtcttgaacccctgacagtcatccatgagggttggaatcaacgtcttccaaactcctggtaatgttgatattttgacgacctcctatcaatcacaaatgttcttaatggcatcaagaatcacttccagagattttttttttttttttttttgagacacagtcttgctatgttgtccaggctggagtgcagtggcgtgatctaggctcactgcaacctctgccttcctgggttcaagtgattcttctgcctcagcttcccgagtagctgggactacaggcgtgtgccactacgcccggctaatttttgtatttttagtagagacggggtttcaccattttggccaggctggtctcaaactcctgacctcatgatccacctgcctcggcctcccaaagtgctgggattacagccgtgagccaccacacctgacttccagagattttccatttactttgcccagatccatcagaggaatcactgtctatgtcaagctatagccttacaaaatatttctcaactaataagagttgaaagtcacaattttttcttaatccttgggctacagaatggatgttgtgtaagcgggcatgaaaacgtgaatctctttgtacatctccatccaagcttttgggtgacaaggtgcattgtcagtgagcagttatattttgaaaggaaacctattttgaacactaggtcttacagtgagcttgaaatattcagtaaaccatgccgtaaacagatacgctgtcatccaagctttgtttttccatttatacagcacaggcaaagtagatttcacataattccttttttttttttccttccaagacggagtcttgctctgtcacccaggctggagtgcagtggtacgatcttggctcactgcaacctccacctcccgggttcaagcaattctcctgcctcagcctcctgagtagctgggattacaggcgtctgccaccacacctggttaatttttgtatttttagtggagacggggtttcaccatgttggccaggctggtctccaactcctgacctcgtgatctgcccgcctcagcctcccaaagtgctgggattacaggcatgagccactgtgcccggcctgatttcacataattcttaagggccctgtgatttcagaatggtagatgagcattggcttcaacttagtcaccagctgcattaggccctactaagagatacagcctgtccattgaagctttgaaggcagtcattgatttctcctctagagctatgaaagtcctagatagtatcacctttaaatagaaggctgtttcatctatgttgaaaatctgttgttcgttgtagccaccttcatccatgaccttagcttcatctggaaaacttggctgcagcttctgcatcaatgcttgctgcttcatcttgcaccttaatgttatggatatggcttgtttccttaagcttcttgaagcaacctctactagcttccaacttttcttctgcagcttcctcatctcttttagccttcatagaattgaagggagttaaggttttgctctggattaggctttggcttaaagaaatgttgtggctagtttgatcttctattcagagcactcaaactttctccatatcaggaataaggctgttttactttcttatcatttgtgtgctcgcagggtagtacttttaatttccttcattaacttttcctttgcattcacaacttgactgtttggcatgagaggcctagctttcagtctgtctcatctttcaacatgctttcctcactaagctcaatcattaatagcttctgatgtaaagtgacagaggtatggctctttcttcccttgaacacttagaggccattgtagggttattaattaccctgattttaatattgttgtgtctcagaacaggaaggccagaggagagggaaagagatgggggaacagctggtcggtggagcagtcagaacacgtatgacgttgatcaattaagtttgccatcttatgtgggtgtggttagttgcaccccaaaacaatttcagtagtaacatcaacgattactgatcacgattcaccataatagatataaaaataatgacaaatttgaaatattgagggaattttcaaaacgagacacagacccaaagtgagcacatgctgctggaaaaatgtccatagacatgctcaacacaggattgccacaaaccttcagtttgtaaacaatgcaattttcacaaagtgcaatacagcaaagtgcaatttaatgagatgagcctgtaatgagcctctttaaagcaggaactgtcttcctcatctttgtcaccagtgcctggtgcatggtagcctctgaaaaaataattgttcattgaatgaagcacagtagagcaagggagagtgattttgctcgggaggaaaacaaataccactcaagaagatggaaagatacagatgagggttttctaaggcggattattaaactggcaagatggaactctggagagatggagttctttccagaaagtagaagataaagcctcaaagtaattaaaatagggaatatcagttaagttgtagattttattggcaatttgttatcttagcaaaaccaagtgaactgctattctggaattaattttgccctaaaaggaataattaattgataaggagaaataagacccgtaaaaagtgtcactatggattcagaatttatatgacaaagaaaggaaacactgaacacaatttgatgtgctgatggcctcgttcgttcattggtttcctgcttcagtaaacatttaagagcgtgccatgtattttcaaactttagggcaacaggctaaaaatatcaaggagaaaaacgtttactgagggtatagaagtttttatgatcttacttttattgaacattaaaacatggatgttcattctagaaattttagaaggtgaagtgcaaaaacaaaatgaaaatcacctcacatctcagtacccagaaatagccactatttacattttaaaagattgcttccggtcttctttcctatgcatttttatatagttgtttgagataatagaatgtttaaagtgttgtatcctactgtaatcataagtcttctcttattcttagttcctcagagatgttatttttcgctagttgcagtttattggggtaccacttttgtaaaaaaatatttcccaatttttgaaaattgtgacaaagaaaagtcaaattcgtgttgaatttatggaaggaaatctttaagaatctggaggcttattactaacaagcttctgagaagaaagccaagtaaagtgttataataccttctgtccaacaagctacttatgtataagtgatgttacagaataaagtcagtgtggtcaaaaacagacagtcagttatcagaaagttgataagtaacatttatcctatgaaaaatatagctatgaatttaaatcaatagttttctaccacaaatatcttaatggataaaattttctttaccaaatatgtatggtgtcaaggtgacaaggcaagtatccttgtaaactttccgaattacaggaacaactttgcccttcttagcaagcaattttatacagaaactcaactttatgatgggtttctgtaagttttaatttttataataactgatatgtaaatatttagttacctttaacttatctctccaggtagaatggctagcagactgttttatcttctcaaaacatttgtgtgtacagttcccatgttcttttcaaggttcttgcttctaactgtcagttaaggcttttgtagcctcttacttcagttacattttctggccaagacgcaattaaagaatatagagctgataattatttccatagtcgtttccaatttttctactgttccacgtaagactttgaggaacacctttatgcataacacctttctacatttgattcatgtaagtggaatcactgagtcaaatggtgttaatgtttctaagcttcttggaatgcactgcctgaaactttctcaaaaggctgtagccatttacactcataatacttcaaagtgccaatctaaccatgtccttcccagcatggagtattatttttacttttgctattgtaacaaggaaaattaaaccatctcattgttaatatttgtgtattttttatttctagtgaccacaaatgttttcttttaaatatctgctgggtgtttttcttcttttttgagtaatgtgaaaacaaaacgaagttaaccaaacacaactcttccaaacttttctgatataatacacacttttttgtgtgttatgttgaggggctctagttggtaacagcctcctggttacataaatactgtacagtttaattttttttcagctaaataagccttatccctttatccatccttagtggatctattatctacccattaaattaaattttattctctataccaactcctgtttcttcacattttttaaatatatgcagagccctaaattacagtggctgtcctaataaaaggctattcagttattaacagaaaaggaagattgcttcctgcctcttgggtgaggaagactcatgtataccatagatatggtcagtttacatttacagttttctgtgaggcattgatttttttcccccataaatatggagtacttagaatgttcaaaacctttctctgggtaatagaatgcacaaaagtataaggcatgatccctgttcattgcccaagctggcgtgactctggtcatgcagcggacttcatgatgtgatagaattccttgcctatgagagtgaaggagatggtaccaggtctacttgtggccggtggtggaacacttacattattctaagtcctttctgtctgtagaacccaaatgacaaccatattattttatcttctcttattgctagtggtatcgtttattaatgccaacgtatacccattttgcttttcaaggttactttagatgtcttaggttggaatgactgaaggcttatacattcaaatttatatatgacacacacacacacacacacacacacacacacacatatcttattgttgcctgctatctttctacctgttgtataagaaatcctttgaaaaaagcctatgtcagcttcacaaaagatgttactgtgttttgggggaaataaaattgggaagtaataaaacagttaataaatgttacaagaccgtgtacaccaacttaaataagattaaggtcaaacgtatggtaccttatataggtaggaagagcagtattaattagaataattagggagagttgtttggagagtggaaaaaaacattgttctaggaagaaattttgtaatactcaggtaaagtaaaatgtagggccaagatattccagatagtgtagcagcataaacaaaggtatgaaagactggcttgtttgcgagtcagtgaagacattgttctctgagaatctactccagatttttttttttttttttttttttttttttgctttttgagacagggtctcactttgtcgcccaggctggggtgcagtggtgcgaacatggctcactggtgccacaacctcctgggctcaagtgattctcctgcctcagccccccaggcagctgggactacaggcacacaccgccatacctggctaatttttgtatttttggtagagacagggttttgccatgttatccaggctgttctcaactcttgagctcaagccatctgcccatctcggcttcctaaagtgctgggattacaagaatgagccaccgcgcctggccactccagatttttaaaagggaaatctgattcagtgcccctggggtgaactaagtgccttaaattatagagtgagaaatttacattgcatttgattggcaatgggaaaaacattgttaaatcttcagaaaagagaaataatgaagtccgtcttctgtgttttggaataggaatttggtgggtgagtttaaggacagttagagaggggagagattatttcgttttgttttgaggtaattgacatgatgagggtcttaggatagcaatgggggaaggaaaagggaacgtgactccagaggtttttcttaacaaggtagaattgccagaaggtaatcacagattggacaggttttaaagaaaaagggagttatatgtcttcaaaatttgaaggcgtggtgacacagagaatggtgataccattgaggaaaagaggaaattgcaaactgagcggagcaacagggaatagatatgaatttgattgaattacatacttatgggtttatttacaatttctcttcttagaaaaatttatttttggtggctcatataaatgtatgtgctgccataccataagcatatatttctcattaatcctttcaaaaaccctgtaaaagatatttgtatctccattgtgcagatgaggctcagagaaaataggtaattttctcacattgcaaagcagggatttacgtgtacttttaactcctaaaccagcgatttagcccctcagctatactttcttcctgagaggggacagtggcattttgaagaggaaatactctaaagccatttgaaaaggggaaccgaagaaagagtttggtccacagcatgataaaaatattacttgcacttttattatactttataacaagaagtacaggggcagagaaaggttcctaacttttactgagcaagtatatatccaagatacatctcctctttggagcttttgagatacactatctctcttagttttgcaacagccctaggaataggtactattactgttccctttaaaaatgaacaaaaaaaaaatgaagcttaggaaagttaaggttactagaccaagcttattgggagaccatagtgatgaagaggaagggctttagggtcaaatggatttgaattttacttcttaggcctttggtttccttatttataaaatgggattgaaataatgatatcacagttgaaggtaattatatgagaatttatgttatttattgcaaacatagggtaagcacctaataaatgataacctgagaatttatgttatttattgcaaacatagggtaagcacctaataaatgataaccattattactattattttacagcaaagacataaatagagcccattaagttttcttctctacccagtagtttttccattgtacaatagtactctcctgaaggacagcgggtgaagctaagaatttggaagaaatcccagatagagaaatcttgaaaagaagatagatagatttaatactcaatcattaaaaaaagtgcacatgactttaagaaatcaaacattgtaagaggatagtattgaaaagtaagtctccaaccactcttggtatcaatcccctaattttacttcctagagacaattaacagtatagtttttatgtttgcttctgtaaatatttttgcatatacaaacatacacataaaaatatgcccatttttgcacattgagagtataataggcacaatgttctgttctttgatgctattaccttttacataattaacctggagttttttttttcctgtagcgcaatagactgacagatggtgaatgaaaacttgcactatggagagttatgtcagtgttttaataagacaggaacccagaaataaatgtacgaagtttaacatcagcatctcgtggcctttaagtcaaattggacaaccattcaaagcttcataaatgctaactgcttctcatgacttcagaagcaaacaaaaaaatcattattcaaatgggaaattaagctgatcatcagaagtacagagaggatgtcctttcttaaaggcggcacgtctaagggagtgtctgagacctggcttcttcattcaggatggaggctgctgctactctttaaaagaaatgttcacatccttacttcctgacttccttctataacacagtctgcttcacaacactatgactttatatgtcagagcgggttaggaggagctgaatcttaaaaatttaagaagatgccaaggtctagaaaccactcttaacaggggaaaattagaccctgcttgcttttgggaaaatttgttttccagtcagatgtttgtcaaggttaaagaaattcacgggccctctgttcgaattgggagcaattgggagcccttaagctgaatgagtagacttgaagtcccacttagaatgagcctttatatttttgttctgtggcttgctcagggaagggatacacacttggggagaaaaagacttggattctagttgatgtttttctcctagctgactagggaattcagaacaagttactaagagctttctagtccttagttctctcatttggaaaatgaaaattttaaattagagattctatttctaaggcaccatgtatttcattttcttaataaaaagtatatatattcccctaaagaatactcataagaaaaaggtagagttaaaatttcccaaattatttaattcctggttgcccagtaaccattaaatttctcagcagtcaggcaagaaccacattcccaccttgagacaagatttaggcctttccaaacttaccctcgggctctgttccaagtttatttgtaagtcagttgcatacaatttggaatgaaatgtgttataaatggtggttaggtccctaagtcacagaatcttagttaaccctcagagtgcctgatatactgcaccatgtaaatagaaagcagctgtatgtttctatgggagcaaaaaacttttgtaggaaaaatggtagaaactcgtactgcaggtgttgattattcagcaaacttctctagataaggaggactgggaacttcatcattattggtctagttacattcctggtcactccctcatcccattgactggtcagtttccctccctgtggtccttgtgcaagggtttctgcctcaccccataccctctgctccttgcccggtatcatggttcttctgagggtactactgcccattcacccttgtgctaattaggattacactgggtaaggaaagacatttgttctgtagcggagaagcggggaaggccatcagaggctttgagtgtcagaaagatttggtcttgaatgcaggctctgggatgcaaccgtagggaagttaccaaacatttgtgagcctcattttatctttaacaaagctgataatacagaactcagggccttgtaaggactcgatggtatcaggtacacacgacatttgcccttgagtgctcagcgaatgttagtattccttctgccatcggcctgtcacttccgtttttctctttggctctacagggaatacttgcatacaaaaagagctgaagtaagagtcacctacatcttaggaaaaaagggctgctttaggtttatcctcaagtagttttgtccaggattctgaggagaataaaagctgggtcagatccagtgtgttgaaaagaaagctgaggtgagaagtgagagaaacagagaggcagagaaagggggaatgagccctgtctgctatgaagtaggaggcaatccaaaagacaaggaatccgtggtcattgccactgagaggagaaagaaggcaaactcactcctgtgacttcagggccatccatgaggtgggcagaggaactcagagtctgcccgattcttggattgaatcttcaaattggtaaagctttatatcaagcaactcccaaatgcagcatagttttgaggtgataaagaagagtcttttcaaggctgggcacaatagttcacgcctgtaatctcagcactttgggaggccaaggcaggcagatcacttgaggtcgggagttcgagaccagcctggccagcatggtgaaacctcatctctactaaaaatatgaaaattagctgggcgtggtggtgggcacctgtaataccagctacttgggaggctgaggcacaagcatcacttgaacccaggaggcagaggttgcagtgagccgagatcatgccactgcattccagcctgggcgagagaatgagactccgtctaaaaaaaataaaaataaaataaaaagagtattttcccggagtaccggtaatattggttccagattcaaatgtattgtccagatacacagagggtaaacaggaacgcttcaggcatcctttattaaaagcacctcagtctatgtcagagggccaggcagtccattatctaatgaaaatctcctaccattgatttattttatcataactgcagctgctaagtaattttgtttaaggaatgatttacatattagtgtcttcagcaggatctcatcattagcatctagtctccagaaaagttaacacataacagtgaaaagaaaacattctctatcacatgcttctgcatgcatgggcaatttgagtcataccacctgttcccctcttctgttatgctagagtatacaaaaagcagagatacgcatagtttactatgatcctagatgcttaaatatcttgaattgtgttctatcttggactcattattcatgcataaagactcaacagattctcttcttgcacctctcaaacagcaacatcaacaaaacccaaacaatgtatctttcctaatgaggtgaaagcatgcataccagcctaagacagaaatgttgcaaaaatgttttttgcaagaaggtcagtttgcttttcccatggtaactaaggttaatttctactgtggttcattttggcatccattttattcatgatgattattagagggcatggatattgggggtgtgttgatgttgggcaccagagaaatggaaagaggcagatggaggatgcaaatcattttcactcagaacctaaaatgtttactgttagataaagggtagagaagaatcttaatttgactgtcaaaacatatgattagttgaagttaccaaaactatttttttaaataacatttatcttaagagctataaataaagaggaaattttgcactagagatgaagttatgaacatttcattaactctaaagagttaatgaaaaactagttgattatatgtgttcatttataggttgacacgtgaatttccagagaagtaacttgtatgtttttaaattccaatccttatcttacatctgggcagaatcagacttgtgaacgtcccattccaaacaaatggctaaacactttgcagactttgtctagaagagtgccttacccatataagccctctgttataaaattgttttaaacgttaaattagctgtcaagctgttctgcatcagtggcaccacctggtagcaaggatggagatctctgccacccaagatctctttagtgctcacgtcatttctccaccgcaaggaggattgcgggggtggacgatgctccctatttagtcttctgcattttgttgcttacagttcaattaacatgtcagttagagatgacttttggttgcagttaataaaatatctgaccaattgtatcttaaacacagaggagttgatattttttgtagaacaagaagtctggaggcaggtagttgagagctatggaagagttccgtgatgtcatcagagacctgggccatggtttattctgctgtaccatttttaacgagtgactttggtcctgatggttccaagacgactgctgcttctcaggcaggaagaaagagaaaggacgttcagcctcagagtctctttgtctttccatttgggaagggaaatcctttcttgcagatatcttctcaagcattggccaaaactgtgtccacacagcttcccctggctggatcagggaattgagatcctccagcctttgtagcagagaaagaccaaggagaaagaatttgggaaggggtgttgagtgagccaacatacagttatctgccacaattaaatacagcggattcaccttgcaaataagcattctttttagaccatttattttctttctctctttgtcccaattcctttattccttaggaaagtcttgatatctttgtgaggtgtgtttcaaaaaagaagctccagctcaggttgtaaggagtaagcaaaaataataattccagtgattcagccatagaagtggaaaattatattatttgaagaaaaattagatgtaaaatcaatgtcatcgacagcttaaacctggtaaaagcaaggaagttcctttcagaatctaattttattccaaatacatttattgagcaccatcatttattgccctagatgccaaggataagtgaacacaacatgacctcttcagaagtctgcatttttctcatcttttttccctcaagtataagaatgaaaaataaagctatttctaattagttacatcagtcatttctatcagtattactatagattttatttttattgtatactggatatttaaactaaatttaagcctttgtgggcttagaaattactgtttcatgagtaacatggcttatgtaggaaatttccaatgccattaaccttaaaaatgttcattggaatactgcttatgtcatcttggaaactacctttgcggttgacatataaactgcacgatggtctattttcattatatgtttctgtatgtacataagcatcctcatgataaagattgtctacttgatcaaacttcagccagactcctgaaccttctcctaggcccacctgtgcacttctttgtaaaaatccagctgtagcgagaatcctgctaaatcagtttagcaagaaccaccttcctcttatgtatctgatcaggttcctcatcctccaccatcccccatgtgacgtctgatcaccctggcctgtgtcttcagcaaggttcctgttaagttttttttagctagaatcccccttacccccatgctttctcttagtagttttccatccaccaaaccccaccctgctccttggctatcaattcccacttgtccatgctgtattcagagttgagcccagttctatactgaggtctctttcccactattgcaatattcctgaataaaatctgtttttaccactttaccgtccatctctggtttttctttgacactcacataaccagagttttgtatgtgtgtgttgcttgacacatcacaaatacctgggatacgtgtactgattttttacagggtgaataatctttttgttttccccaatatcttagaaacctgaatctttaacccctgggcttagtacacagttaggcatataataggtgcttaagtaagcgtcaactgatgattttaaatgcagaagtaattgtcacttaatgaaatatagtcaggagactcatggattttggcctgtcttcctacctgttcttgtactgcaacagtaagtgtattaaggcaatatttttggcagcacaatcatttagtttgaatgcattagtaaaaggtggagtccaaagaattaatcgctggaaagttttgggaaaacccagtaacaactgtttccatagagtaatttgagtgacagccaggtaatagctacttattggagggactccacagtcagagccttgacagggacctgaaaaagagtgtaactgaagggtaaatgtaaaagcttttgggagaacaagggagtggtcaggctgaggcaaagatctgaaaagaaatgcctcctggggccaagctggtaatttgaatgactgaaggtgactgggtgggaactggggcaacctgaaaagcttctgttagggtaacagagcctccgttgcagctgactgttctatgagaatgtgagtctctattgtcaggtcttcaggttcttccagagaagcaagacaacgggaaatcaccagatttttaactaatggcgtatcattcaacaatttcaaaaaccattatgtgagcccaaactgaccaacgaatcaaacacacacacacacaaaaaaagagtctgcagactaaattcaaccagttggtgacctctggtctgtggttaccagagaagtaattgaaatggagttttgggagaaagatcatatgttgaaatcttgggagataagggcagagaaataagtaagccgagacggcggtaaggccaaggtagaaaaggtagcctttaggaaaattaagttaagactttttaaaacaggaaggggcaaaagatgaggttaaagcagatgaggaaatttactgttatttattttcatcattaaaatacgctttccacaaatttttcaactgtaagagagagtgataaattcaaaataggtaatgtcaaccatattatgaagagtatgtttttgcaatccaaaaaagctaaggcacaacattaaaaaaaaaaatctgtgaatttggctttgcaaaggtataagaattaagtcacatctgatcatttttagagtcttaccttttataacaaagaggaaaatttaattaaactggctctgccctggcgaatctgggatgtgtgttcacttatgaagagagactgttaagattcgttaattaatgaggttgagaatagagttgaaggagattggggtaaatttataagtttgtgtcattctgagagttctgtaagtagctgagttacccatgttgtgactgagaaaaacaggagagagcagtgactgaaggttctgagccaaaggaggagaatagtattgtttattccagcagccagagtggcctgtgtgactgtaagtcgcctgtcaagagggagactgcaaggaaagtgcattgatttgatttggagtagttgtaactgcagcatgaagaatatgatatatagggatgataattgaggaacaatttaatggctgcataccttgctgaagttgaagttccttctggagataaaggtggcaaaaaagaaagtgcttaggtagaagagctttttaaaatgagttaacagaaaacagcagactaaatatggaattgaggagtaggaaatgaaggaaatgaatttgaagatttactttctttcaggatgcagagctggtatgtaatccctctgtttccagtgccttctcccacttccaaatttcactgctcctcatgcgccctggtgtgtggtgcagcttcgagattaagcctccagccttctgtcaggatgaagcagcaggtggctgagatgctaggctccaagtgggggaggtgtttagggctctaaagactttcaaccagtccttgtattttcagccacatttcagtcttcagaggaacctggagcctttcatttctgagacttcttggctacataaactggcatgcgtcttgttagttcctcccactccctgccccaatctccttgtctccccaacatcattaattgagcttgggatttctctggtctcctaagttggttaccagcaggtcattttctaagccaccaaaatactggagctctgatctgttctcatctcctctcctgttttgttaattttcttttgggtaaatgccattttttattcctcttctatcaacctggtagagtttcagggataaagagagacaaatgagtctgctccatctgctgtgtttaactagaagtcccaacacccaaaatccttcacacgatgtgcagggctctgcagtgggcctccccctgcctacctgtcaggccttatctgtgcccactcttcctccttcctctctgagatttcagcaatattggccttctaaggattcttaaagccccaccttcttctctgcttcagagcttttttttttttttttttttttttttaacatgtgctgacctattacgctgctgtgttcttacctggcacgctcccatcatccttcaagtctttgcttcaatgtcaccttctccaagaagcctctcggacctatgtttccctatgtatacagtctcatcacttcctgtgtgtttccttcaccattttaccacagtacatatgaatatttgtttgttagtttgtttgagacggagttttgctcttgttgcccaggctggagtgcaacggcacaatctcggctcactgcagcctccacctcccaggttcaagcgattctcctgcctcagcctcccaggtagtagctgggattacaggtgcctgccgccgcatccagctaattttttgtatttttagtagagacggggtttcgccatgttggcccaggtggtctcgaacttctgacctcaggtgatctgcctgccttggcctcccaaaggctgggattacaggcgcgagccaccgcacctggcctacatatgaatatttgattattatccatctccttcgctacactgcaaagtcaataaaggcagagatttattttggttaccagtgtattccatgtacttggcatggttcttggcttatagtacatgcacaataaatattgaaaggatagatgaaaggattatggatagatgaatgtcttttaagcagttataaaacagttctgcctaaagagtcttttttaatcagtagtattacttcaaatacatatttaaatacacatatgttataaatatataaaatatgtatttaaatatgtcatttgtactattttaaatgtatttaaaataatatatgttatatattaaaataatactaatgatttttaaaagatcaggcaacactgctttgtagctttttagaagacatttatccttatggatccataattattatggattgtatgttttatatataatgaaggttttgggagttagagccctgatccttccgctcttgaagcttgatttaaaggagcatggcacagtggtgcctatatgagtcagccctccattatctggggcagaattcaggccccagaaatggtacttaagatacacagttctcccccagaaaactttatatcggccatttgttacagaaactgctttctcaacaaaccttttaccagggcagctaacaatgagcaaaactaatttgaatttcaactctgccattattacagtgttgctaagaagtagtgagattctgctgaggaaggccaagcaagaggagggagccagaaatgccttaaacaatccacagccaggattttgtgctatcttttatttcacagttgaacttctcagtattttttggttcataacctttttctcttttcctcaattctgagtcttccacatttgtgccatactaggtactttattgcttctctcccttttttttttttcttgagatggagtctcattctgtcgcccaggctgaagtgcagtggtgcgatctcagctcactacaacctccacctcctgggttcaagcaattatcctgcttcagcctcctgagtagctaggattacaggtgtgcaccaccatgcctggctaatttttttgtgtttttaatagagacggggtttcaccatgttggccaggctgctctcgaactcctgacctcgtgatccgcccgcctcgacctccataagtgctgggattacaggtgtgagccaccacacctggccctctccttcatttcttagaagagttttacaaagtcattggtgataaataagtaataccatttcacatctggaaacataacttgatagtaattataaattcacagactgtactttctgtacttatctaagtatgaatgcataattcctgtttatctgtgtgtaggtttatttttcccccatttaagtaaagctctatgttgatgatgaggtttttacgagttgagattttaagaggcctcaaatatatctaaaaaattatagaccaagtatgatgtgttagtgttcctcttctctcagctaattctttaaagatatgttccagaattcctggtctgttcttgaagatctcccaataattctagacttctgaagcctggatattttggcttaatttgctttcaagacagactggatttaaattactcaatttgtctgaagtctcattaagatccaaggttcttgtctgttctagtgagtttgagctggcaagaataatacttgtcatctgaaaagtccattagaatcctttggaggagtgagactggaaaattggagacatattattatattttaaaatatgccacctttctataataggagtatgtggggagactgccttgttttggcttcttgggaaaatttggaaaattagtaaaataggcaggcagtagtagttcaatgcgtattgtatgccaaacactgaatttagaacaatactcccccaaaagcatatgtgctctaaattttatttttcacttaccacctgggagatttggattaaatttcttctgggaaatagagttggtatgaagaaacaaagaccactataccaatttatctgttggaataatcatttagccgtacagctctttccactcataaagttaatgaggtcattattgttctttctagctaatagataggcatattgaaaccttaggcctttccaaaaagtctccataagccattggaaagatagactaaaacactccttgttttaaattctagacctcagttcagtcagagatagtaggatttttgcagtattattaaaaagacagaaaccagctataaaattgaaatgaagggacttaatgttttttttctgtaatatctttggaatgcttccatggctttaaaatgctgaggtgtttctcactatttttcaaaagcatgtaacatgtagatatgtgacgcaaacttgaccagttgttcctcttttctggtgaattttgacacctgctactattacacagagtaaaagtgaaagtcataaaacagaaatacttaccaaagtcaagaaaaatgcatagactaaacaaaggggcaagagaagcctattacttgtttcatgtttcaaaataaaagatgaatggcctatcacttcagtagttggaaattcaacttgagaaggtaggtggtttgatgtttgcccttgttccttacgtttctagatttctctatttataggctagaaccagccctggataaaataatacaagttatgaagagaaatgtgcagttcagcatttttacccttctgaagtgcgctttctcccagctgccatggaaacatggcgtaactggtttcttggatagtctcactcctcttgagttccggctgtgagagctagtgagctcattacaacttggatcagagtcctggaaagtcagctcccagggaaagtggaggacagtctctcatggggcacgggaatggggggctttagctttattaaactgcatacatactttcactacacagtcatcccaagctttagcccaggacagtgtcacattgttcacagctgtattgcatcttgaggtttctgtgtgcatcctacacactttcctaaggcagagacttatctcttccagctgtaagccggagggagtggtgctgcagactcctagcaacacatgcggactcaaacaacacaggcagttaactctcttgagtagtagacttgtagggcaccagaactccgttgcagttcactgacagttaccagatatacatttgtatggcttccgtagcattgtgatggaagctaaacgtttgccctgctactttcttttttttttttttttatttttttattttttttttattatactttaagttttagggtacatgtgcacattgtgcaggttagttacatatgtatacatgtgccatgctggtgcgctgcacccactaactcgtcatctagcattaggtatatcacccagtgctatcccccccactccccccaccccaccacagtccccagagtgtgatattccccttcctgtgtccatgtgatctcattgttcaattcccacctatgagtgagaatatgcggtgtttggttttttgttcttgcgatagtttactgagaatgatgatttccaatttcatccatgtccctacaaaggacatgaactcatccttttttatggctgcatagtattccatggtgtatatgtgccacattttcttaatccagtctatcattgttggacatttgggttggttccaagtctttgctattgtgaataatgccacaatgtgaaggacctcttcaaggagaactacaaaccactgctcaaggaaataaaagaggatacaaacaaatggaagaacattccatgctcatgggtaggaagaatcaatatcgtgaaaatggtcatactgcccaaggtaatttacagattcaatgccatccccatcaagctaccaatgactttcttcacagaattggaaaaaactactttaaagttcatatggaaccaaaaaagagcccgcattgccaagtcagtcctaagccaaaagaacaaagctggaggcattccctgctactttcttctggtatgcctgaatcactgtttgagaatggattggactttggtgcgtggaaaactggtagcagaaggcttattcactgcagtgggttgggggtaggctgaaaagatgtcagggaggattaactagaggcagaatgtgtcatagttagaagtatttagaagggaagaaagtttgaactctgatactgttccacactaatattcatgccctgaaagaatcagatcattcttgcctctcccacttggatctctagctactggaatttgccaattcttgatatgaacgctaagatttggatggagcttgtgacctcatttagaccatttgttctaaatgctgaatagaaccaggaaaataggaaaagagggtagaattggggtcataagagaggaatcgtcgttctttgaaagaagaaagatgataggaaactaggcacatgagttacgaggcagtggagaaggaggattagaaagggaaaaaaagaagagaaactttatgccaatatcttctacaagatgtttggctggcacaaaactaacactcaatacttttgcataagtaaaggaatgagagaaaatttgggattggatgcttatcccctggaaactgctacaggctggtgttaatgggaaagggatctgtatttgaccaaaagtgcatttccacgtctctacatttctttttataaagagtcaaagggactcaatgatgagtgtgtgtgtaagggaactccacactagcaagtacaggaaaaatttgatggtactggtgaaggatgttgcaccaatctggaggggaggacaggaattggtttctcatggattgatgccgcaagacaattcataccatgagttggctgagaccacttaaaaaagtaagcagtgatgactgggcaaaagagacaaaggaagaaccacatcttttaggggagagagagagaaggacaattaaagggactcaactagatcaagttctgctcactaaaggacagcgtccaggcaaatgttaattatcttcaagaagcaatctgtatatatagcatttcaagatactccgagatgcttttaatttattgaatactttttattggtatttatcataaacaagagactcacaaatatatcccagaggggaggttttggtgtagttgactatagtagttattaaataatctattaataaaagcccacaaaatggaagatagaaagatagaaaaacaaaagacaacacaggatggtgttggtatacagaatttatacttgaagtttaacaacacggaacaagaaactttattaaaatattcatttaaagaacttccatatgaatcaccagaggctcttagtaaaatattgattcggattcacagatctgggtggggcctgagattctgcatttctcataagctccaagcagatactgatgctattcttcctcaaatcacactttgactaacaaggactcacacaggttctctgtaattggtgttggtagtcattcatggttagatgtagttgaggactgccctcttaactacctctcggctgccaggttataaagaaagcaagtctcagtacaagttctgtcacttaggagcatttattagccaatgggtacaaaacaatcttacagcctgtgccagagacacagtgaagtcacagttctgtcttttggggtgcttggtgtgagaggctcacagtctacacaggccacagtcctctattagagtggttctcaaagtgtggtccctggaccagcagcatcagcatcacctggaaacttgctagaaattcagattcccaggcccttcccatacctactgaattagaaaatctggaggtggggcctaggaaatctgcatctttaaactatccactccaggtgattctgatgtttgctcaagtctgaaaaccattgttctagcagcaggattccctcaaccatctaactgaattctggcaactaagaatccggtgaaccacagctggacattttggaattcagcctagggcaccatttctaaagatggagaacctactggattcttcttaaactcaatttaaaggcagggagtgtttctaaatgtttttcaacaatcttcatattttgcaaaccactaatatcactacacaggcccgtctaactattaattaggaaaattaatgaaacccctggtgtaataagagctaaatataactgaatcacttacagtggccgcctgtggcatgaggctttttgattaattgctagccaaccacccttggagttcactcctgattaagacaactgaccacctctacagtgtagcttaagctaacacacacatacatcagagtgtactgttcatgtgagggtttttaaagactcttaaaatttaccttatcagggcataatttaaacactataacatgtttccattttaagtgttcaggttagattttggcaaatgtatacactcgtgtaaccaccatgccaatcaagatataacatttcgatcacctagaaaacacccttgtgttcctttgaggtcagttacctactcccaccacaccccaggctaccatctggcatagtagctaagttttgcctgttctagaagttgatataagtgaaatcaaacagtatgtactgttttgtgcctggcttcttttacccagcttagtgtttttcagatcagttcacattgttgcattatcagtagttagttcctttttattgcactttgcacagtagtatcccactgaatgactttaccacaacttgtttatccattaccttactggttggtttccggtttttgactattatgaataaagctgctatggatattcatgtacacatctttttgtggacatacatttttttttattctgtgcaaatatccaggaaaagaatatttgagtcataatatacatgtgtgtttaatttcataagaaactgcctaactggtttcccaaagttgtcgtacattcccaacaagcagtgtctgagaattccagtcgctccatatcctcaccaacatttggtattccggtcttttaaacaaaattgtatgctgaatagtttaaattacagacattgttttctttcccctagttgaaattcaggcttttatgtttggtctctgcgatggccataaagctgaaaatgttgacccaagtgacttggatatggattgaattattgccctttcctaacacctcatcagaattggtttcgtaggtgtcatttgattatggcagtcatgtatgtcagtgtactttttctttctttcattcttttgtttattgattcagttggtcagtcggtccatgatctgtattaaaacagctttttcagagggcagttgcatattaagttgctaggaaaaatgacagaagtaggtgacagagttcttgtcttcaaggagctttttggagctgagttcctgaaataaatgtagcccagtatctatcaaggcttgtgcagacttgagtaagaacatcatctaaatatagcttcctgctaggtggcgtgagtcagggcttgatagaccggtgactgcagaaaccacagtaacatatattgttgttattctgtgctgaacattagaatgattgtaccttagaatatagagccaaatgtttattttattcctaattatatttttaaatacatatcacacacatagacacatatgttggataaaaaatactcaaaatgttaacagtgcttatttaaaaggtttatataaactttttttgtagagatgggatctcactatgttgcccaagctggtcttaagctcctggcctcaagcagtcctcccaccttggcctctcaaagcgttgggattacaggcatgagccactgaatccagccagttgtgcctatttttgagtttatgggcttgtggatgatttatttgattatatatgtatatgttaaatgtctaagttacccaaagtgagcatgtataacttctacagtcagaaaaaatgttatattgccacttgattgtttaaggtcttatagctatttaaataatgtatttcttgttctctttaatcttgtgcagaaaagattcactacagtagatccagattactttctagaaaaaaataatgcctgtccatctctttcctcttgggaacaggactacatgaatgcccttcaggctataccactttagtcttcacagaacttagccttcctggttgtcaaagggcaaaaggaattattttttcttttccccacgttaacagaattttcacctccgaaagcttggcgtatacacactatatgttttctaggctatttttgtggtggttgtagttattggcaaatcactgggcgtcgggggtgggttgtctgttatttctgatggaataacaaatgctctttgttttccctcttttcagctgacctgaataatgtcagattctcagcttataggactgccatgaaactccgaagactgcagaaggccctttgctgtaagtattggccagtatttgaagatcttgatactatgtctttgcttagaataaaaagtaggttgggtacatttttacttagagaggggagaaacagctgtcacaattcctgttgcaatgtataattcattctttaatgtatccttggcctagagtttgcctagaatgttttgttttatttttagaatcattcctgtcaccattcctcagctactgatgttgaattaagatattgagaatttttattttccaactactggcattggcatcggcatccataattacctttgtgaaacttgcacaatccttgttctacctttgtttttttttctttttacaaaatgtacttagtattagaagactatgactatctgatctaaaccaaacttcatagacatgtgtggtttattagcttgaatgctaacgtgcagatgaatgaagtggtagaggaaaaatgacagaattgctttcctccttttttatcatacatctgtggaaaaatcctgaagtgttacacagctctatcatgtcatcaaatagtttatgtataactctactattgtctgagggtctgtgtgcattgatgatatgcccatgaaacaggcacagtttctttttctttttttctgtttttttttttttttttttttttttgagatggagtcttgctctgttgcccaggctggagtgcagtggagtggcgcaatatgggctcactgcaacctccacctcccaggttcaagtgattctcctgcgtcagcctcccaggtagctgggattacaggcatgccccaccatgcccggctaatttttgttttttgtttgtttgtttgtttgttttgtttttttttgagacagagtctcgctctgtcaccctggctggagtgcagtggcgcgttctaggctcactgcagactccacctcccgggttcacgccattctcctggctcagcctccggagtagctgggactacaggcacccaccaccacgcctggctaattttgtttttgtaattttagtagaggcggggtttcaccgtgttagccaggatggtctcgatctcctgaccttgtgatccgccctcctcggcctcccaaagtgctgggattacaggcatgagccaccacgcccggcctaatttttgtattttttaatagagacggggtttcaccatgttggtcaggctggtctcgaactcctgacctcaggtgattcacccgcctcagcctcccaaagtgctgggattacaggcgtgagccaatgcgcccggcccaacaggcacagtttctgctctgatggaacttacagtctaacaagggataaccaggatgttcatgaaatttgtagacataagcaaatatatgtataatgtattaagaatgtctacagttggttaaaaaaataaagtgatcttgtctctatttccaagaccatttcaatgtcatatatttagttgtgcaacagtgggacaatggggtactatgtgaacagctaactgtgtggaatgagattcaaagaatgtttgtttgaagaggtgatgtctaagctaggtaactctagaagagtaagcagctctctctctaggaagagcgttctagtcagaaagaagagcatgtgctgaagggcccagagaaagcatgacacattcaggaactgaaaatatgtcagtatggctaaagcacagaattccaggggaaagatctattgtgaaataataggctggagagagaagcaggaagcagattgtgcaaggtttttaaaacccaagttaaggaatttagaggtcaggggatttggcctgggggtgacataatcagattgtcgcttagaaagatgattcttgctgtggaacagagtatggattggtgcgatgtgggagtgacaggagaaaaacctgttgcagtaatctaaaccagcaatgtggtggcttgaattagcagagtagtaagggagataagtggagagaatttagaaatatttaggaagtggatttgacaggcctcagtgattcatttgatgtggtgcagggatgtccaatcttttggcttctccgggccacagtggaagaagaattgtcttggaccccacataaaatacactaacgctaacggtagctgatgagctaaaaaaaaaaaaaaaaaaaaaaaaatcgcaaaaaaaaaaaaaaatgttttaggaaagtttacgaattcatttgggcctcattcaaagccatcctgggccacaggttggacaagcttgatgtggtgggtgaaagggagtcaaggaagacacttaggtgcttggcttggaatatcaggtgaatgtgggacttgtctggtaaggttagacacggagctgtggtgctcaggagaaatatacaaacaacgtttagggatcatgagcctgtaggtgctgcttgtaacgggggagaggattggatagctccaggaaagtgtagcgtgagaagggaagttatttaggacacaggataagcaacctacagaagggactgcaaaggaatggccaggaggaaagaaggaaaattccaagaggttatgatgccacatgctccatgggaagaaagaaagaacccgttaccagggtcagatgttgctgggatgtcagcataaagttgcggaaaatgcccattggacttagcaacaggaaggtccctagtaactttggtgagattttagaggcacagtggaagtggtgtggtgagttcaaaagtgaaccaaaagtggagaattagagaaggtatgaatgattcttggagaaatttacttatgaaggggagaagagtggggtggtagctagttggagggggctgaggagttaatggaaatgtatgtacagtcacgtgttgcttaacaatggggatatgttctaagaaatgtgttgttaggcaactttgttgttatgtcaatataggagagtactacacaaacttagatggtatagcctagtacacacctaggctgtatgggatagcctattgctcctaggctatacacctgtacagcacgtgactgttctgaatactgtaggcagttggaacacaatagtaagtattgtgtatcgaaacgtatttaaacatagaaagatacagtaaaaatatataatagtgtaatctcatgggctcgctgtcatataggcagtccattgttgactgaaatgtcattatgtggcacaatatgtgtatataagtgtgtgtgtgtgtgtgtgtgtgtatacattgatccttgaacaacatgggtttgaactgcttgggtcaacttacgtggatttttttcaatcaaatgcaggccaaacatatagtattcgtgggaatgtatttatatgagtatgagaagacagggtgagattacaattattggcccaagaggagatgataaataatgggtgttctcagagaatacgggcaggtaatccagagcccaagggagggaagagatacctctcttccactgtaatgggtggggtagagggaaggatctgggcaggtccaggtaactaagaaaccaggtagcagcaaggtgaaggatgtcttactataaaggcttccattttttgtatggagtggagagtccctgcaacgcagttaacagcaggagatgatgaagttgggcttatctttgtggagaataagagagagggcggagttgaaaaccagctgtgtgaacccagaggcggctgagtgtttcacggtagctccaatctgcaggggtgtggtatttccccaggcacgcttagcacttgggagccagatgcttctgtcctggggtagggagggaacagctgggcaagagaagtgaggatttgggcaaaagattgattaaaatgatactgacaagtccctgttgggtaggagaagctgtgaacgcatatggaaactggtaattaggaggtagagggatgaaaatgctaactcttcagggaggtaggggaagaagtagtaaaggaactgaaggtcaagaagttgtggtcagagagaatcatagatgaacattattttgaaggtggaacagtttcaggtgattagatctaggatatagccatttgagtaggtggcagaggtagagtggatgtgaatttccatggaggtgaaatagcaagttaaggaactgagaggctagaatgatgcatgagtcccccatgccaatgttgaaatcatgcagaattggagcgagaactgggcaaaagagaaggaccgtgaaccctggctgccaggtcttcagaaataaaggggttcaaccagaggatctgcagaggctagcaataagatagtcaaggagtcacttggcatatggttcttacacagagatagagaagaaatgccttagaagtggaattatttggaaagagagactaggccttttcccttcatcttggtatccccaatgcttagtacaaaacctggcacacagcatggttcaatatgttttcatgagatgaatgcatgaatgaaagtaaaccaaggcttccatttccttatagcccgaagttatcatttttcagctatatagttgccaagtttaactggtgtttaaagggctttccaggtcgagggtttccttaggacctgttaatacgtcatagctgggaaaaagtagtttgggatgggatcgagtcagggggctgaatagagaaagttttcttgcctctttttcttcacctgcccctgcccctgcccctgccccatcccagagctactgctttcctttaataaaggagtaattaggcactggttatcatgaagtgctagagaatattcctgtgagatcctaaaagttcagaagctaaccatttgttccagtttatactatggaaaaaaaaaaaaaagaaacccagaaatagaccagatggaaaaaccttataatgactgttcctttctataatgtccattttcaccctggatttaggcattattcgattttcctgctcaaaaaaaattccattcacatatgtgttttattgtctgtcatttcaacttataatttccaataaactttgggaaaatgggggaatttcataatatacaaaattttgtccatttgaggtgataaccttgtaataaaggtaagctccgaatgtagaataatttctttaaattttcacttttaaatcaatttgaaattctctgcatttcctttctgagcatggcttttctaatatgtgaaaaagattcaagtatgccaaaattaaggtgtatgtatctaaattaagtattgaattctcattaatgctaggagggtgccatatatagtaaaactatagaatgaagagttcaccccatccttttattgaacatatgtgtggtcacattacttactttcaatatatgatttaagaattttctcctaattttatatttgcttagatttagcttccaggcttttgtcatttctaagcctgcaaagccatgataaagagctattgtctgcggtacaggcaaataaaacttgccctggctagctttccctaccaaaggccacttctaccaactctaactttaaggaaaattaatgatgttatctcagtgatttcctggtgccagtgaagagtttgaattacagatgccttggaaatatgcacttccacctctattaagcacttgatcttatttttttttcacttccctatcaatgtttccgtattgcagaaagccaaataacccaattgtatccactatagagaattcactatttaagtggagagcatcaccgttggcctataatgtccccagtttgtaatcagttaagtgttgcatgactccttactgcctctcaacacattggaaatgaaaatgaaacttggtagaaaagcaggaacaaagataaaatcttggtaagaaggatttataaactgtttcatatagctgatactccattgaaagttatgaagaaggtaatttaagcattttctttctccctttgtagttctgatgacattctacaggtgtgaggcttctaaaattaaaaagccaacttgtaagagcagaaataaaaacgcacttaacaaagcaagtgtatttagtttattaataatgtgtggtgggttggagagagcccaaaccatagggctaaatatactgcagttgataagtgtgacaaatattctgcaaacagtaagaaatagagaacattttgcctctattcagcaactaaagcacacattatagagatttggtacaggctggagttgtgtgaatagtcacagtttctggactcgccctcaccatgacaaaccaggtgaaaaatgcaccgccttctctgtaaatgcacctcaccttttgatggtgcgctaagggtgacattagataggcttcagttgctaaagaagactctcaggacccacaataacatggcttacaaatccgcgctctattgccagaaaaggctacattacaagagcattactgtcaggatatggatccacagccacaggctgcctccacagcaagggggtctcgagaggccagtgtaattattttgccactgtcctacaaaaatctactttttctatataccatgtattatttttcacataggttagaggccatgtctctgttagttctgagtttaagacgtcttgaggacatggccaaactaattttctcagtttatatggtttgacagatattagtgcccaagagaggtctcataacatgacccatctatctcccaggggaaatactgtaatcttgtttagctgttacccactagggaaagaatggttttctctcagtcagatgctaaagagattaaagaacacctcgtaggttccgttttctagtaattattggttccattctccagctatcaaccttggcagcttgccatccctatccttcctcctggaattggatgcccttgaagtgcgcttcttgcactaggaagtctttctcgtcagtttatcatttctcattcaaagcaaattctacctggccaggtatctctagcccagttcctaattctcctaatagaagtttcttttatttcaagtggattcatgccccttggcccaccagacatgttgccattgagaaatagcagctttaatgggaaatacacatgagacacaaaaatgtgactaggctaaaatcatatgaatagtagtcactcctaaaaggactttggtttgggtatgtcacagaaatttctgtagccatccatatccaatttctagcttttcagtctcaggaaagtaggcccaccaaattcaacttaaatatctgtcactgattcaagctgtcccaattgtccctccacccactaatggctttccacacggagtaatggggcaaatagctatttttttaaacacataatgttatgacagatgaaacatacagcacgtaagccttctatcacatgcccaatacctttgttaaaccttcatcatcacaattgatggccacacagtgtttattgagattgttataaatcattgttcttcagatttgactgggtaaatattccctcaggttatttcctgacacagctgattaataacagatatgtcctgtgaaagaagaaccaaaagacattaacgaatactaaccaaaagccacattaatattgctccatggtgttgtagtcgcagttagaacgcccatctcgtcatccagtgtgttggataggttggctgactctcccactcacatcttggctctttcaaggaggaggaggttttagcagagtcccccaccccaagaggcatctgagtctaagccaagggagcatattattctcttattttaaacctctccgtaggcagcaacattatattaggttttccctttaaaaaaaaaaaaaagtatcggctgggctcggtggctcacgcctgtaatcccagcacttcgggaggccgaggcaggcagatcacgaggtcaggagttcgaggccatcctggctaacacggtgaaaccccatctctactaaaaatacaaaaaattagccaggcgtgatggcgagcgactgtagtcccagctactcgggagtctgaggcaggagaatggcgtgaacctgggaggcggagcttgcagcgagccgagatcgcgccactgtcctccagcctgggtgacagagcaagactcggtctcaaaaaaaaaaaaaaaaaaaaaagaaaaaagaaataaaaaagtatctttggtggtttccttccccttgcaacaatctcacctttttccttttatcattaattttaagccaaacctcttccccagctacacacacacaccacacaatgcagacagtccccaacttgtgaagtttcaacttaacaattttttgatttcacagtgatgcaaagtgatatgcattcaatagaaactctacttctagatttgaattttgatcttttccaaggctagtaatatgcggtatgatactctctccccttgctgggcagcagcactgaacctcagctcccagtcagccacaagatcatgaggctaaacaactgacactttactgtgtaaggtgttgctagacagttttgcccaactgtaggccgatgtaagtgttgggagcacattgaaggtaggctaggctaagctgtgagtttcagttagttaggtgtattaaatgcatttgtgacttaagatattttcaacctatgatggggttgtgtgatagcttcaattaggcaaggcacaaggaaggagtaatccattccattgatccttgtggaatgcttgtgcttaagtaccaactaatagccatagtatcttattttggaatattaccagcctttgaaactcttaattgtagccccagttcagggactactaggtctggcatcaaaaaagaaacctgtagtgacatagggaatacctgtaagtgccccacttgaattatctttttaattgtaactggtctcacaggtgtagcccatttctcaaaaatgatagttgcttcagctttttggttgggactccacctgcaggccagagagggtgaagcccagtggaaagaaattctgaacttaacattagcttttggatttttttttagcagccttgccatcagtttgcaattgcctcctaatccattttgttagctccttaggttcaagttctctcacttccagattccactagaaagttacaccatcagtaaccaatttcaaagcctgtgttacttttcaaccaagcgtagcttgttgagcaacttcaaaggttctttttcatcccttttatcagaatcttctttttttctttctaaataatgcctcagtcatacttttagctaagaatgagttggaggtgttctaaacaatcttgcttctgacactcactgccctgacagtggaagttaaacagggttcaattgctaaagaggactcacaggaaccaaatgacagtgcttacgaatctagagttccttgcagaaaaaggatgcaatatacccacaacattaaaacaagaataagtgtcacagccacagcctgcctcacagcatagggtccagagaggacaggtgcaagctataattgccctctgtctgcaagagccacaccacgatgcattttctctcttggaacaagagctactgatgtgagcacagaacaccttggaaaccagggagcacaaattggagtttcagccagggtttcttatatcccgtgggtaacctaggcatactgttcctatgtaaccagcctcaaactcagtggcttccgttggtctgactgtgcccgggtaaaaatggtcaatgttactgttagcaataaacaatggtgataacctgcaacccatggctacacttcaacacagtaagtcactttgaaaagcaagtgctttgaccagggctctgcactgtgtagatattttagcaagtcatctcgtgccaactccagcctctctggaattaacccttactgcacagacaactacatcaaagtgcattgactttcttgaagtgcaaagatttgcttgggaggtccctcagccataagtgtaagttgcctgtagagtggcatgcctgggcaagaaaaatcagcaaacatacagcagttcttccaccattactcacctctttctgtttctgtgctaattagatcacagaattatttatacatcaacatagaatatacagattgacctataggatgaacttggggttatatgggcaccatgagactttttttttctccactaaccaactttttggtgcttctgttttatcctactgttgtcattagcatggaatgcagaatggttttcctgttctgtaaagtcagtaaggacaccttctgccacccacttttcccccttacaatatgtacctccatgagaaatcagaaaacctagatatcctgccataacacccagagtgagtctccatatctctggtctcagttgtctcaactgcaaaatgattttaaagcaaccttctggctctaagagtctatcactctgtaaaagacaaaaaaaatctgtcttacataggaaggaatagcaagagttagctactgtggcatacatagaaaggaaaagaatgagcttttgaagctagaaggttgagaagatgattaggcacaaccagagcctcaggaaccattagtgggatccctgtgttgaagtcctgcctgctcgccgccccccaaccgccactgtctgcttttcctgcacagcaaagaggatcctggagagtcagccatttcttttatcctgtccccaccctctctcacccccacagccctcatgcatagggtaccaccacatggtccctgttcttcaatggcttcaaagcctatagcatcctctactgtaaacataatttagaaagtgaagatgtattagaatacttgggtttttatgtagctttaaagatatatctactagtgaatacacacaaacacacacacacacacacacacatacacacacacatatatatatatatatatataatatatttaatggaaattcctagcttaaggaaacaatggtttcacacaactgtatctgctggttgcttattgagggtcctagaaagagctaatcattacatttaatgtttcatcaaaaagtctaggtgtgttctctaagatgctcattttgaaaagcatatgcatggcaattaaattgtccctattgatattctcacctccttttcgggtccatagcatggattgtgtatacctaaatggaaattttttcaaaatagctccatgaaagttgaattctgtttgacatgtttgtttagggaaatgtgctcttcagtcttctgtgatggattgttcttgtgtttaaccacatccagttttagcagagcacactgcacagtatttctctcctaactgtgtcatcttctgctcctgtaatttcagagcaattgctttgctcccctctggagctatttctactcaacatttgctgttctatgtgttacccattcacctgtacagagataagagcaggccccataaaatgaaatgcatgcagtttttctctgttcatttccatcacacggctaaataagactcttaatacaaaagtgattcgaaaaattttcactagttacttcttaaatgcctggatcagaggcaaaatatttatgatgactaaagcagagtaacaaaaaagaaaataattgaaaaacttcaaaccacccatagcttccttcagtatataaggaaacatgttgggaatattggtgtttggaagaaatccattcctctcttccagtaatggagctggcataccgtgtttctaagtgttcctactacgtgcacttgagtatgtgccctctgaggaaaacaagcacacagaagagagagagaagaaaagtttgagtcttttgtctctggacctcgctccagcctcccacgcagtcttctttcagccattccctcctcacgtcctcccgtcctcctgcctccttgcattgctttttaaaattctttattatttttctcacttgattcttcagataagtctcccaagttatcttccttcctcccactttaaagaaagtctcagcttccatgaaaagggtcatttctctatctttagagtatttcagagcaaaaacagaggggccttcccttccaagggaggagtgcagactcctgcttccaccaccatgtctgtttcatgcttctggggaaactccaggattttctgttttcctttttttaaaagagaaaaatgtgtgcgcaatataggtggaaaagtatttttgcacaaacctacataggtattaaccactatttttgtttttttcttaatatttaattagaactggccatgaataacttgtaaaatatactaaagccttaagtttgcatttctttattactgggaaaggtgtttactgagcgggatttacctctatttatgtgaactacatttataattgaattgccccttccccctagatgcatgagagatttacttaattagcattgattccttgcctcaaaggactgagaattccaaccagagcttaggtgtataaggtagtataaaagcaatgttgttgtgtttctagtttggctaataaattggctttagagaaatgcatcttttcatgacacttgggaataaagcttgtgatttgctgatgttggacaaggttgaagtttcacttttgttaaatttttgtccccagcataagattaaacacctcctcagatcaagggaattttcctccctcagccttataaagttgttagaggacttagaaagaatattatgaaatacaatttgaaggtgaaaggagaaataagcgagcctcaggtctgaaaactggatagattatgcaattactttagtttgcctatagaaaattttagtggagagtatttttttcacctaatattagggtagcagagagatgctgaggtgactgatatttcaaggagaaaagcgcttaatgattataaatgcatagctagaaatagagtttacacaaccttagccatacagattaatctaacagatcttctctaatgctaatacaagaaagtatcatcggatctctttaaaaatttctgctaaaacattttttttttcttattcaggtgacaattgactctgtttatgtagaacaggctaggtccccttaactctcagatattccccagtaatccaaggatgggaattatatctttgcccatatcttcacccaatgccagtgagatttaagaacaacttcagatcctgaatactgatcaaactcatcaacttagagtcgaggcataaaaataaaacacctttcaaagagagtgtggttcacgtttggtgtttattaaagggtatgagagagtcctagctaggattctcagaggaaaaaggacactgaaaggaaggttttactctttgagtcatttgtgattttatttgttttttgcagtggatctcttgagcctgtcagctgcatgtgatgccttggaccagcacaacctcaagcaaaatgaccagcccatggatatcctgcagattattaattgtttgaccactatttatgaccgcctggagcaagagcacaacaatttggtcaacgtccctctctgcgtggatatgtgtctgaactggctgctgaatgtttatgatacgtacgtatggcatgtttttatttcccgggctctgtcacaggaggcttagcgtacagaatggtgaagtgtaattagcattacaacagggccctggaagctgtggacctaatgctcttcctgtgataaatcatttttgcatttatgacttgaaaaatattttgataagctaggagttaagagccagaatgtagattgctctcagattagaaaacaaacaaaaccctgagacactcattttgcaaatagtggaatgagtcgacatatagcctttggttctttccctttctcgcccatggattttggaattcttccatgcacttcaggggtggcttcctctcactggcggccatggctgtgctcctggagatactggcacacctgtctccagatcagaatggtcttagctgatacttaggacacttttgcagaagattatgaattgataggccaaacaaaatgaaaacaagcccttaatacagcaaacttagcttctcaaactgagaacatttttcgttttcttttgttttttaataagattttatgaagtttcagtttggcgcctccattcatcactctctcttagagaacaattgtttgttttggattgcacacaagggagatatccccagttctgatttttttttttcttgagcttaatgaagacaattgaagaagggagcagaaggaattggtcttaattttgcctaaattcttcttagatctcaaaattattacatgcctcatttcaccaatcaagaacatactcccatttggaaatctgggaaggttttctgaaaagagttgcaaaacaactgttttgccttttacctttgttgtagacttctactaccttttgaactaaaatttatacctttttttctttcttattttgataaggtattgctttttaaaatttcaggaccacctgactattacattcatcatagtcatctaccaagtccttgaacatgtcggatttcaattgtgaactacgttcacattagttttgataagagtttgtattcaggtttcccctcaaatatattttggcactgttttctttgcagatgacatgtgaatgcattctgaatgtataacttccttctacctgactgaaaagtatttggtgacaattttaactccttgaagacctgagttgctgtataaagtggatttgttaaattttgatctaccttttcttaagagggagaaagataagaaaattttccagtgataggaatttgtttagtccattagtgcccaggatttctttttgactgagggatttaataaattttagtagctggaagttgagcatattgttcaccgaaaataaccgccattgggacctatcctttgtgattttgaagtgctaataggcgaattattctgaaatattttctcctttttctttttaccaatatctaagggccagtagctttccgtaataaaataagaagccaaaaaactattgaaagacactttttaactttaattttaggtttcggggtattatgtgaaggtctgttacataggtaaactcacgtcacgggggtttgttgtacagattatttcatcactcaggtattaacccatttatgcctagtgttccattattggaacactaagcttgtgggaattattcctatcctactgctcaaggtcatcgccaaggtctgattttcacaaaaagtaatatgcagcctccagcataaatgggttaagcgcagtacccaacagttgtcttttctgctcctctccctccttccaccctccaccctcaagaccccagtatctgttgttcccttgtgttcgtgagctctcatcatttagcttccacttagaagtgagaacatgcagtatttacttttctgtttctgcattagtttgctaaggataatagtctccagctaatccgtgttcaaaagacatgatctcattcttttttatagctgcatggtattccatagtgtatatgtaccatatttctcattgatgggcattcatattgattccatgtcttgaaagacattttctacaaaatggaaaacttttcattcttatttttcctttttttcccccatggataaaattagcttattaataaatttgttatgtgaaatgctttatttcagttttctatatgcaaatatagaaaatgctatgcaaataaaagcaatctatattaaaacactgatatagcaacaggttatttataaatttattttttagatcatatatttgaatgttgtttaatagagtatgatatttttcttacggagataaacatttatattctatattatgtgttatgtggcctgaagtaattaattttctttcaataaggggcaatctgatgaagatctgagcatttaagagggctgagcagttagttgctggtaatttttttggcttccatgaccaaagtaggtaatttgctttagtaaccaaagtagattggtgaagattagtaattcttctgcttaccaacttaaaccaaggtggctttccataggtgaatagaatttttttttcttaatttatgtagaacttttgcagttcaaataagggtttttaggaattgaaacttggtaaacattcagtggtcaagttggttgaatttccattgcattgtaggtcatcagtcaaagagataatgaatttggaaaagttcaaaacaatcttaataaaacagtggtcaatagagttcacacatcattgagcactttactcctttatttttccttttcaaggctttattcttaactagaagtgtttaccctctaggaaagggtcagtaattgttttctgctttgattcttcataataggggacgaacagggaggatccgtgtcctgtcttttaaaactggcatcatttccctgtgtaaagcacatttggaagacaagtacagatgtaagtcgtgtatattaatgctgtattcttttattaatgttggctaattaccctagttctagatgggaaatgacagactgttcttatttgacagcagattcctcatgtaagatgtagaactgcttttagagtgtcataaaatttggtttgtgccattccttgtcaaacattaaattgcaggcatttaagtagagaatgaggattagcttttccagtccaggtattattttacattacattgactgtgtctgaataaaacacatgttcctaggggataaagtctgattttctaacctctttctgtaagtcggaaaaataagtgtgaagatttaatctctgcacttgtctagtctttgggttcttatttaaagaataccatgtgacattcatgttcaagaaacattgtttattttataatcatcttactgcaagttgtactgacacatccaattccgtgacgtgactaacattttattatttgagagacagatagcttgctgtttcttaaaggatagatacgtaccaccctacagaatttccttttgattacgcattgggttcttctgcttaaaaactgtaaaaccaaattaaaagccaatgctagaggagtgatggttcagatgaccaagtgaccatccattcatattgtgaaaggctgcagttggttttccccttgaaatgcttataagcaatcttttcagtaggaatattaaacaaattcagcctagcttgtcttttctctcttcccctgaggcctagccacacatgtgaggagatgtgctaagcttcaggacaggcaggagataaaagccactctgtctcctactgatcatttctccttcaggagtaagccacaaaatacacaaaccattttggccctcacttttatgtagtttccacttgagttttctcatcctcagaacgagagaaaaataactgaacagcttttgttaaccattttaaaatgtatttcggatgagatgggatacctgtgtgcttttctcctttaaatattgtagttacttagtataggttaggttctaatctaccgtatatatggtatagtgacagcacattgtaaatataatattaaattgaataattgaggaagctttgagttggtgtttcgaataactactaagagggaacatgtttttaggttggtgaaacaaaaatattaaatgcaaaatgagatgtttgaaagtaactcataactttgaaaataaacacctaggtatgtatatcggagagcagataaaaagctgtgcgtacaatctcaatttttagtgccatcttaggtatcctgttaaaacatttaatttcctagagtttaaagtgtgcttatgggtacagaaagctttcttggatttactttttttgaggggcaacttctaggtgaatataaggtatgattaaaattttatatctgagaacaaaacataacattgcaagcattcagtatgttcattcattctgttacatatattgggcacctactatccaccgggtactgccattctactgtagatacttctggcacacaactgaccaagatatggttccttccctcaaggggatataagtctcctgccaaaaacgatagacacatattgaatcaatgccagcataacatgatgtgagctattaattagaaatacgcagccaggcgcagtagctcacacctgtaatcccagcacttagggaggccgaggtaggaggatcacttgaggtcaggagttcaagaccagcctggccatcatggtgaaacacgtctccagtaaaaatacaaaaattagctgggtgtgatggcatgtgcctgtaatcgcagctactcaggcggctgaggcaggagaatggcttgaacccgggaggcagaggttgcggtgagcagagatcgcaccactgcactgcagcctgggcgacagagcaagactccgtctcaaaaaacaacaacaacaacaacaaactatgcacagtatcctgtgggaacacatacatgatggactagaagctcagtgatcttatgactccataaagaagtcccaactgtggtacatttttgaatctctggtgtccaaggagggtggtgctttgggccagttatatgtctcttaatgctaaaacacttattttttgatgtagttacatcctatatacaataattcccaaggattatgttctggcttagaagaaatttaagtgtcgagggtacgtgtaagcttgcgcttcttgcagtgacacagtttatgtaaaagttatcacacttcatatatatacagtgatcattaacttgattcataaaaataataaatatccagattagcacaaattagaagtaaccccactctgtggaaatactggctactcttgagaattgctactggaattgagttggatgtcaggttctgctggcatccatgggtgctgtgttttgactgttgcaattttcttcttcctttgtagaccttttcaagcaagtggcaagttcaacaggattttgtgaccagcgcaggctgggcctccttctgcatgattctatccaaattccaagacagttgggtgaagttgcatcctttgggggcagtaacattgagccaagtgtccggagctgcttccaatttgtaagttattcaccttctaggtaacatatttattctttcatattttagaaattaattaaaaaacccacagagcttcgttttctcatattagctcttcagtaggcagtaggtatgggatttgggatatttggaacctctgtaagtaagcagcttctggaactctaggttttgggaaagaagacagtgctgaggaaggaaaagaaatctccatctgcagcagggaccccacagttattgaggtgctagaggggaagaagttcagcaagggaggaaataagtctctagccacagaaatcctatgtatataagaaaatggcctttgtaggcgagtctcttagtctctgagtcctttctctaattctatcattatagcctcctttcaatggctgttggtaaattgttagcacagctgtccttttttttaaaactgtcctttgtagctttgacattcccctattattccaaagtctagaggtgtatactctctgctaatgtccatcactgactgaacacactcttgtccgttctctttcctatcctgtcccattgctttttctctgtcgtagtcagtgccccagaaacaccctcttcttcccaaatgcctgagcactccactggtagacattcatcttgttctaatttttttttctctttccttttttttttttttttcttttttgagttgcagtctcgctctgtcacccaggctggagtgcagtggtgagatctctgctcactgcaacctccacctcccgggttcaagtgattctgctacctcagcctcccgagtagctgggattacaggcgcccaccgccaccccaagctaatttttgtatttttagtagagacagggtttcaccaggttggccaggctggtctcaaactcctgacctcaggtgatccacctgcctcgaactcccaaagtgctcggattacaggcgtaagccaccgtgcctggcctctaatttttattaggtagatagtgctacaatgaacatccttatcgtttagcttttgtctttgaagctttctttataggatcaattctcaggcgtgtgattgccagacaaaataatataaacattttttgtggcctttcttcaaaagttgttctaattgtaacgctatcagtattgaaggagtaagatgctttcggtatcacattattcacagtgttcttatgtttttgtttttggttttttcaagtgctaagagctgtttttcttatgtagggtttctcaatccattctaattctattaacaatggctgagatttacaaaatggaactagctgtagaactaactgggttatatctgaagtctttgaccacagactaggatgaaactatagaaggtttcctgggcagatcactgtgaatatttaggtgtttaaagcagtttgagtatttatttaatagttagttggatagatttaccggatgcacacataataagttcatttatgtaaagtgggatatactgtttgaattattttgccaaaattatggcaaattagttgtaaatgtaaaatgcatgtggagaaataaatatcttttcctcctcatacccaaaccttccaaaatgcagatagatgatcaatccaatcaatcatcaaaatgtagacacaagtaacttccatacaatgaatattaatggccacaggcaatctaggttcattttgattttttaaaatccaattataaaacaacttgccataaacgcgagttatttcctaatcttttggttgtgtgttttttttgttttgttttgttttgagatggagtctccctctgtcgcccaggctggagtgcaatggcgcgatctcggctcactgcaacctccgcctccctggttcaagcaattgtcatgcctcagcctcccgagtagctgggattacagggtgcctgccaccatgcctggctaattttttgtggagacagggtttcaccatgttggccaggctgagctcaaactcctgatctcaagcaatccacctgcctcggcctcccaaagtgctgggattacaggtcctaatcatttttcccctttagtcaagtctcagttactctttgagttctagtgaaacacacacacgtgttcatatatagggatatataaacatatgtgtgtgcattgtgacttgggttaaaggtaaggctcagtgatggtccctgctgcaaagtaaactaggctgtattcagggccagctggattctttgttttctcgcccgagtactgactcatcaggaagccaccaccatcctcactgcagcctctggccctcttggatttggttgtcaggataagcggtggccatacagaagctctgctttccctgggctgccccccttatcaggagaccaacctattccatttctgcctgctacatccttttgctggataacctcctactcccctaagcccatgtctctggtttggttacatttctgtctctgtaataacaactctgtattctcagtctcaaagctttgaattcagtccatccttgcatatttgttgaatgcctcctggttggccagccagtctccaagctctttgaaatgtgaaatgtgttttgttttgttttcagaaggggtctaacttcgtcacccaggctggagtgcagtggcacgatcacagctcattgcagcctcgacctctgggctcaagtgatcctcccacctcagcctcctgagtagctgggactacaggcatggaccgccacgcctggcatttttttggtgtatgtgtgtgtgtgtgcgtgtgtgtgtgtgtgtgtgtgtgtgtgtgtgtgtgtgtgtacagggtctctcgccatgttgcctaggctggtctcgagctcttgggctcaagctgtccacccacctcagcctcccaaaatgttgggagtacaggcgtgagccacggcatccagccttgaaatgttttctatgagactggggggaaatcagtcaagatatgaatggtggtaacaggtggcttttgattttctctgtactatttttattttctgagttttcttctttgaacatttataattagaaaaaaaattagtaaagtgctgcctctttttttagggaaagaaacatgttttgtttgattgctttccattgccattcttacattgtttccaggccttctcatcattgcactggcttcctagcaagcctccacttcacactccagtccttttcattggtcttattgccctcatactagttttagagaaaagcatttcccatatgatgccgtccttgaaaatgtcagtatctttctgttgtctagtgaacaaatcctaattcctctatttaactctcagacctttcctactctggtttcataaccacccatagtttgctttcactatcatgaaacagcttctccttaccatttgtacctattatgcttataaataatattgttaccattgctactaacaaaactttgttcacatgaattctctcatttaatcctcaccaagtctttgaggggaacagaatagtcaggctttggagattttgcttttattattgtttaagtggatgaataatttatttgcgcccttaaagtccctcagctggtggaagggtttgattcctagtccagtatgcccaccgccacatttactacctcattcccaaatatgtagtttctgatacttctgctctccagcttcccaaggccaaacaacagctacttttcctgagtcctggatagaataagaaaaggtataacaagacaggggacccttgagggggaagaggaattagtttgaagtgctggcaaatgtagtatttctaatcagatgctagtaaattccatatgtatggcgaggctttcattacttagatttggggagcctctcagcgttttagcaatttgcaatcaggttgaatggatccattgtaaatacttaggaatacttaggaatccacgtcctggccctggcatgcttttcctcggccaggtgcactggcggtcaccttgcctttcattgtgccacgtgcataaaaatacaatgtttgctgtagggaaagataacaggagtgaaaatgtcctctgccctttgtttgaagtataggaccttcagaatgaggctgggctggttccttcagcaagcttgtgctcaaaggctgctatttctaccagcctgaggtaaacggtaataaagtacttgtttatcctacaagtgcattccttgcattgcagatttgatttcctttgatttcttgtcaccacctggaaaccttactttgtttcaggttggtacagttagaaaggtactgaatcttctgattcagacaagggcccagtagtggcaagaagagaggtacgtgtttgtgtgccacactctctggattatctattaaaggttttctcatatccctccccactaaccacttagaaaaggaaatcacctatcaggtctaaatgtaaaattttgcttatttaaaaatcactataggtcttccaaggaattatccattaagccaggaaatgaagtcacatccatggatatgaaaaaggaatagtcactgtaaatttatggctttgacagtggtatcttcgtagatactaaatgaggcaacaggatatgtttccacattaatagcatattgcagtcaacacatttactgggaaattgactcattttggtagtgatagaagtaaagttttgcaacgagtttaagagatacagctgtaattaatatattgccagcttgttcctttctcatattccatggaaacagccctgttgagagattagattgatttttacgaccttagtaaggccaagcctgccctggcagtgagtcacatagactgcctgaaggaaccttgaggattttctgcacctctcctttttcagatgagaaaacaggcccacagtggcacaatgaatctagtctacatcgtgcaatttacatcatgttatggcttcaaccagttcggagactagattgaaatgacagagtgttaatgtgtcaatgtgatcccctatatgaattttagattgtaatagaatgagatagataaataaacacccctcccccaaaacacatacatgcacacacacccatctttattgaaaatactctaatcccaacatagctgtttagtctatcttcagataaaaccaagtatcacttttaggtgggaaaactatacagtcatgtgctgaagaatgacgttttggtcaatgacaggccatatatactatggtggtcccataagatcaacgtaagaagagattataatggaactgaaaaattcgcattactttgtgacactgtagccattgtaacatcatagcacgaagaattatttcacaaacctgcactgccagtcatttaacaggtaaaaaagtatgttttaaaatatttttaattattatggacacataatagtactcatttatgggttacatgtgatattttgatacaagcatacaatgtgtagggtaacacaatcagagtaattggggtgtccatcatctcaaacattcatcatttctctggtaggaacattcccatttcactcttttagttattttgaaatatacaataaattattgttgccatgcatggtagcacgcacctgtaggaccagcgtttcaggaggctgaggtgggaggatcacttgcgcccaggaattcaaggctgtaatgcacaacaattgcacctgtgaatagtcactacactccaacatggacagcatagtgagaccctatctgtaaaaagatttaaaaatatattgattactatagtggccttattgtgctaccaaacactagatcatatttcttcttactgtatttttgtacccattaaccatcccttttttatcccccgatcttcactacatttcccagactctggtagtcatgattttactctatctccatgagttcaatttttttttttttttttttttttagctcccacacatgagtgagaacatgggatacttgtctttctgtgtgtggctgatctcaacataacgtcttccggttccgtacatgttgctgcaaataatgggatttcattttttatggctgaataatattccattatgtgtttatagtacattttctttatgcattcatccactgatgggcgcttaggttgattctatatcttggctattgtgaacaatgctgcagtcaacatgggagtgcagatatctttttgtggtttcgattttgtagtatcttcttcagtaaacattttaaggactttattgtttagataacgtcaagtataccaactttatattcaatatgcttcacctatgagagctggagtgtcaaaatctgtttattttacatctgttttctgcctcctgttgtacttagtattccaaatgagtaagttgcttttccatctatcttctgaatttctctatttgtatgacaaaaatgaataccatctatgcacagttgttgtaataatgtagaatgatatgaaaatgagaataaattacagtctcaactgttgagaacaagtatttctctgtgttagaaacattcccaattctactcttttagttattttgaaatatacaatgtattattgttgccatgcatggtggcatgcccctgtagtcccagctactcaggagactgaggtgggaggatcagtaacacataaatgagaaagcattccagaatatctggagaagtgactggcagagtggttaagtgcataggctttgaaaccgaactgtgcctgagtccaaatctgagctctgctatttgctggctgtgtgactgtggacacatttcttaaccttcctggcccctgaactcctggaggtgattgtgaggattaaatgaaccaatagaagcaaagcacttaagagctgtagtggatacatagaaggtgcccagtgaatgttagctatgattatctaaagtgtgttgtggcatgaaaatatcctgccaatgttaacagttgcttttatctataacaaaacatcatctgtggattgcattttagagattctggagattctgtttctctgcaaatgttaaaatgccatatcaggagacttttggctggttagacagcattccccgggtcaactgattacttttttttttttttttttttttttttttttttttttttttttttttttgagacagagtctcgctctgttgccaggctggagtccagtggtgccatctcggcacactgcaacctccacctcccaggttcaagtgattctcctgcctcagcctcccaagtagctgggactacaggcacgtgccaccacgcccagctaatttttgtatttttaatagagaaggtttcaccatgttggccaggatggtctcaatctcttgaccttgtgatccgcccacctcagcctcccaaagtgctgggattacaggcatgagccatcacacctggccgattccattttattaatagattttccatcctgaaagtaactcctaaaaaccctccttcacttaggtttcctttggctttttgtgtattaatcagactgtgggccctttggttccatagacattccttttacaccccttttggacggatgaatactcactagtaactaagtaattagtaagagttactacaatttggtatttataaagaggtggcctttcccagaattgaaggtagaccctaatagtccaatcagccttccatagagatagctggctgccatgaaaagctgagagatatcaccgacctcttactgggcctgctcatgaacagttagttaaaattcctgcaattttcagaaaagacccttatcagagtattatcagtattgtcttaagtttaatattggtttccagttgttatttttaaaaattttaagctaccgtgggttaagctttatgatgatctgtttaagtggtttgtttgattaacttctctattggagtaatggatgttttcttcaccagaattttgaagataggtttgtgttgtagttgaaacctgttttgtttatacacttactgctaaggaaaagcacatgtcattttgttttccatcttcatccttctaaagtagcacttcattgttatgaccaaatctttctttcttccttccttcctctcaccctgtcttttccttccttccttcctgccctccctcccgcctctcttcctttcctctcctctcctttcctttctttctttcttttctcttttctttcgttctctctctctccctccctccctctctctgtccccttctccttccctccttccttcctttcttccttccatttctatcacccctaaaattccatcatgctgtatcatctcactaagtcccaatctctggaaaccacagctctgttttctgttcctgtaattttgccttttcctgaactggattttaaaggattgtaggaggcagtagtggaagagctaactttatatcttgttcttttacataatgcgccctgatccacacttgggaaagtatattccatggtacctatagacagatatatgtgctttaccatgtatatgtgaaacttttctaatttaactttcctgttaaattagaactcggtagcataaattaatactgttgagtatacttagggatttgcatagatttaaaattgtgcatatgttccctagggccatggcgttaattggtttattagtcaggtggagtgcagagcctgaggtcaggacagttgtccttgaacatggaaatgaagagtggataatcaccatgtgttattgtttgggctgattttatctttaatgggtgattcagagtcctgattaatatttagagcagtgactgctggcctcctacctgctcattatcttcagaactttaaataaaatacttgatttctacccaagatggtagttatgggaagccttttacttcttcttgtctcacaaagacaactcttgacctctcaatccttaaacaaaaagttctgcttctgcgcatgtggggactcttaaactcattttcatgcctggagattcacatttagggatctaggaaaagcacatctaggcagagtcgatgaggagatgctttaagaaccgtgacaaggacaggaaggaaatcaattttgcgttaggtttgtatttttagagaaaacgaatcctggggaacttttcacactcattactattgacattaataccattgtcctgtccctttcacagttactaaaatcactcttgcccaccctcctgccttgcccacaacctattcccatgaaggggtgacttgggagaaataacggtttccaaccaacgttttattttggaaacatttcaagcacaaagagtagttgaaaggatagtctaaagaacactcatctgtgtcatacatctgttcaatccatggttgcttttcgctctacttacctcctccaccctctcagctctgtttatgtatgtgtctgtctgtgtacatacacacacaaacacattttcccctatgccatttaaaagtaaaggagcatcacaacataaacccctaaacacttcaccatacaccattttcttaaaggatgacattctctaacataactgcaatgctatcgttacacacaaatttaacagcaatccagcaataccctctgatatgcagtccacactgaactttccccagtgccccagaattgttccttatagccactgttttcttccagcatctagtcaaggtttttgtctgtcatgtctctgtaccttcatttagttttgaacagtctcccagcattttgttttcctttcatgacattgacttttttggtagggggacagagtctcgctctgtcacccaggctggagtgcagtggcgcaatctcggctcactgcaacctctgcttcccgagttcatgtgactctccacctcagcctcaggagtagctgggattacaggcatgcaccaccacacccggctgatttttgtatttttagtagagacagggtttcaccacgttggccaggctggtcttgaactcctgacctcaggtgatccacctgcctcggcctcccaaagtactggaattacaggtatcagccaccacgccgggctgacgttgacatttttgaagagttcagaccagttctcttgaagaatgtcccatactctgggcttttctgatggtttccttgtgattagattaatgttaacattttttggccaaaagacgataagatgatgctctgtacctaccactgtatcacaatctggaggaacaaaataacattttgttcctattggtatcactaagaatgttaaggtggtgtctacaagatactttccttgtaaaatatccttttccctttgtaatgagaaagtaattttttgatattttgacatattataatatccattccttaaccttttaccctatggttttagcatttatggatgatccttgtctaattcagttataatattggtggttgcataatggtggctttctaattctaccatactttctgcatgtattagaccattttcttatgtaaagaagagcttctacctctcccccgtctattcatgaatatcactgtggacatccaaggtggttctgagtgtacaaagaatgatatctctctttactgaactgccattggatactatttttgtcttggaattgtttaaaatggcagtgtatggaattgaaagtcctttctccagagagccacataaacagatgtctaataaatacatttccatattaaccaatccttttatgggaacaacacattgacataattaaaacacgtaacatgaaaactgtgctgaattgagaagctcatagagttttgtttcttttttttcctttttgccacttcaatatatatggacccgcacctgtcagtccaggtagctcatacatgccgtagcatctaatggtacgagggacatgtaatgctgaaaagaagggggaaaggagttgatcagatgagatataagtatgcatttatcagtgttgtggggtattcacttgcaccttccattggctctcgcagccatgttatcggcatataattcagttgaagatttatattcacctggaaattgtcctaagtgggccttgcttacttagctatcagactctagtactttcaaacaaattaaagattcaaaagattttggggatcgccttgctttttcccataggaaatcacttttgtcctgtctttttaagactattttaagcatatatttcagtattaaaatcgtagataatcttaagctgtttccttaacctctttgggccttttcttatctgtaacataaagttaaaacaggttatctcaaaagttacttatccctaagtgtctttgattctatgctaaatgttataaaggccgaaagggaaatggattattgtacttatttcaaagcttggccatgatcagcaaagtcttacctgatcttccgggtaacaactcttgtatcagagctataagatatagaaaacagtcttgtacatagagtgtggcatttcacatgagaccaagtgttctctgaatggaaacacacactaagagcaagatgtgaaaaaccattgtgtacaacctcatgtaaatgatcccttgcgtccgtacactatagtttcctcagtaactcaaaggtaaaacccaagtatcttgtgtctaagaggatcaaaatgtcaccttccttctgttttatttgttacatgcaggttttgtatagttttatagagtctttttatcactcatttgattttcataaaaattgggattgtttggaagaagagtcattaatattctttacagcttgttcttgttcctccttttatgttctctgctggtgcagacttctctcttatgtaaaatattccactgatgcccttggtagatttagaggttgttaaagaaattgtaataacagatcagggaacagtcagggactgcctgtcctatactgtctgaccctgactaaccgttctccttgtagttttaaatctttgtgtacagactgtaattcaaaaaacagtttttataaatttaaattcagcaaatctttccaaatgctaaggctttttataacgagggctagaaaagttgagttgtcagctattaatgccaatacctattaacaatggcaatgacattgaaatgattttttggatttatgaagggaacatgttactaatgaaaatagcaaatgaaaatggccactgtattagtccgttttcacgctgctgataaagacatacctgagatggggcaatttacaaaagagagagggtcattggacttaacagttccacgtggctggggaggcctcacaatcatggcagaaggcaaggaggagcaagtcacaacttacctggatggcagcaggcaaaaaaagagcttgtgcagagaaactcccgtttttaaaaccatcagatagtgtgagactcattcactatcacgagaacggcgcaggaaagaccaacccccataagtcaatcacctcccaccaggctcctcccacgacatgtgggaattgtgggagttataattcaagatgagatttgggtggggacacagccaaaccatatcagccacaaaggagagattaccctttttaaaaatctgtggtttgcccacaatgttttccataaatttacctttttctgtcaataaaaatgtttaggaattctatttatggatatgtatgtatttaatatttgcatatttagttcttattttttctctaaatggttatgacctgtactaagtaaaatcaaaacacacacacacacacacacacatacacattgtactagcagacctgctttaccttgcttgggataattatctgccatgattaaataaataaatttctgcaactgtttatcctggaatacactgcatagagttgtcagtttgagaagcaacttgatttcaaatctgagtctacaattttagcgtgtttccttgtgacttctagtttggggcttttaatttcccttttgctctctctaccctcagtttatgaacgagtgtggcatttcggcagttgaataggcctatggtagcctcccagtttctgtgttgtagaggatagttgccggcttattaaatgcccttgcaggactctcagggaagtctgttgtttagtgaatagtgatgaatcaatgtggatttcttagttttgacaagtgaaccatatggttatgtaagatgttaacattggggcagggtttctcaaccttggtgctactgatgctttggcccgaatcattctagttctttgttgtgggaagctgccctgtgtgctgctggatgttttgcagaatcctggcctctatctactaaatgctagtagcaccccctccccgccctccccctcccccccccccccccccccccgcccagttgtgacaaccaaaaatgtctcccgtaaaagataccaggatgaaatcactttttgtcagtcccaaactaactagagccagggcagcatgaaaggaggagggttcatggttacatgcctgagataaagactgtctcaaggactttctaaaatcgccccacaagaaattcctctgttaggactgcagcagtgcacgtaatatgctctcaaaagaacatctgcccagtaatggcatccccactaataaactgacaccagttctggcgttgagcatctgaaacgaactatgtttccaagcagcttatgtaaacttctgtttttaccaataaaagtttccctctacagtctcctcttcagatgcatcttgggttgtaatcctcatttctaattccaaaataaatttaacatatttggcgatgtttttctctgatgttttttggtcgacactccaaacattgttatatttcctctggggtacggcatcatttccggttgagaaccaccgacctagagaaaagctatctgcctgtgcagttcctttcaagggccccaagtgtgaattttgtgtatacctatattttaagccagatcattctgtacataccttctaagtccagatgaagtctgttagccttttatgtgtgataccatcacatagaaaccaacacaaggacatttactgtaatcgataaaggaaattttggacagtttgagaaagtaacttattttgtcttctgctctttataaaatctttacaagtgtatgtttttgctcttcaggatgactaggcagctttttaaaattctgacttcatacagattttataatcttccttttatttcttgcgatcatattgcagttgaattcccacccactgttcaattcagcagattttaacagagactccagaagtatagttcctgtctttaattaatctgcaatttaggaaagaaattaaggaggtatcgttctgtattgtttccaggatggtggtttcttgttatctgagaattactgggcacagtctcttgcccaatgtttacttctctatatagagttgacccttgaaaaacatagatttgaactgtgtgggtccacttataagtggatcgttttcaaccaaatgcgtatcgaaaatgcagtactcaagagatgtgaaacctgcggatatgcgttcagctgggcctactgtgggacttgcgtatgcgtggattttgctgtatctcaacagcaaaatccccgtgggagtggggctgcggcgggccaggaagcaacccctagcatatactgagggatgactgtactaattattgtagtttattaagtgttcacatggttttcacaaacctcacaattgaaatgccaattgccttctcctaaaaaatacaatgtacgtgttcatggtagctgggatgcagggcttgctgagaaatacttaattgcatttcttctgtagccatgaattgattttattaccttgagagaaaaatgagtattcaggtggacctcctggcaggcggttggcccttcagtgtccaaggatttatagaaagcacaacatcaaagaaatccaaaagttcttcggaaccccagcaactctcctacctccaaacttgccatgtaatgcccttttaaacttattatattgataggtaaatcggtttgctagaaattccagatattgagaattctttgtctgtgtaccttgttatatttgtataaaggtgatatttgtatgaagccaccctccagtgtgctgtaacagagcaatagtaatgacaactgattccttcccctagcttttctgttatggatagttgctggcaggtgaggaccaacagaaaaagaggagaaacccaacataattccaaactgtgaccatcataatggaaggagctgtgatagctttgctttctgtgtgtgcatgacatagaaggggaaaatggagttattgccaaaacaacagcaaaagcaaaacaaagccaacaaacaaaacaaaacccagggctaaatgacctttccaagagattttgcttgcatggcttgaaactggtgtttagagatgaggacaaggtcacccttgatactgagaggggattatatctgagacttatatgtatctcaacaaataatggtacttacaaagattatctcagtccagtgaatgccatcatacttatcttttgaccttaataacttcctgctattccaatctatccctatatatttttttctggaatgatcgaaatgtaattttagctgggtttaattctagttctgttaggtctttacagaagcttgcctggcttttaattctttccttcttcattgccagacaaaaggagagggaatataccactaggatacagagtagtttgtcataaaaatgaaagattgaaacagaatgagaacgtgaatccccgtaccttgtcttcagtctgtcagttggcgtaggtgagcagttttaaaagagccaacatgatggatcttgcatcttaggggctagaaatttgagaatgttcaacctttaagcatagaagaatctatagttttttgaaagagtagaacattctacagcctcccttggtaattcacactaatgctttaacaactttcagcatcaggaaattcttccatatgagctacagcctaaattcttcatgctgcttaagtctgtttcttcttgttctgtcctcagtggagagatcgaacagctggtcacaggcccctatgcgagagccattcacataattgaaaactgttattaaatcgccccttcagaagtcactcttgcttgttctctctctctctctctctctctctctctctctctctctctctctctctctctctctctctctctctctctgagaatctgggaagattccagagctgattaacatgttgctttactgatgaccttctcagcttttaatatgttaacgtgctctaagaattttaagaggcagatataatgtgcactgtttctttcattaatttgaccttctcgtgaagcattttgctggacgattgatctgctggacatactgggaaacactgactcagagattttagttgagtaggaaccgtgtgtgagcctacggtacagaacaaaagaaagtaatccagttacactgtctggagaaatagaggtacattctccgcaatcatatttgaagaatagttttctaaatgacaatggcaaactaagccgtgtcatatgaagaagaagtaaaaagaataggaatgaagaggcatggacagataagacagctctggtaaaatatttaaagggctgttcaaagaccaagaacttctgggttgctggtcagatggataataataatgacaataacaatagcaaacatgattcttgctatgtgtcagacacggttccaattgcctttcatttgctgactcacgtaatcataaaataactctatgaggtaggcactattaatatttccagtttgtagcagagaaaaagtaagacacagagagataaagttattttcctaaggtcacacagccagtgagtggtgaactccagtggtttaactctggaacttctatatgctgtgctgatggatttcagctcaatgtgatgcagcacttttgacaggggtatctggacacaggtgttcaggatcaccttctaaggatgtttcccagctctctcacatgggtggtgtagtggctgtaagcacacactggcatgggtaagagtttggactcgatgaatgctgagtttggactcagtgaatcctgaaagtcttacagctctgtggtgccatgccaaaaggatgaatggacttgcatgatctttttcatttttagattgcataattctttataaacttttttttccacaaagtacctctgtgatggaactctacacagagaaaagtgctcagcaacagctttttaaaatttaacttgtaagttcaggggtacctgtctaggtttcttatgaggtaaacttgtgtcatgggggtttgttgtacagattattttgtcacccaagtattaagcctaatacccattagttattttcctgatcttctccctcctcccaccctccatcctctgataagccacagtgtgtgtttttcccctctatctgcccatgtgttctcatcatttaactcccacttataagtgaaaacatgcaatacttggttttctgttcctgcattagtttgctaaggataatggcctccagctccatccatgttcctgcaaagaacatgatctcattcttttttctggctccggagtattccagggtgtatatgtaccacgttttctttattcagtcttccattggtgggcatttagattgattctaggtctttggtaaacagtagcatttgatcggaagtttgaactgataccattttgcagctaggaaatccaaagttaaacagtttattatagtgttgctaaatttagaattaggggtaatgactggagtgctgttgaggtgatcagtgttataagccaaatgacctgtcagtctaaaccctcctgcctttctatctgaaatgtggatatgtcctttattaggaaaccacattacaagagaagcaacttggctttgcagctcaaatacccatgacttgtgtgatactaagtattcccatgtcatatattcaactgaaattggctgtggaataagtaatgcttcttggttcttggcaaaagcaaaggagaatcatctctggagaaagcacttttattctaggctcaagcttttatttatctctagaaaatattggtaaggtcagtttagtacgtggtaaaaaaaaaaaacaaaaaacatattaagcacacaagaaatcaaggtggaaaaagaaagaaatcaaggtgaatgagaaccagaagaaatagcaaaccatagaagcagacctacgataacatcatattccagaattattagacagattattttcttaattgtgtttatgcagttagaaaaataaaaaacaacattgaaaaatatctacagggaaccacaaacctgagaagttaccttaaaaatgaccaagtagtatttctagatgtcaaaagtacaataatcaaaatttaaaactgtatgggtttacagcagaccggcaagagaaatggatacccagacagtaaggcagaaggaattaataagaatgaagcacagaaggatgttttaaaaagatgtggggcagagaggggggaactagggaagtcctgttcagagaaatatagattgaagaagagtaacatttatgtaacagagttctgaaagtagaatggagagggaatggagaagaggcactatttgttgagagaatgacggagaagattccacagctgattaaagactctaaatcacaggtttaagaagtccagtgaatcctaagcagtctaaatcaaatcctagaaacagcacaagatagaaaacagatagattatctttattttttttattttatttttattatactttaagttttagggtacatgtgcacaatgtgcaggttagttacatatgtatacatgtgccatgctggtgtgctgcacccactaactcgtcatctagcattaggtatatctcctaatgctatccctcccccctccccccaccccacaacagtccccagagtgtgatgttccccttcctatgtccatgtgttctcattgttccattcccacctatgagtgagaacatgcggtgtttggttttttgtccttgcgatagtttactgagaatgatgatttccaatttcatccatgtccctacaaaggacatgaactcatccttttttatggctgcatagtattccatggtgtatatgtgccacattttcttaatccagtctatcattgttgggcatttgggttggttccaagtctttgctattgtgaatagtgccgcaataaacatacgtgtgcatgtgtctttatagcagcatgatttatagtcctttgggtatatacccagtaatgggatggctgggtcaaatggtatttctagttctagatccctgaggaatcgccacactgacttccacaatggttgaactagtttacagtcccaccaacagtgtaaaagtgttcctatttctccacatcctctccagcacctgttgtttcctgactttttaatgattgccattctaactggtgtgagatggtatctcattgtggttttgatttgcatttctctgatggccagtgatggtgagcattttttcatgtgttttttgcaaaggagcaacagtcatctttactattgacttctcagcagcaacagagatagacgaaagtggagtaatatttcagtattcaaaaacaaaataaaaacaagaccccaaaacctttcaatcaaaaattttatacttgggccaggcgcagtggctcacgcctgttatcccagcactttgggaggccgaggcgggtggatcattttaagtcaggagttcgagacctgcctagtcaacatggtgaaaccccatctctactaaaaatacaaaaagtagccgggtggggtggcgtgtgcccatggtcccagctacttgggaggctgaggcatgagaatcacttgaacccaggaggcggagattgcaggagccgagatcacgccactgcactccagcctgggcaatagagatagagtcagtctcaaaaaaaaaaaaaattgtatttaatgaagataactatcaggaatatggattttttttttaaaaaaaggaggtattttcagacaaacagagcttgagaaatgcaccaccaacagctaaaggaaattctaagggacatatttcaggcagaactaatcccagatggaagatttgagatgaaagaaagcaatgaagagcaaaaaagtagtcaatatataggtcaatctatctaataatataaaaaattaaaacaatcctatagggttgaaaaaaacaaggtataattaaaattcatgaatatagtaacatataaatcaaatggtggtattttgagattgttgagatcattgtcctgtctgggatgaattgtatttcttacatttagactttgaaagagagagaaatagagaggcagacagaatcaacagggcatcatgaaaacagcgctaagccaggaggtttggattctattatcagctctgctgctagctgtatggcctttgaaaagctccttttctggtctacaaaatcagtttgcttgtctgttagatgaggctttggaaccagatgaattttaaagcccctcattatgattctatgagaaacagattctctagaaaaaaaaatcagttgtccccctcctttgaaattttatcagtaaacacctgcatttcacttctggctaacttttatgtatcagttcaaaaattaaagctaaataaagtctcgctcaggtgtgtagtttgcttacctttctcgtttgttggttttgttttcttttcttgtcatctagtagccaaaaagagtaatggcagtttaccaaagccttaggagtgggtagctctttggatatcagggagcatttgcagaaacaagctgtgaaaagccagcctagctttgcaaccattgttctttctatcttttctgtttaacttattaatcgaactgatatacacctcctttgccatcttgccttctttcctttcatccttttgccctccttctctctccctcctgtctttgcaggctaataataagccagagatcgaagcggccctcttcctagactggatgagactggaaccccagtccatggtgtggctgcccgtcctgcacagagtggctgctgcagaaactgccaagcatcaggccaaatgtaacatctgcaaagagtgtccaatcattggattcaggtattaggaaccaaaaaaaaaatgtcatttttttctcatcatttttcacctttttatgacttgatcttttatctcctgtgccagttgctgttagttcgtaccgtctccaaagtgggagagaaggtgattgggctggaacatcgatcattcctgtcaccctcctgatcgctaggttattttggtggatctcacttattaggctggtgtcccttaccaccttcactcttcagctcttcggagccacatttttggttgagcaggccaaagtgcgtgtcttcacggaggtattacagatgaactgtacctcctccttcctggaaccaaaacatttttaccatctttcctttttcacggtctttcctgtttatagaaacttcccaagaatcagttataaaactgagagatgattctattctgggaggaaccataatagtagctcagtctctcattcactttgcaccatttttttttctcccttaagtaacaagaattgttttcagcatcttagaacttgcttctttatctgtgaatctgattacattctttgtatagtatcccagtgaacttctaaaggaataaaaagtaggcaagtaaatggaagattcacaaagcagctaaaaaacaaccagtccttatacatttagaagtgaaagagataggaaacgtagcaggttattctgatagtcttaaaatatcatggaaaacaaggccaaataaatctttagccctgctgacctgtttggggagacaggatttttttttaaatgaattaatctcacttaacattaatcctaaatcctaattctgaaactgcgatgtccttaaatgtgtgaatcaacatcaaggtttctatagtgatgaataagccacaaagttgtaaactagctctatggtctatgcctgtgcagaatccacttagcagcaaagtaaacactcttttccagttacgtgtgaactggttttgttactttattttctaataactaccttgtactgttgcgtgctttttattcatagtgcttttttacttttggtgtttattgttccatagtcatgctgtttacaaagaggttttacaaaaacttttagaggtttctgaagcctagatagacaacagtgagtaggtactgcttgcaaaggtcaccttctttccttcccggtttcttggcaggtaaaaatgataccatgggggtggggagtggggaagggaagccacagtgactgcattagatttctaagctaccttttctctgcttccttagctagtgggctttgtatacaagggaaatttttataaaataaagaagaagaatgccttggaggatctgaaagagcactttcaccttcaattcttttgcccttatcatattatattattttaggacccagcacttctcattcctcctgtccccctcttgaaagatggctggaatctaaaaaagatagctttccttcccacttccccatatgtgacataagaaatatgtttatttgaattggctaaggttcttatctgagaaagcaaaaggcaggagagtatgaaacaaagaatatcgcattctgataatggaggaaatgtaccaactagtatttacagattataaattcttccatctaatccaaatttcatgttctcttggggcttcagttatcatttgtaggtaatggggtgagagatttctgaagagatagagataaaagagttcattcgagtaactgtttgaagatgaatcgtatcagtcaattagaaaacattattaaagcgagacttgttttaattgaaagttcttgttcacatttcttttgtcttgtgaaattgctttatcttgacaatgttttgaaaataattgcttcagaaaacttttgtcccatgatgggtaaggggcatgcacagcgtaagtctgtcgctcctggaagttcttttaaatttgagtatttggttttcaaaagactggaaattttccagtaccttcctacttaatctcaaagagttcctagtggagtttaaataaaagctgagtttttcttccctccttccatatgtttataggataatctttctgccaaaatgttttggtactgtaggagaggcaccggaaaaatctggaggcagaaagttaatcacttaccttgtgggactaatgaacattgctttctgtttctcaaattagaacgtggtagaaggtttattaaagagtgttctttgggaatttgattcgaagaaatacatacgtgtttgtttttgctctttatcaggtacaggagtctaaagcactttaattatgacatctgccaaagctgctttttttctggtcgagttgcaaaaggccataaaatgcactatcccatggtggaatattgcactccggtaagtttgacgccagcctgacgtgagagttagttcacctgggataaatttcagttttgtacaatactgcagatcatgtataatgctgtgatttgtcacttccccagatgttccccagctaaagtggctctcaactgtaggcttcaggatttaccctatccctggtgcctaggggagtgcctggcacatatggaacatgatagaccctcaataaatattgttggatgaataaatagggttttcattctgtgtgcatggttgtattgaagacgttttcacgtttattttgcacagccttagaggttgtgtggggcgatcttatggccatgaggcatgttgagtatgggggatggttctaggttcccccaaattcataaactaccacttttaatcaatgttgctcacctattatctgtcctgtatactagtgacattttaaaaatccattttatatgctaacacttactaaatgctaggcatttaccttttaaactaccctgtgtaaaataagtactatgatttttatcccctctatacagatgaggaccctgaggtcctgaggttaaataatttactcaaggttctataagtaagagttgaagccatctcctaagatgttattttaggaaaatgttaagtggccaatagaactgtgaaaaatcactagggaaatggcaaggatgtagacttggtggccagacagacctgagtacaaatctgcctaagaattaaagacaggctcctctcaggtttgttttttctaaaataaacctgtccctgttgactgtagagccacccttcgtgtttctcttctctttctttaattcttacagtctcctcttctctaaactttgcatgcttgctattcaagatacggtctgttgactaatcatcatatgtctattggcattaccttggtctttattagaaatgtgaaaccacaggccccaactcctgatgctctaaatcaaaacccacattttagcgagatctgcagctggttcccatacacaacaaagtatgagaagctctgctttagagcatctctctcttccatcatcagagtgatcctcccagatatttgcctgtctcacttttattcctcttatagagatggtcagtgattgagaatgtaccatgctatgaatagaccgaaatttagtgggtgaagcatgctatcattttgtactaagtagtttttaaaataccataaagtgtggtaaaatttaatgtcacctttttgaccttaagacctataaactaccatttattgagtagcctagtaagcttgtatgtttcttttatttatcataacaacgtgttgaggtgttgttgctcccattttactgatgatcagagcctctgagaagtaaataactcagccaaattagtacatgccaggcctggtttcagagccccatttgtctgattccaaagcctttgctcacaaccacaacactctccttaattacaaaacaagtgtcatggggcagaagactggagtggtcattagttttgaaatcatcctgtcctaaatctgatctcaccatgatctcccttttagactacatcaggagaagatgttcgagactttgccaaggtactaaaaaacaaatttcgaaccaaaaggtattttgcgaagcatccccgaatgggctacctgccagtgcagactgtcttagagggggacaacatggaaacgtgagtagtagcaaaagcagaacacactcttgtttgatgtatatttgaactcctctcagctgaacaccctccttcactcccaaatgcaaacagtctcttctatttctttctttttatttacattagctgaaaagagaaaaataagctgatgtccagttgccactttcccacgtcacttgacaatttctttttccaaaagttaaactttatctcacagggggaaaaaaaaaaaaaaaccacaacacaatacagccactaattgccttacaagccttataagaaatatgggactgtttacaaatgagtgattccagtatttcattttgattttcctctctcacaaatcagtaaatgtgtgtctttttgtatctcattgtgtggtcatatctagtcacttgtttctactcaaaagaaaatatagtcacaggaaactacttcacagtaagtagtaatgattctcaagatcaaaggggacgtcttcacctcttttcaacctgctcctcttttttgccttaactctgatggcagtcacacaactgtgtgtttttcttttaattcactttacaccttggtttggctattgctttccatggttcatacttaattggctggattttatttattttgacctttcagtaaatttttttgcggctgagtttgcgtgtgtctccttcaccacctcattttttgttttgcagtcccgttactctgatcaacttctggccagtagattctgcgtgagtactttttttgctgaagggtgctgctaccaccaacacattcgctcgcttggttctcttttgttctgtttatttgtttgttttcttttgttttgttttgttttatggacatattaattccccttccttcatttcagtttttttttttcttttcttgatgagactttgaaagtaccatctacacagatcaggagaatcagagtgggttttttggttcctccaccaggtgaaattcaaaccagcagaaatcctggcttgaattcaaattataatcaaagaagttattggagttttagctgtattcctgggagacatgtttatatatttcttcatataaaagcaaggaagaagcttctgattacataataacattctttagccatatttcttgagattcgatgctttttagaatctttagggtctgttataagtggactattaaaaatcagcagaattcgttttaaagtatgatgctgagtttggttgaataattttaatgaggtgtgcggactgtttatcaggttatgccatgctatttgactaatcattatatacaagggtttctaaattttgaactaaactcactttgctctcctctccaagctaaatattcagctcataaacaattatacatttgctctaggaggaaagtatttctttgttattactattggtgtgtattaataatactgagcttagataccagcagatgatttatctcagagtttataatgctagaaaactcttttttggggcctgtgatttctatattagcaaacaaagtgcctattttaaaactacattatgtagggttgttataacaaacttttggtatttcaaagtatgctttattaaaatatttattgaaaatcagacagctctgttatggataaaggggaaatgaccaattcggaagataagcttgtgtaagaattcaatttctttttattaaatcttttttattgttccaccatataatttaatctaaactagatccttttttaaaaaccctgtcgtgataaatgcatattattaattgaggtttattttcagtctttaataggcctaaaggaagtggaaggctatgctttcctttttaaaacttcgttattgcgccccttaattttgagatatggtagctataagtagtatattatctgatttatttaatcatcatgcttaaagaacttagggagttatttaggttcagttatgtcctctgcctcttggaaattgtgtttcctaacccaggtagtctgttatagaagttacaaccgttcataaataagaaacttttaaagagttgatacactacagtttcagcttgattggatcctgataagggaatggatttactctatgtggaaataagtttaaccgagtaagaaatccaaacgacaaatatgctaaagaacagttgttacaaatacatagataaaagtagcaccaaataataaacaaagagtaattaatagtccttgaaaggcaaaaaggagctacacgtaagctaatgagaaaaacattatgacaatcagattaacttattttaagtagaagattttgtctgtcttaaacgttgaaagactttaaaattaataacatcttttatttaaaaatattttctaacaactaaaacacacctcccaatttgcctttttatgaagagttggttagattattcagaaatagtgggaagttttaattttgaggaagaaaacaaatctagcagactgaagtctgtgttttctttaatagcagtaattgtatttaaagtatttattcataggattataaatactgtataaaatatattacaaagccatcctattcaggcataagagccaggtcctaacgtgtttcattttgcaagacttgtatctaatgttaacaaatcctatgatgattacaatatttgatccatttgatatggatcacagaatttgaaagtttccagagatacagaccgtttggttttccttagactaaactcttatttgcttgtgtttgtcatattactttaaaactaaagctaacataggcctttacgttgtctgtccataagtgagccagtcaaacgatattctttgagcgattctgcattgaaacctaaatgaatgtcagcttttaattaatagagttttcataaaagagaaggtggtggtgggtgggatggaattgaccaagtaggtcattaactcttatagtaagtaatccttctgggtatatggttttgtgtttaggaagtgggaagcggggaacagtattattaccttcttttggaagtgttttagaaggctttgcacttagttttgtttgtggactaagtggctttgtattttcactaattcttggtttttaaatgattcatctctgaccagtactcccttttggctcattttctggtttaataaatgtctcttttagtgtatattttttaagatttctggttattgtaagttcttgtgcttatgcatgctgtgataggcgccactgatattaataagaaaaataacatggaattatccttgaggcaaagaattaaagctctgtataagattttctgtataaaatggtattaaagtattttggatttatatgcctacttttcttggtgtacttatgctccaaggtcttaggctttcattcttgtacacacttccaggatagcaactattacaagggaaaacactactaatgtattttccctgatggtaggctttttgcttattaaaaaaatatgtaattgaaagactggtctgttccaaaagatagttcttataatacaaataatccaagtattaatttatcttgatctgcagtgaagatttcaaaacagaccttagcatttttctaataatgggctatgccagggttctagaagattaacagattaactctccaaaactatagtgaagtttcacatggaaatctttggatctgcttattaaattgagtagtcatcgttttgtttcctcttgacaatttaaacgtctttataactcatttcaatttgattatgattacacttgacctagatgacattggtttcataaataagacctttctctctcagggaagaattccatttccctagttatttgctatagtgtgtcgtaattatcttactgtagtatattaagaaatatgaatttctggcacattttctaatgcaagcttagctactggtaactgcatctttttcttttttaatgtaagaagaaacaaacacattctccttagtgtttcaaccaagtccttcaacgctacttggacactgggctaaaccagggtcctctctgaattacattatcgttgacttttggatttatgcctttacctaagggctttctgtgtcagcagagaaatggaagagaccttttgtgctattccaattaaaagaaaaagtccaagcctaaactggttttcagaacagatggttttttttcctaaggttaatccaaaagatactataaaaacttcaaggataattaatagatcagatatgaaaggatgaaaaaatgttaaccctaccagaattctagcctatggagataagaaaagataggtgtttatatacaaaaagcatatagactattcctgctaatgatctcctcttattttctcacctatgttttagcacacagtatctctaagaaatatttcagatatcatgacgttctatgaaatttagtcattcttttttaaaacctcacaatataatccagggtcattctattttgtgctagaaattagtggtatagtcttgctgctgaattggaagatacatttcttctttacaaaattgcatagatcaagacatcttgatacatggagttttaagaagtcttgtactagagtagcctctttgaagctaaaataattgtaagtatctaggcagatatacagctttgatccaataagaagatagcctataaatggcgcaggtgtaaactatttaaaattttaaaccacatagggctaacacaatttcggaattataggatgtgagaaattacaaagtaggaggacaaaatgcttcctagaaactgtctcccccaaccttttctacgatgggaattttccagagaagattttggcctctcttcatggcttttaataaaagcagaagtatgagaaatcatctctcaatcctggattttaaaatacttgataatatttaagatataggagcaactaaatgtatacattatccatagaattagaataaaagcattctaggccatgtgtataacataactgtgtggtgggttttttctccattaatggatggtatctgtgactaatcacattttctgccttataggcctgcctcgtcccctcagctttcacacgatgatactcattcacgcattgaacattatgctagcaggtatgagactagttgtatgccaggcaaatattgattgaaataactaaccaaggaaagctaacctatgatattttaaacaaatcttttctttttttccccaaacttgtctgattcctactaatcaacttgccctctaacgtgcatgccgttccactgcatgttgtttttggtcaccaacaagagcattagtccagaataatcttccctaaccctggcttttaaacatttccggtagccttgctatgtttttttatactgagcacatttactaaattggcttacaaatagtttaacctccttagaaaactgctagaccagacattcatatatgaaaaaatgatactatattatatggagaatatgaaagcatcagctttccgtttgtgtatttattttacatgatatgctgtaaagaagagaataattaattttcctaatccttggacttttctgtctcaccttctttgtgtttgagatgatttttatacctaaaaactgaattactaattttaaaatattttatgcttgttaaatccgtaagagtttggttaacttttttagttgtaaaaaaacaaacaaacaaacaaacaaaaaaccccctgtataattgcctgaggtgaagaagattttaaaggtaaaaattggtggcagaatgtttagagagcttactgtgcatccatcctttgtcaatattctaactgctggacatgtttaccaatcgtgaaaagcattagctagctgtgtaagtctgtcatcagtggaaagtagtaattgtcctaaaagacaaggggtagtgtaaggtagggagtgcacttattgttagggaagcttttcttctgaaaacaaagacctgttctcagtgaaagcaagactgatctgtagggggaaaacagtgaaatataactttccttagaatttctatcataaatgtagtgctactaactagctgtggtctaccacacactgcctcaaatggttaagccaacacacacatcctttaatttgaaggattcctttctcttcttgccatgatttatcctttagttttcaggaatgttcgattaggtcttgaatagattctaagacgtcacataagttttaatgagcttttacgttttttatcaggctagcagaaatggaaaacagcaatggatcttatctaaatgatagcatctctcctaatgagagcatgtaagtatcccatctctttttacaaaatgttcctgacaatgaaattgctttgagggatttagaggtaggatagcacaggatataggaattagcatcatattcatttgatcttttaaggagccattcatttacttttttcctttaattcttaatgccctggcatggaatgagctcatccaaattctggcattattagtattcagagtagcaaaaatagtttgccttactcttatttgaacttatttcataccatatgattacaaattgcagagtcccaagtatttatagtaatgcttaatctttgaccaaacctgccagatatttaaagggataggatattaattttaaagtcatggctaagtactattttctccactcatggggagtggaaacgtgatcttggtatagcatggctattcacatatggtaggttagttgggcattttccttcagaaatccaaagaagtagatttttgtgatttagcatcttcacaagataaataaagtgaggcaatcttatgaagagtttccagaggagaagtaccaattcaggttgcaggttgttagcaggatgataagccaaccctgttaaactttaaggacggagatagagcggtgctaagagcagcagggaacacagctatggcagggaaacaggcttcattatagagtgagggcagtgttcacaatacagagcacaaaggaacattgccatgaaccaagtaaatgctgaccggggcttgaggtagagagagcagacattgaagcaaatatgaaggaaaaaataaggatttgccaagtgaataaataacataaagagaagaaatctagtcaaagtattacgatgcctttttagtttgataaagtaaggatatctcacccatcttggagaatatagacaaagggaagaatggtaaatttatcatatgtagttggtgtggcaacacaaagtcatgctcagatgagaaaagaaccttcataaggattaggccaaaagaaatagtatcaaagtggcatatatataactagttattgaagacatgagaataaataatctcatctggtacataaacgatcaagctaataataaagaatcaagtcaaccctcagtcatttgtatatgacttacttccttcaaacaaacaaacaaaaaagcctttccccaaccataactgtgatgccttatctttcttagctatgggaaaaagtattaatggtactaatatataagatacttcaacagtaaaatgtgtggccaaagaatcagccaaatgtaaatagcttgtgcttctttggctcactgattttggtattagaagctctagcacattcagattaattcgagttgtatctacgtaacagtggctgtcattcattgactgcctaagagaacaggaagaaaagtgtagttacaactctaggttataattaaacatgggaagttctagcagtacaacttcagaatttggaatgagtgtgataaattaggtggtaaaactgcttttgttttattttaaaataagctttagcttattctgaggacataaaatccattttgactcaatgttggatggcaaaaactcatggcattttaggggcaggtttggggaagtggtttggtggattggttgacttcacttaaatgtgtgtttttaatacccaataattatttttagtcagcttttcacatctaaaccaggtaactggcttgataaacaaaaataattcaaatgagaaggactttttcctaaatttctgatatttttcaacttaagtgggtatggagaggagaatattagcgtatcatcttaatgatatctaaccagaaacaatgagctttagcctgtcattacggacagaagaaaattcttataacttggaggtaaacaggcctttccggagcttggagcaatgcattcagaaaaaagtttgtcctgtgtattagagagttcctagtttccaggaaagattgtagctgcctccccaaatagaagcctttttgcctccttttcccgcaagattagtccttaaaaccattatgtataaatttaaaaataaataaaacttgtatttaaaaaaactctgccccgaggaatgagatgttcagtcttcttttaatcagtcaccttaatgtcttttttccccttaattttcgttcttctgtctaaacaataactgaatgaaacaatcatgtatctccagtttaattgttgttgtcattctgcctcaatgacttatataagttaaaactgacttactgaagcaatactttttggttacattgccttccacttaataaaatatttcctctgttacttttagagctgcaaggtattttttcctactcagtacaacaatagcgtgggttagtgaacagattatcttgacaggcttggtggccaaagcattatacagccattattatatcttttaatattttttagctattgactaacatcaacgtagagtcccagtatttctgtaattctgcctttcatttatccgtgtaaataggccaatcaatttcatttgaaaatctgagcaagaaaacactttgaattggtaccagtagaatggtagatcacaacctcagcagtatcaaaaggtctttagaagcaggaaaaaaggtctaattaattgttaagagcaaataaatgtttctattttcaaatacactcctgagtccctaacccccaaagcaaaataagggggggaaaaaaccaaaacctttgattttattttccagagatgatgaacatttgttaatccagcattactgccaaagtttgaaccaggactcccccctgagccagcctcgtagtcctgcccagatcttgatttccttagagagtgaggaaagaggggagctagagagaatcctagcagatcttgaggaagaaaacaggtgagttttctttctagctttgtcattggtatgcagagtgcatacacttgcacacatagaaaagtgccaggaatcttcacttagagtcattttatgtctaattgttttctaaaataatctgtttagctccatttgcagattctctctctcttttttttttttgttatctgaaagaagacaatggatgcaatagtatgatgaagaactcatattttaggtgtgaaggagttaatgctgatggtggtatttgacttgttgcatgtgtctccaaggctttgattttatatttcagaatagaatttaagaaaaaagtaggttatttaattttatgattatatgattttttttacatgtgtttggccatattatctacctcaaacatttaagaaagtagggttattggcttggtcatattgggaaaccaattgtttcatcttatttttcatcatcaaatgcagaaattattatttatgctcaccatcatagcaggttagtgagacaattccaattgtcagccatcacctgtaaaagacagtcatgtaaaaatagcagaaattgtagaagagaaaaaggctaaagaactctcataatgactgcagggaggacaaagatgtaaacatctggggtactgtattgtgtcaggataatgcaaatcattggactttcagttctgtattacatttattatgtcacaggtcccttggtttaaaaagtcttctcacatgatcacttctaactcacaatgtgccttcttcagacagatgccaccaagcaaggatttaaagtagatgttgctcagatttgtgggtcttaagtactttcatctctttggttgagcccaaggcaccaaaagctcttaacgtaggcaacgcagtgtgtctgagatcagtgccctcgggagtatgccacttcaggatgaaaaaacaaactgccactcttccattgcttcctgctgccactgcgagccttctagctcttaacaccttttacctatggccatagctccttatctggttggcttccctttagtctctttcccacccttgcaataaatcctccatactgactctacttgtacatcttgccagaaccaagacccatcatggcattcccctttcactggatttctgcatgtagaaaaaaatcaagcttcttagtggggcgttcaaacccttccacaatattctcttgacttgctttttctatgccatcttcttttgttctccctgtgttctggctatgctgttgtagctagtatttctgaatacatcctgctctcatctacctttggggtcaagctcaagcttgagtctcagcctaactgctaacctctaacccaccactgccgtatctgacaaaggaatcccacctatcctccatcacactgctcaaaataactttccccatggagccctgctagatccctgcagttggaagaaatctgtcttttgcctctattcccagagcactttggacctttctcagaaaattccttgacagttttcctttttatcagttattaccagtgcctctctttaatgagctagtgtgtgtctttggggcatggactgtatcttaatcatcttcatatcctccagagtacttagcatggtttgaatatttaatggctactcaggaaatgtttgctaaaaacctgaaaatacagcaagaacatcacatgagtaccatccacgagataatattgaactttttttgttgttttaatgatagctttatttttggccgtacttttgagatcatttgtcagtgaagaccatggtagagaaaacatttctactttattgagaataatcagtaatatccatttatgttaaatctgtaattattgtaggggtcaaagtcaaatcggaataaaaagttggaactgacactgtaaatagaatttgatgttaccaaggagtaaatatatttttgaagtatatgatcgtgtaatatatcttttgagctcattggtcaagagccctgcctcgtttgtggttagcatagtctttctccgtaccattgcacccgggtcaaagaatgtttgtaaagagtactgataactatcatttatttatcattttatcattttgagtgcacttttacatattttagatcatttaatcttcttacaaacgctatggagaagagactgtcgcctttctgtgaatgagacacaggttcttagaggttcacacagcttgccccagatttcccagtcagccagtggtagaactgaattgaaatccagatttttctgactctaaataggcaactctgccttcaaccagataataaagaagagtaagtctctgtgaatgtcatttacatagaattgcggcatattccccagaatgtgccttaacttgagggactatctatgaggactgagtgtcccggaataaacctgttcatctacttgtggcacagcgataaccgctttaccctggaagatatccaagaccattctccaagaatgggatggtttgttctctaaaagaacaaaaaacataacaccaggcctacttagagctccaaaatgaggactctggggttgatgcaaatctttgtgtaagttaccttgaccttcacgaaatgatcaggatgagcttccttcattgtcccttcattttgtcctatttgaccttctaccaaattccaaagaaatgtctccacagagttcccttcctgaaaacagcccgtgtgttttctttgatctgccctgtcctgtcttcttgcagttctgcgcaaggagcttcagagccctagatttgccttcgctacccttgaattcagtgttgcttaaggagcctttaatttgccatttcctgttgagaaaacccaggaattctttagatgccctctctgtgcatgtctagctggctatgtcctaagtcagcattgggctacgcaatctgacaaatacgagcatacttttagagaaaataagaaagtatatttaaaattgagattgccccaagtcctttggatgtgtacttattgatctgttaatatatatattttatgttcctttagctgtgatttatctccaaataacagcaaaagagagaggcctggagagccccattcctgactagatatttattaaattccattaattgttcttattcatgacacctccctacaaccccctagaaaaacagaggatggctgtttgagaagtgtctcagaggtatcttatctctgcctttagaattccatttctcctggttgttgcacatagtattcaataaatatttgttgaatgcattaatgaataaatgaattgaagctgaatttattttaattgtagcatacatgcatgcacttttgactaaagttcttttacaaacctaatttcgtagagaaaagcctttcaaagactttgttttctgcttgcttttcaaaattctcccctttttcaaactgccttgattagcaccaggcatggctttgtcataaatttagaatgttaagaacccgttttccaaatcacaggcactgtatgtatcccacattggtgttctctgattcttggttgatgccacagagataaggctaaagctctgagtaaaagctaaatctgactgagtttttcccatagtgcctcccataagtttggatgactaatggtgttagtgagatatctaatctttaatatttcgcttctgcatcatatttctccctcattaccacatataattcagatacatctttatttggcaaagagccactggatcttgggtttttgccccattgtgtgtccttagcattgcagactcaaggtttacttttttttcttgcgttgattaaagccttcagtctcctgacttaagcctgtagtgttcaaatacagagatgtatttgtctctgcactgtctaaataaaccaagacttgctctgaaattcaaggtatgatcctagcaatgaaaaggtagcctttctgagagacaaagacattgtcgttctactacctgcagagcaaattgattagattgttctcaagtcaacaaggtggctaaatattaacctaattcaccataaagtctaaagttaaagttgttagtagatgttatataacacgagggaactctgtagattcttaatacctactcaggacctttcatatgtcttgttgggcagtaagaccttatgaagccaaaatttgagttttctctttttcctttaaattcctccagtgattgtgcaagattattattgttacagtcaaagaagttctagatcagttactgataccactgaattaaagtagctggaaatcatgatcccgttgctttactttgtaattgacttgatgactttggacctagtctagtagctatcaatcttcatagctacgggaaatctttattcaatgttctttcattaggtctttgtgcaagtctccaatgatggtgaaaagatggccaaaatgaagggaatctgaagaggttaggaatgggcattcctatggaatataaacaaaggtgtcagggtgaggaatggcagagtttgtttgagggaaactgcagttgtattaccttttttaagaaggcaaagaatgagaggagatgaggctgaccaggtcagcaagggcaggtcgggaagggtgtggtacccactgcagagttgctgcctccgtgcctagtctagggagcaactcaagggtgtgatccaggagtcaggccatgatattgacatgaatatacgccacacaggcagctgtgcggagggtaactttgaaaagagcgatgctggaacgaggaaatcaagctggggggagtcacatgggagcccaggaaagagatgattagagccttaagtaaggtgatagaaatgaagtagacaggctgatctgagtgatatttcgggggaggatagagctgtttgattcggtagttctgtgggactagggtatgaaggaatgattcccagggctggtaactacaaaacaagatgatagtagttatttgcagctgggactgataattcaggaggagttgcagcaggtccatcctttaatgcagcagtgtttattagaggtccttcctgaagggctgagtagctggaaggtgataaatgaggtatggaagaggtcgagttgaggtcctggtgacatctccatgtgtaaatgtctgacagtctgagagatagaactctgatgcttgtagaaaggatataagcctgagatattaggactgtgagtcgccagctcacaggtggtagttgaaaccgtgagaatgaatttatatatcccgggagcatgtagcagaaggagaacactggatttggtagaactccggaagatgtgaacattaaagtgtgtatttaattacttttatttttagtagagaatacatgtatattattatacaaaatccaaagggttcaaaaagacatatagagaaaagtgaatccttctccaaccttctcccctggctgtggtgtttccagctctggaggctgccatctttcttggtttcttgtgtttccttccaaacatgctctctacatatgcaaatatttgcaaacatatttatggttgttggggttacttcacacagtgtcgtgcagtgttcactctggttttctctttttacttaaaaatctctaattttcacatgctggagaaatgtgccagaagaagaggagggcagagcttgggaatgatgggagcattttcccacaggaggcaggagagagaagggttagggaactaaagtatgggaggaggcgtgaccttgaatgagaggaaggactgcctctgaagacaaagtggtaggtaaggaatttagggtaaggaagggaggaaagaagcataatggaatgaatgttaaaatgtccagtagacatcactggaaataattcaagactgattcctacggctgttcccacatgtttttaaagttggagtggagaggaaagcgtggtatatgatacatttaacgaaactaggcattcaagttacttggtgtattagtccattttcatacggggcaatttacaaagaaaaagaggtttaatggactcacagttccgtgtggctgggaaggcctcacaatcatggcagaaggtgaaggaggaggaaaggcatgtcttacacggtggcaggcaagagagcatgtgcaggagaactgccctttttaaaaccatcagatctcatgagagttactatcacaaaaacagcatgggaaaaccccacccccatgattcagttacctcccactgggttcctcccatgatatgtgcggattatgagagctataattcaagatcagatttgggtggagatccagccaaactatatcatttggtgacatgggccccaaaacaaagggctacagagcccttcttgagacaaagggagctagtttgatcacagaaatcagaaagccaagaccttttatggcaaggatgaataagagctgaagggcatacatgccacatttaagaagctgtgtaagaatggggtcaaccatctcagctctactcaggcagggaggacaggaacatggtagaagtggaatcaccattattcacagactcagtttctaactagcagggccagtgtaactaaatttccttcagtttatccaaagttaattgaagtctgaggggactgattcatagtatgcagttcatggcagtgaatggataacccagaatgaaagtttatttctccctttatcctaattatctctctttttaactgccttgtattaaaatgttatcaaggttgccttaaagcttttttaggaggagacagcatctggtttaagtgcaaatactagatctattaaaatgaggaatatattcattttttcggcacacagcatcctgtgtcttagaatccagtgtcttaggaatcacaataaaaatcaaattgtgttctggtgagcctagaatcttggcatctaaaattggatgtttgtgaggactgcttcatactacaaaaaaattgaagcacccctctggcgattagaatattcacatcttacaagtacagctgccatctccctagaacatgctggataagagtttatgttcttacaatccaatttcccttttttttttttttttttttttagatttttcatgaagaccctcatcctcctgttggccttcatttgccaattgtccctctacagtagaattgattatggtcatgagtttctttagctactttccaggcctgaggatgtaattctgttcaattctgcagatagttactgagtgcttaatgtaattttaaaattatgagactacaaagatgaataagccttggttcttaccctcatggagctcaaaatttattttaaaaaagttaaaatagaaacaactacttatatcctactgttacaagtgctctgggggcacagaggtgaatgatttattctatcagagggagtagagaggcctttacaaagagagtttaagagttgaagactgaatgggagttttccagtctgagagatgggggaaggatgagttttccagactggtggaccagtgagtaatgtgtggcttggaatgaggagaataagagggcagtgggatggtaggtggggactactgtttaaaggactttgtgcatcatactaaggagtttgggttttatcctataagcaggtgaacagtgatggctttttgacgggggggaggattgagaaaaataactgacctggcagaaagctaaagccatgaagattggtagaagcacagtggaatagtccattaaaagatgccaggttcttaactaaggatgtcttaggcaagtgaagaaggggatggagaaattagaaggtcactgaatgaatgagaccaagggaaaatggagagggggaggcatctggtgttacggaaagttttaatttgggaactgggaaatgatcattgaaaaacaaacaaaagcaacctagtgcacccaggaaaaactcctgatttgcaaagggttagtgcatggagagaaagagctacgtatcagacatactgaattctatttgcccaaggacatttcaagtggaaatttcctatgttgattttacgtattcagttttcagaaaggattctttaaaaagtcatagcaatacaattcctgcaatataaataatagatcaatgaacatcatagggattagcatagttgatttgactaagcttcagattcagtttgagcttccctgtagccagggagataataggaaacaaagatttgtctgtctcttaatattgaattaaagaagcacgcagcatcctaaagaaacatcattgttttcctggctctacgtaataataataataacaaaaatagctgtcctttgagtgattgctatggacaggaactgttctgagtacatatgaactcctatttaatccttaaaacaaccctatgaaagagaggctgtttccagaggattacgtggcacagagtattaaggacacttcatatggccagcaagtaataggacctgtattcaaacttgggtggtggtcctgaactcttaagcagcgttacacttgaagtgattattggctagtgtccttatcaacatttttataacaaatcccaagggaaattatatgtggctgtttctcatggcctttgataattgtggaaagcttaacattaaaacaccaaagatagggtgacagttctccaaggataaaggtcactgttgcctaaaatgtattctgcagaataccactgagatactctgagaaaaaaaggattccaaggacagtaaaactttgaaagcactcatactggaaagtcatcattacgttagcatttgcactgaggagtttggaagtgaagaaacctgattagctttgtctaacctcatgttgctcccacttacttgacctcgagcccaactgcaatgttatatggaacacactttggtaaagaaattcaagtctgaagtaaactttgaaaaccagtctaggagatagcatagttgactctctactgtagttgttgagaagcctatccgttgtgtctctgggaacatcagaagataaagctataacaggtgcccacgtaggaagcctggatttttcgcacaaaagtaacttttcatatgctctagtggtgaagcagttaccctgtagacccagaagccagaatgatttagtctgaaaaatctaaagataggtattaaattaactctcatgatcatagaaaattctttgcaccatttttgtagaatatcccaccgaataacttggcttttcacccaaaccaccaagaaaaattgccaccagtgacttgatgcaattaacttgctatcgggagttctttcttgtgaaatgattgaactttgaaagatgtttaccaaagacagcacctttagcttcatcacaattactgtggaatctttctttgtaagtagttagatgcaaaggccagttgttgcttgaggcctctcctggattgtgattttaaagtgtatcatcaacacatgggaagatatttctccctctttatcttatgacagaaatgcaggtatagctttcatctcaaagtaagattaaggtataagttacaaagatgtgtagctactatatggtcctgtgtaatgctacttgaggaaggctgttcctttcctggcactgaaattttagagcttgcataatcagtatatcaacctcgtgtggcttggtgcttagcaagtttcagcttctagagcccatggctaatggagccatccaggagaatgttggagagataggtctgaagccttagaagagaagtcttgattaaggagtaatgagttgcgggaaggggtcatggttgtggcggagatggaagcctggggagaggacagagacctcctaggaagagagtttgtgtaagaagaagaccaaggacctcctgatgtacttgattgtaattgggcatgagcagcccagttagaaatggtttcctgttggtattacatatgtacatggatggcttctgcagatggctaaactcacccattttatttttttactatcttaatagttaaaatatgaccttttcttgtgtctccaaattctgagttaccttatggtgctagtctgtctgttgtaactacaagtcataagtaaatccatatgattcttttcctgtaatttcctggtaaatcaaggcgataatttcaaagataaaaatctgtatttttagctttagcagtgagcatgattcccagtctttttgccttcgagtaaggtttgtttccatggtggaagtaaacaatatcccacactctagaatgtgagctcttcaagggtaagggacagtgtcctacatatatctttatctccacagcactgggtacataaatgtgtcataaaaatgaatgggtaaatatcctttggagtttttctgttacttgatgggtttttggggttgattttcaggtatctcccttgtttttctcatttcttacattattttctttcccaaaatcccttaatatacctgtttagtttgtgatgtcattttccattagactgaaaccatccaagttgtttaggctaacccagacttaagcattttctgggcttatttttggactctttttaaaactcatcatctgaaaatatttaatgtccacacggataattctgaagacatgtgcataccatttttcttttatgtacatgggttaaaccttgatttttccatagtaggagaaagcattataagattttattgttttcactggggtaatatcttttgtgctataagaaataaaattttgaatctagaacttagttttttataagacctttattgagatataattctcgtaccataggagttacccatttacagtgtattagtcactgattattagttaataggttaaccagtattagtaatcactggttattaattacagagttgtgcaaccatcagcgcacaattttagaacatttttatcaccccccaaaagaaatcccatccccattttcaagtcactcctcgtttctcctgcaactactcttttcagccctagcagtagacaatccctgatctactttctgtctctatggatttgcttattctggactgttaatgtaaatgaaataatacaatataaagtcttttgtgactggcttctttcacatagcgtaatcttttaaaatggtatctatattatagcccgtattagtatttcattctttctttaatgctgagtaacatttcattgtatggatataccacattttttaatctattcattacttgatggacatttgggctatttctacttattgtctgttatggataatgcagctatgaacattcatgtacaagtaccggtaattattttaaagaagttattctgggctgggcatggtggctcacacctgtaaacccaacactttggcaggctgaggtgggaggatcacttgagaccaagaatttgagaccagcctgggcaacatggggagataccgtctctacaatttttttttttaattagccaggcatggtggctcatgcctgtagtcccaactactcaagaggctggggctggaggatcacttgagcccaggaattcaaggttacagtgagctatgattacaccactgcactccagcctgggtgacagagcaaggccctgtctcaaaaaaagaaaaaaaaaaaaaagattctatagtttctgtcattgtaatagaggaggccataggatcatatatggcaagagtatatagcagtgcatgccagggagtgaaaaataggccatcaaattgaagttactgggagaacttaagactaagtctaactacgcatgagggattgaagccgggacacacaaagcttaaaattatgattcttctagagactgttacggctttttgctgaccacagacaatgaaagtttgatattttgctgtatttgtctgaaaatggaaacacacttttcccaatggcagtattcctgaggactagagttcttcacctctaaaacctctccaatcctagtttttccttttggctgatgatgaccagccactgccatttttgtcttaggttttgttagtctgtcttatttccagttataagtggttaaaatttcttatgaattcttcttgtgttgaacttttgattaatacatttagtctatagacagtaatgaattagcatctgatcaggaatttgtgaaaaacatctcagtcattaaagattaagaaactgaagccaattaatattgtcatgttctgtctcttggaacttgagcaagatacagatctacgtgtcaatgacatatccagaaaatagactccacctagatacattaaccctgtacccttggtccacatattttatttcagcaatgatccatggacatattataatttgacagtttcatcacatacctagcgtattgggtcaaatcaaggaaatctcatcctagtgatcttaactcagtgatttcattttgcccagatgttcagctgtgataaactttactaaggcacagatgatggatgatacacaataattccaaaatttgggggtggctacaatgtggctaggggctagaactcaggtatctacaggacaaatactgagtgattagtcactttctaagcgctagatatgcatatgttctgccaagctcagtaggtctaagtagattgcttccatttcagataattaagtgctttctttttataggaagtttttagcacatctgaggttctaaatccaaaaagtaaataatatatagagaaagaagtaataacaataataatagtaaccaacatttattgaacacagtatgggctgggcatggttcaaagaaagtttgacatatagaatgtcgaccatactggcttaataatcctcataactgaattagtgcttaagtcagttgcccagcctcagcaagcagcagaggcaagtaagtcataaatcaagatcttctgaatccaagaccatctctcaagccttgttctaattctctcctcagccatggatggtgaaaggcaccacaaaggcagcgtgtcaaaaagtggcattgttcaacctttcccctgatggggcaaagcttttatttttttcctttacgttctttgacatctgttttaaaatgcagatatcactagaagaaatgacaactttattataaaatcccagtaaaatgtaaatgtcttatataaaacctttatactgagcaaatttcagtaggaaagggcttggaagtaaggctctgaatgttttaaagggggacagtgctaagaaatgattagaaacaagagcctggaggggtcctgccatttttactgttttgcttaaggctgacctaaaatatgcatagtcttacttctcaccctgtgagcttatccttattaatgtctttttccacctagtttaggggtatttttgaatttgtgtttgataaagatgtctaaagctgtactgtaaaattttattgtcacttttttttttaaatggagtctccctctgttacccagcttggagtgcagtggcatgatcatggctcactgcagcctcaacctcccagactcaagcggtcctcccaccccagcctcctcctcctgagtagctgagactacaggcatgtgtcacgacatatggctaatttttttcaatttttttgtaaagatggtgggggtgtctccctatgttgcccaggctggtcttgaactcctgagctcaagtgatcctcccacctcaacctcccaaagtgctgggattacaggtgtgagccattgcactgagctttattgtaatttcaagggctcaatgcaatttccagtttttaaagttcatcttgcttgcagaatttgtctttcatttaaaaaaaaactgctgattggctacatttatagctgctgtaatagttctgtatgatttactacatttgcctgaatttagattggtggatatgatttagctgcttttaatattatatgagggtaaagccagatttctttggatctattccttttagatggcaatctttgtagttgttctactttacaaaataatccctgtgtgtgctcatgctttggtatacagttaaatgtatgatactgttaagaaaacattgatcactggaaagtgaccttcatttctttatttcataaatatcattatacaactatataactacacgtagtagggaagctccatttaaagagtagatgacttacactgaaatcatttgacctttgtaaattagtttaaattacacagagattgttgtaatgttctttatcatacataatagttacgattgctagagaggcactcataaatcattgctaaaagggccagctgctttcatgttttcagcaggttgagttaagggaacaagccttgccaatttgattaatctcttatgtccattagttggttgggaagtttttttgagtgtaaatttgtatgtagacaacagagtttatattctttatgacataaaattaatcagatatatctacatatttgtagaatggggggattcttagctctatagagaataagaaatactggatggaagactttttttaggatgactggctacaggaagaaattgtagtgacagaagccatgtgtattgaatttgaattaatgttccttagggagctaccagagaaatataatttacaagataatcaagaacgtaaatagattctctgtggagtcgttgtctgatcactgacatatattcatctgtattgaaatgacttcatgactacattctaacaattagagaatcattaggggtgagatgtacgtgtataccttcaagaaaagcaaaatatgtattggtaataattgacagctgttaaaacgagtgcattgtgtacttgttaaacattagaggctgggcatgttggctcacacctgtaatcccagcactttgggaggccgaggcaggcggatcacgaggtcaggagatggagaccatcctggctaacacggtgaaaccctgtctctactaaaaatacaaaaaaaaaaagccgggcgtggtggcgggcacctgtagtcccagtgactctggaggctgaggcaggagaatgtgaacccaggaggcagagcttgcagtgagctgagatcgcaccactgcactccagcatgggcgacagagcgagattccgtctcaaaaaataaaaaataaaaaaataaaaaaaaaacattagaataacttaccttggaacagtaactctgagggaaccttgatcatttatgagaatgatctcccctacgttaatactgcatcaaaactaacattatggtatacctcaaaaagtattggcatagatgtttttaaatataagaaaattcaaatgcgtaattgataagggctaaatggctcaatttcccaacccctaacaaaaatatgccctaacacagctctgtgactatgactgcatttattagaaaacatttagtaaaaatcatctctagttcaaaccctccagcatcagttcttcttgataattctcatgaacatttagaaataccttaaaagagaattcagactcaaatcaaaaaaccttatttcatttggttgcaggccaagatacctcttttaaccatttctggcttttagaatccttatcatgacagcttgtcctatctcagagcttcaggaggaaaaactagtccctcaaaatcaagtttgctattgagcttaataagaggtttctgtatgtcatatgtttgtttagaagaaaagcacttgttcgactcatttaatcctggcctgatgaattaaggcttgaattaatactgagggaaccttgactatacatctacaaaatcaatgtgtcctggtaggcttctgattaagataacattagctcttgcttgaaggcatctttctctgctcctaccatttatccagtggtagataatatatggagtgaaaaatgaaaaagacatagctgggctttaaagcaagatgaacatctctgtgaaccagaaatgtgaaagaaaaaaaaaaaagtaagtggggctaaattagtgggctttcagctcgtgctgtagtaacagggattaaaattctccttacaaggtagtggcccaaagccaggattactatttgaaatcagagccccacaaaaacacacctagagagagacacatacacacttacacttaaaagcaacatgaaaagaaacagtttgctgcaagggtctacagcttatatgcagctatggccctaatgcatagagccgagggaagaggcaaagattcgcagttgggaaagagagcatcacagccttgaaaccaggacctgaaccaatctacctactgcctggcaatgaaatgagtgatatctctgtatcactcagtgtaggagctgcaaactaccaacagatgtggctctaaactctaagcccctgggtatggctgggagaagccataaaaccacctgagagagagataatgagtttaaaaagagaggaaaatattaaagtacacacacatgagaataatagaaaacatacacatgcatatgtatgcacatgcaaaacatcccttgcaaaatttgtctccaaatcacgatccaaaatacatgaagaaatgggatagcaccccccacccaagttaaacatcaaaaagtgaattaggctgggaacagtggctcacacctgtaatcctatcactttgggaggccaaggtgggaggactgcttgtgcccaggtgtttgagactagccagggcaatgtagtgaggtgccatctttacaaaaaataatttaaaatatattagccaggagtggtggtacatgcctgtagtcccaactactcaggaggctgagataggaggatcgcttgagcccaggaggatgaggctgcattgagccataattgtgccactgcactccatcctgggcaacagagtgagaccctatctcaaaaaaaaaaaaagatgaattaattctagaagaaagcaaaataatacactagtacaacaaagatttttacttacatttaagatgctcagaccaggtgcagtggctcacgcctgtaatcccagcactctgggaggctgagatgggtggatcacctgaggtcaggagttcaagaacagcctgcccaacatggtgaaaccctgcctctactaaaaatacaaaaattagctgggcatggtggcaggcacctgtaatcccagctactcaggaggctgaggcaggagagtcgcttgaacccaggaggtggtggttgcagtgagcggagatcgtgccactgcaccccagcctccatctcaaaaaaaaaaaaaaagatgcttaaaggcataaataaggggtaccactcgctaaaataacaagaaactaagaaacagagatggatgaaatgtaactaggtctgaaaacaaagatatctttgccaaaaaaactagtcattgaagttactaaactcaatatacaggataaattctagactttgtcctgtcagagaaggcaagggaattagaagatgatgctgagaatgttactgtgtacaacactcacagaaaaagataagaaatataaatgagcaattaggagaaatggagaattgaccacaggctctacaatataccttactagaatttagaggtttgtttaggagtgtatttgagaggtttcagaagaaaatggaggaaatggtagagaagtaatatttgaagctgtcatagctgagaatcttccagaattgaagaaggatgtgagtcttgaaggaaatgtgctcccaagagaaatttcaaacatctgggaaggaaagaaaggcctgcattgagcaattgatattctttacagctcagctttggctgattaaaatgagccttttctgttttcactggaaaccaccaaaacagaaatgtaatgtgttgtatataccaaaccatgcctcttgaacaagggtccttataaataaatcataaaagaagagccctgtggacaactaaacccacaggatcaagataccaaggaagatctctctagaaaaggcagtctcctgtcagcacctttgtgaaaaataggtgggaagacagtaatggcttgttgtaccatcttgaggtccatgtctaaaaactgttttcaaaaggaacaccatggctgccccaatctggtagaaagaaaaatttgaataggattctacataaaaagtgttgccagttagaacattttgttgaagttttcttttaatgaagagggaaaaatagaaagtaattcctatggaatgagaccttgtgaacattggatactgcttcaagttcacagaaacattgaactgattgccagttaagttctcagaaattagatttaattaatgtggacagttacatacatcggtgcacacccagaagacccgtgtgcagaatctgactgaaggtgtacttacttcgatgaatctcttctcatcactgctttgtcaaagcagattgctatgaaataaactatacaaacaactacccttgaaggctgatagcaataggatttcaatcagtacagataggagattctatttctgtagatgaaaaagatcatacattgattttctgtgtgactttaaataaattcctggaaaccttgtaatgttaggtactaggtagaatgaaaaaaatgaagcaaaacaaaacaaagaaaaaaaccagagtagattgggttttctttctgcttccatgtggagatctagccttttgaaactgagcattttggaagacatgccgtcccctgtggaatgttcattccgagtatgggacaacagaaaatatttagcagacctggtgatgagatgatcttgctttctcaaactggacaatgggaaaactcttcttggctactcactacttacatttcatctcttttctcattgatatagatctcccacatttgtggataggaatttctctcacctgatgaaatatcatctgtgaacaacagaaatctgtcatcttattttggtatttatcacaagtagaagaaagatgtcaagagttctaatcagtcactggatatcaaatatcagaaatgtcctcaattggaattgtattctcagtaaatcctaaagcatttgggaccttcacatgtgctaatactgtttatatttatttggaaattaaccaaatataaccaaaagacagtggaataaccatagaaacctttaaatggaataaaatttatggcaatcaacattattaggaagaaaaagtatactacctagaaacagtgcaagaacaacgaggatcttctgtgcatctaactatataggtctagaaatatataaagtgaattatgatagaattaaaaggagaaactaacaaatccataattatatctcaacactcatctaacaaaaattgatagctacaaataatcaaaaattaataaagatatggacaattttaacaacaaaatcagcacactatgtatttagagactccatctttccaatggaaaaatacacattatttcaagtactcaatgaacatttttagaaagtgactgtgaactaggtcacaaaaagaagtattgctaaatttcaaaggatcagtatcatacaggggttctctgattgaaacgcaattaaattagaaatgcactaagaagtgaaaatggaaatataaccactgtgctcctaaatgactatgggttaagttaaaagaaatcacagtaagaattacaaaacataaggcactgaattgaatcaggtgatgtatataaaaacttttggtatataattaaagtggtaccaaggaggaaatgtataaccctaaatgtgttcattaaaaataaaaaatcaatgacttattcaacctgtaaagcaagaggaaaaaaaagagtaacaagtaaaacattattaatggacataaaatgagaccatagtaagtaaggagcttcactgcattcttggatgtgaagactcaattattatgaacttagttcttcccagtttaacctatgaattcaatgtaattcaaactcaaaatttcaacaagcattttcataaaatcagaaaaccaaacactaaaatcatggagaagatcaaaggggtcagaatagtcaagacaattttgaggaaaaacaaagtgggctgagaaggcctatcagacatcaattgatttaaagctggagtgtgggatctaccagggatatgcagatagaaccacagactagaatacagagctcagaagcacacctgtatatttatggacacttgatgttttgcggaagcatcgttagagatcagtgggaaatagatggaccatacaatgaatgaggctggcttcatagtttatccatgggggaaaagtaaaattagatcgcatgttcacggcaagcacaaaaatagattctgggtaaattcaagtcctaaatgtgaaaaaccaaattttaaactttaaaatgtaggtgtaagaaaagattttcgtgaacaaaacataaaaagcagagaacatacagggatatgttaaaatttacatcttttataccataggatgccataagcaaagttaaagataagctacactaagataagggtagaagatcatatttgccatgcacataactaacaatggattagcatctagaacatatccaaaggtttaaaaagaaaaagacaatccagcaggaaaatgggtaaaggaagcatgaaaagccagttaacatggaagaagtctaaccttgccagtaatccgggatgtatgtgcaaattaaaatgcacccatcaggttaactaaaacttgaatgtctgataacaccaagtatttggtgaggaggtgggccaaatggaaaacctcattcactactgaagcgagagtaaattggtaaaagcaccgatttgtcacccagagcgattcggtgacatgtagcaatgttgaagatgttgctaagatccaacaattccacatcaaactatattctgtaaagaatctcttcaacaggtatccaaggagataggtataaaaaagaatttcattgtatcattgtttataatagtgaaaagttggaaacaacctaaatgtccatggacaggaaaatgttggcatattcaagcaacagaataataataccttatggcagttaaaatagcaaactattatgtatcgacctggagaaatctccaaaatggtgttgaaggcaaaaagcaactcttagaatggtatgtatattcttaaatgtgaagttcttaaatttaaagtttaaaaacatgcaaaataatgttattagattgaatcacataaaatgggtgtttttgtaggtgaaagaaaaatacaggcaaacatcagcatcttttttaagctcaacctagtatttgttgatacattcatggtaacactgggcatgaaattcagtgtggcattatctccttgagggcagcggggaggagagaatggtatggtgttgaggcgggcatgtgagggagcttctgctttggctgttaacttttctttcttcaaaaaacttttgaagaaaatatggcaaatgataaacttatcaaggggaggtgataggaacatgggtatacttactccattcttatacatttctgttgaaaatatttgctaatgtttagagcaaaccaaagtgttgatagaggtataaaatttttaatctcatgacattataaagaaatatttacaaagtgattaaatcctttgctgcttacttatctgaacataccagtcgcgaggcttttagtgtaacataaaaaattgaaaagcatggctcccttcacacaccaggcaaaagcttcaaattttgttttgttcttttagcactggtaagattgtcatcattaaaaccattcattagtgcctcttttgcttgctgttcttcggtggcagtcagatgcatctatctaccatggtatataaaatttggtgatgatattcaaattactttttttcttctttttctttttctttctttttttttcttttttacttttttgatgccaataggaatctgcaagcagaatatgaccgtctaaagcagcagcacgaacataaaggcctgtccccactgccgtcccctcctgaaatgatgcccacctctccccagagtccccgggatgctgagctcattgctgaggccaagctactgcgtcaacacaaaggccgcctggaagccaggatgcaaatcctggaagaccacaataaacagctggagtcacagttacacaggctaaggcagctgctggagcaagtgaggagagagatgggatttttacaaacattcatttttccctcttaaacaaaactaaacctcagagagcactttttataggtgcaacaagcatcaattcttaagtgcttggtatgtgcctgcaaagtgatagtatcaaaggatagaagtagaggagatagaaaaactagtgtgtcttttttgtatttgtccaatattgtttcctaccaaaatggttttttcttgaccaatttgaaatacatcttggggaaaaaaacgcctaaaggtttccactagttctctaaaagtgaatatttcacttcttgaaatggaactatttcatttacaattagttatattttctggtatacctttgtgttttttttctcctaatccctaacacatagttctttaagcctccatcgaaaacctagcaagatactgcattgtaagaggacctacctggacatagttctggctttctgggaattttaaatttttcaattatgttctctctatcttgttacttaatacttcacaaagatatgaatcttccattacagttttgagatctcacatagtctcatcattcacacatgaccttctaaatcttccagttatttaatgtaatgatgtatagtctcattccagtgtagctctgatttttttctcaaatttataagggagcacaattcagatacaaagacagtttctatggattatatcaacagtgaaatatcccaaattaaacaatctttgggagggcttctaaagtaggaagggtcaaaatttatgagtcctgagtgtgtatcatattttgaaatttatacatttgtatgtttattatgaaaagtaattctgttttcttttggatgacttagccccaggcagaggccaaagtgaatggcacaacggtgtcctctccttctacctctctacagaggtccgacagcagtcagcctatgctgctccgagtggttggcagtcaaacttcggactccatgggtaagtgtcctagctactctcagattttgttgtctgaagaaaggtagagtcgtattacagggacatgaatatttggccgtaagtgtttgactcatcttggtatcagggagccactgaaaatcatataccaggcgaaaaaagtctaaaaagaaaattctaaaaaggtgtattctggcagctctatctggcccacagaaaacttgtataggtgagaagaccagttaggaggcaattgccaaggccaagattggtgagttctgagggcctgcacttgagagatgtgggaggagaggactgtgagactattctataaaaatagacttgccagggggctgggcgtggaggctcacgcctgtaatcccagcactttgggagggtgaggtgggcggatcacaaggttaggagttgaagaccagcccggccaatatggtgaaaccctgtctctactaaaaatagaaaaattagccaggcatggtggtgggcgcctatagtcccagctactcgggaggatgaggcaggagaatcgcttgagcccaggaggcggaggttgcagtgagccaagatggcaccattgcactccagcctgggcgacagagcaagactgtgtctcaaaaaaaaaaaaaaaaaatagagttcccagggtctggggactgagtgcaaattgtaagaagaggaatgaagggagaggatttggttggaagaagatagtgaaacttctgattgtggacataatgtgtttgagaaattgacaggtcttctaagtcatgtcccaaaagaaattaagatacagatctatacttgaagtaagtgggcaaactggagagatttgagaatgagtttcatagaattgattgctgaagggtgtgagatgagaaatctataaaatctataacacaggtgcttcgatccagtgccttggaaaagacctccatttgggtaatgggatagtaaaggatggataagtagggaggttcaaggaagatgtgacaaaaaggtgaaatgctaaagagagctcaatggaaattaaaataaatcacagtccattgggtcactataaatgcattgggtaattttgagaaaccattttaggccaagagaagggaaggtggaaaacttctgtttcaatgaaatgaaagactaggtaatcttaaaatgaatgaggattaaggaaagtgaagacaattttgaaacattaccaagtaagaaggaagccttaggcaaaagttggatgaatttgttgaggaaatggtccacatgttctgttctcattcttagcaatgttctctgcctaggactaggttctaagaaaggtggagctgatgaggcataaatgatcaaaggtcaaaacaagagtagggcattttacagtggtaatgaatggctaggacaggggttcctagccagctgctcattggtttttcctgctgtgtctggctagacaatagagggttttatgaaggccacaaatacttggtcccccttcctcatttctctttctctgtaaaggcccagtaggagtcagctccatcctctctccttacttttccctgggacctaaactggttatatacttggtcctctcaaatcttacctcacagaatagaaaagacctgtgactccttgattccatacacttacagctctattgcctgatatgatgatgtgttcaggaattcatttcatacttgagctcttccatgagggtagaataaagggaggcaaagtgccttaaccaaaatggataggacagaaaggaaaagtcaggggtgtgggtgagttttatggcgaaaaatttggagatcacagtcgggaaaattcaaaagttggatatcatggaagtaaaatactttcaagcaatttctacatctaacatggtgcctcccagcgagctgctgaagattttacttggagatcactgaggggtagggagtacagttcatggagttgatgagaccaacgttgctgagcttatcagcagaggggtgaggtccagatcctgacgacagtggtagatcaggatggaaaagatgttgaagaagatggacgagggctctgaggagatgaacatttctgaggaaagagacagggtagttgaaataaatgtgatgaagttcaagaacctggagcagtgggaagaggcacatcctcctctggagaagccaaatcttgtaggaaagccaggttttgatttttttgagaaggaaaaggatatgtttgaggttattttcctgaatttactacacctccatgatttaaggcaatctctgtgtcagattatctccctccacctgagatctgaatatagctaataaactgttgggattgtaaatgacaacacactacatgaaaaacaactgtatgcatttgcaaagtctgtaaattctgaaaacaactgagctttagtacctcttatttttttctacttcaggattttcccccttttttaagtaagtaaagcatatgaaactaagttacatattttagtggtcagattcagagccctgggtgcttagaagcattaataattatttaggtcgttgacaatggcgaataggcagcatactcgttaaagcactcaaattaaagtgcacattaggatgtggtcctgatgatctgtggagctaaaaagatcatggtagaactgaataccaggacaaaagtgctatattccaatggctaagctaagagataacttgctggcataaaatggataagctgtgttaaatttgtcctctgaaagaaaagactgaattcaagggtactttttcttgaactgtgtattaatctgttttcacactgctataaagaactacctgagactgggtaatttatgaagaaagaggtttattgactcagttccacaaggctggggaggcctcaggaaacttacaatcatgggggaaggtgaaggggaagcaaggcatgtgctacatagcggcaggagagagaaagcgaggggagaactgccacacttttaaaccatcagatcttatgcgaactcactatcatgagaacagcatgggggaaaccgccgccatgatccagtcacctcccaccggacccctcccgcagcacatggggattacaattcaacatgagatttggatggggacacagaaccaaaccatatcgaactgcataagctaacttcatttaaaaaggaaaaaagccttaccgtcttcttgaaggatgcacacaggtgtttaaataaatgcagtgtatatacttgggctttgaaggtttgagatacaaggctgggatctgctgaaccacattctggatagagctgcattctttaaatatgcaaccccgatgactgattttcttttaagtgaaacatgagacaagtcatattaggtgatgtgtctaaagagtcaacatatttcctcaagccatgaaatacttatcactgagtctctatgtaccatttgtattctgtacagttcttactgagacaatgtgctaatgaaacgtacattctattggaggaagcaaatacagaacaaaatagcaattaacaatgtttatcccctattggctctcatgggctccatatacaaatctgtgatgtccagacaactccttatctctgatgactcctaactttccaccagattactgttttttgaagcattttatattttattgatttaaaaattaaactgttcctttgctttttaaaaaatttatcatgtacatttgaggtttatgacataatggctccctagctttttatttagaacaatttcaaacttatggcaaaactgcaattaattcaacagtttgccacatttgctttatagctatttatttatgtacttttacattcatgtgttgttaaatggattgcatatatttagattaacatgtatatctgtatgttaacatatttttatatactgtatatgtttatattttatgtgcatatttaatcatattcatgcgtgtatatagtttgtggatttttttttcactgatccactcaatggttaggtttcatacataacacttcacccctaaacacttgaacacgtgccttctaaaatgaaagatattcttgcataagcacaattatcatgctcaaaaagaacaatactgttatataatgtagaatttaaattcaaatacctccaattctgccaattaatattcttcatagcgatattttacattcaggatcagtgatgtccctgtagtctcctttaatctgaagcactttcccagcctctttaaatctttcatgacattgatatattagaagaggtcgggctagatgttttgtagaatgtcccccaatttgaatttgtctgcttgtatccaagtgattgggttcgggttaaatgttttatgccagattaccatataggtaaggtatcctcagtacatcacatcaaggttttcctcaagattctccatccccttcaccgttcttcactctccctgggcgctccttccatactttggcttctgctatgctgacaactcttaagtcaagatttccagcccagacctcccacctgagcatcttctggataaaattataaataaaaatatagcctaatctgaaatcatgatcaacctttggagcatctcttccaatttcccaatctatacaaagtcattttctaccccttcttcctttacctgccttccttagctatgttccaccaccatcaatccagtcaccaaggtcagtgtgttttgctacttatgaaaaagagcaaaattcttcaattcagctacttctgcccaaatttagccctcatcatgtgttacctgaacagacaatatgaatactttcctaattggttcctctgcctttggtctctctccctttctaagctatcttccagaaacttcagttcctcttctaccattcaaattatatcatattattcccctctttaagcattttatgccttctgtttgacaacagaataaatgtgctctttggccttgagtacattatgttcttaacctgaaatatagcatcctttcttttcactcagtgagttttcttttggaacttaatcatgcattatatcattctggttttgttgttgttgttgttgttgttgttgttgttgtttcttttgtgtgagacggagtctcgctttattgcccaggctggagtgcagtggtgcgatctcagctcattgcaacctccacctcctgggttcaagcgattctcctgcctcaccctcctgagtagctgggattacaggctcgccaccatgcctggctactttttcttgtatttttagtagagacagggtttcaccatgttggccaggctgttcttgaactcccaacctcaagcaatccacccgcctcagcctcccaaagtgctgggattaaaggcatgagccaccacacccagccatgttttcagccagttactagtacttctttcttctgcctacaactccctagaacttaagctccttaaggacaggatgtaagtcttgctcattgtcgttactgtatgaggatactctgtgcaacaaacaatcagtaaagtgcttgttgagttaatattttagaaatcaagcataatacattcttgtgtacacatggaacagcccacacgtttaggaaatttagctactagtttcagtatctttcaccaccattcacaactgatcagctaataatcagcaacaacattgtacaccataatatgttaaaggtgttacacacagaatttatgtgtgaaattgaaagcatcggtcctatatcatatggaaaaaaattaattgtagccaaatgttgggtattggatacatcagtgtgctttttcttctaaaaaatactggagaaaggcaggaaatacacaagtactaagataataacacatcaagtcggaaactggttaaaatccaaagaaaaatgttggtgggcgtatttgttcatacacagccccctttatgagaaaaaataatttcttgtacacagctcctttttaaaaaaaagagaaaataatttgtttagattcagacaaaaacacaggagtaattcttgtgtctattctgcataggctgcgtaggttctggctaaaatcactttttaagcagatagaaccattatcagcgtttgaatcaaagggaagtgagtcagatgggatatcttcccttcaagaaagggatctgaaaccatcgttatatttcagaagactgaagaatatcttgccatggcaaagcattccttttcttttttctcggattaaattgagtcatcccacttcttttttcttcacttcagcagtgattaaaggagactatcatattttgctatatcacggtactatttaactttgactatgtctttccttattttaaaaaatgtttcagtgatttatttggaccacaatcagacaagccaggaagaccaaatagctaataatccaaaaaacattatttttctctttttattatttcagtagttttcagggaacccaggtggtgtttggttacatgaataagttcttcggtggtgatttctgacatttgggtgcatccatcacctgagcagtgtacactgtacccaacgtgtagtcttttatccttcacccccctcccacccttccccccaagtccccagagtccatggtatcattctcatgcctttgcatccgcatagcttagctcccacttataagtgagaaagtacaatgtttggttgtctattcctgagttactttacttagagtaatggtctccaactccatccaggttgctgtgaatgccattatttcattcctttcatgactaatattccatggcgtgtgtgtgtgtgtgtgtgtgtgtgtgtgtgtgtatataaacaccacgtacatactgcattttctttatccactcgttggttgatgggcatttaagctagttccgtatttctgcaattatgaattgcgctgctataatcttggtatgcaagtatatttttcacataatgacttcctttcctttgggtagatatccagtagtgggactgctggatcaaatggtagttctacattttagttctttaaggagcctccatagtgttttccatagtggttgtcctagtttacattcccaccagcagtgtaaaagtgttctgttttcaccacatccacactgacatctattatttatgcatgtttgtggaaatcaccttggagtagagtcaagtttaagtgttaaagcattgccatcaactaagtttaaaatcccccaaagactagcaatatgctatttgagcaggcaatgaatctgtgaagtagggataagggctgtgcaggtctctagtgtgcaactggaactcagtattttcttgttgaataagtgaaaaaagtgaaaaggtgtttttgtttttggtgatgaggggcttgtgatgacaggtattattgttagagtcagaaatattttgaggttgcctattaatatggtttggctctgtgttcccacctaaatctcatctcaaattgtaatccccacgtgtcaggggagggacctgatgggaggtgactggatcatgaagaagttttcccccatgctgttctcgtgatagtgagtgagttctcaggagagctgatggtttttaaagtgtgtggcacttcccccttctctctctctctctctctctctctctctctctctctctctctctctctctctctctctctctcctgctgccatgtaagaggtgccttgcttcccctttgccttccaccatgattctaaacttataatcatgaggcctcctgaggcctcctcacgcatctggaactgtgagtcaattaaacctctttcctttataaattacccagtctcaggtagtatctctatagcagtgtgaaaatggattaatacacctattatgttgtagctacatagtgtatgattagacaagccataaatattatatctggcttgtttcatgcccataatagtgtatcagtcagctgttgctgcataacaaataaccacaaaattctcaagttgcatatttctcattcacgcatctgttgtttggctgaacttttgctggcaatcagctggacttgacaccaagttgtggtttgggttcaggtctgttcaacatgtctctcatccttcttgggctagcaagctacctgggccatatgcttcttgtgcacataaacacaagcgggcaaccccaaccagtcaaagacattctaagcctctacttttgtcatgcccgcttacattccattttccaaagcaggttatgtggccaaatccgaatccccaggccagggaagtactgttttcccagctcttgttcactctgctttatctacattagacttcttgctgtgcttgaggaagccagtcacactctcctctcagagtctttgcatttgccaatccttctgtctggagcacttttccctcaaatacttgtgcaactcataccctccagttcttaaagcttttgctcaactgcatctcatcaatgaggacttccaagactccactttctgatgactctcattgtcccttgctagccctctcctcagagtgttcatcaccactcaagatacctatatagtttacttatttacttgttaagcctgtgtgcctccttatgaatgcgagtttcacagagagagtgtgtgggtggggtttgtttgcttattgctatatcttcagtgaacaatatgccaggcactgttcaaccatttgaacagtgcctggcatatatagttggattttaataaatatttgaataaataaatgaatcttactgtttttaaacttttgtggtttttaaaaggcattttaaaaatctgggttagtatcaaatattacaatggtattactttaacttcaggtttcatttagctgttttaacttttacaatatattctgacacagaaaatattaggcattaagcatttttcaatgagttgattcacttctactcatgcacatatgtgatgtctgatttcgattcttaaaaagagatgagcctgggcgtggtggctcacgcctgtaatcccagcactttgggaggccgaggcaggtggatcacgaggtcaggagattgagactattctggctaacacggtgaaaccctgtctctactaaaaaatataaaaaattagccaggcgtggtggcacgcgcctgtagtcccagctactcaggaggctgaggcaggagaatcacttgaacccggaaggcagaggttgcagctagccgagattccaccactgcactccagcctgggtgacagagcaagactccatctcaaaaaaaaagaaaaagagaaaaaaagcaatgcattaaaaccatcttgagaaatcatgaaaatatggagaaaagaagaaaacaagattatactctacttgtttttatactacctagaatgtaataggcactcaaaaaaatgtctgaatggatacaattatcactgccttaaaagttttccattaaagcaaagaagccaattttacatttgtattatacttggacactcatattaaagactcacagagagtttatctggaaaaataaacttggctgacatcattaggtttatactttataatttgatctttgaaataattcaggaacaggaatgccagtcacttcattgaactgtacctgaattttaacacagtacaattgagttcctagagctccaatatgatgtaattaaactgtcagaaatattaacatcgatgttcatgagcgtcgttcatgatgttctcttggttctgatttattcagtgaggcatactgtcactgaagtggacttactgccattaaaaatgcctcatgtttcccagttccgcaaaaatttgcatcagtaatgaaacagagagatgtaatcagccctgcagttgtcaggatcttgatcctcttggtagtatttcattcatttcatcttcaccagataatggtagtttaaaaccgcaagaaaaatgaaactaaaaatagtgaatttcacttctttttctaaaggcataaacttaagcaaatagtgcatgtgtgtgaggggggaggaagagagagagaaagaggagagagagagtttgtaactattccttttctgctttgtgaccttaattcttcagcacccatttcctgtacttaatattgcaaagaggtttcctgtggtatgttaccaggagactcatgtagtctgaggctttttatctaccttacgttcttatccctccattctaataaaaatatgaagcctcacatccacctagaatatgattttgtcttaatggttagcattggcaatgattcttttagcttctgctgttaaaaaaaaaaaaaggaataaatgcaggattctaatcaaacatgaaaatccaagtggcatagaccaaagggaatgagaagcatatttaagtcatttagtcactggcttccgaagcagttccaagtcagatgtaaacctgaggttgtccctaattaagttcattatggttgacttgctaaagcaaggtcttgttttagatggaagtgacaatgtgcaaaacaaacagagcttgaatagaagttattttcactattggaagattgtatattatgaaaagttagtttcaaaggacctttaaagtttaattttgtttgcacctaagaaatttccctttaacttgcaaatgctgtttgaagtgtatttctttaacacatgaacaaacaatacagacacagattcacaaaatctacaaggagatttccattcccagtgaatatcatccatccataggtttctttgcttccagatcatcattctctcctcacataaacagtcaaaatgtttgtaatgtcttctttataaaacccaaaacataattatgataaagtagtcccaagtaacagaggaaaggaccataactctccaatatatgccatatctacagtttttagaatattcatatttcattacctatataggatatatactatttttatttctattacattggagtttaaaggtacttgagtttcgtttgtatttttggttaaatgtcaaaacaaagagtgaaaaaaagacctcagtgtctcaactcccttcttaccttcatgaagtgactgcaaagtgttcaattcttactcttttgtgttgaggagacagcactgcaagtgtgcagtaatacttattttattacatagaacaaagtttcacatttgtgaatggggcacaaaagagagcttgtcagttttacctttttcaattgactttttcttttattctttttaacttttaaatttattttttgtttttttgtttttttgtttttaaatagagacagggtctcactatgttgcccaagctgctctcaaattcctggcagcaaacaatcctcccacctcggcttcccaaagggctgggattacaggcatgagcgaccgcacccagcctgttttttactgtagtataatatttgtacatatttatggagtgcatttgatattttgttgcatacacagaatgtgttaatgatcaagtcagggtatttagagtattcattatctcatgtatttatcatttctatgtgcggggcacatttcaagtaactagtcaacttttaaaaagatacgcagtaggctgggcgtgttggctcacgcctgtaatcccagcactttgggaggctgaggtgggcagatcatgaggtcaggagttcgagaccagcctggccaatatggtgaaaccctgtctctactaaaaatacaaaaattagctggacgtgttggcgcatgcctgtagtcccagctactcgggaggctgaggcagaagaatcgtttgaacctgggaggcggaggttgcagtgagccaagatcgtgccactgcactccagcctgggtgacagagcaagactccatctcaaaaaaaaaaaaaaaaaaagatatacagtttttttttctccaagggtaatgatatagataaactactgtatggatttcttcttccctttaaagaattacttcctcattattaagcttgagggttttctttgttatttatgagcaagtgaaatgaatttataatggtgttaaaaatgtaatcatggccctttaatatctgttttctataaatgtaattttccattatttgtttttgcttttattaaggtgaggaagatcttctcagtcctccccaggacacaagcacagggttagaggaggtgatggagcaactcaacaactccttccctagttcaagaggtaagctccaatacctagaagggactcagatttgctgggatcaggccactcgcttccctacccaactggtgtgtgtattttccatatggaagccaacacgcagtatcagaatggcaatttgggtccatggtgaaaagatttgatttttaagtgtgaatttgtggtttagagtactctgaattcaaatacccgtgagggcaacatgtttccaaaaataagaataccaccctctatttgtcaagtattttacttgcttcacacattagtctgaagagttaattatgaggtgccctttactgaagagcaattattatgtgacttttacagatgaggaaattaatgccctgatagtgcctttgccagggacatatggctactacgtgctacagcaaggcctagaacaatgcctactgattggtagtggtagagattctgacttgccatctgatgccctttatatttaaaaattgtatcttactccatcatttaaatatagggacaattaaatcttcatagagtagttggttattttttacttcgatagaggaaatacaggcttagcaaagaaagacattaatatttttctttttcttcatcactttggccttgcgtattttacccccatacaaaaacagcattttaccctgcagaattttcccactggcttgcatgagcttcagatgtcttgcttcatccaagatgatgttttgctgctactgttcgtttctgggggcatttatttggtttattgccctcacataaaacaaagtcactctctcgccttccttcaacgaataaaaaggatggtggcagtcacctgtgatcaaatagaagaaaagcctagagaaacaaaagggagaaaacacaaggctttgtggccagtgattggcacctctaatgggtagcctgggagggacgggcagcaggaaatctgggctgtttgttcctctccataagggcaatgaggagggtgtattgagtagtgtgtttttcctatctttttgttcagtgtcagttaacaatggccatttcctagctatttgatgtgcaagtaaacgttgtgcagtgcacattaaaagcaataatgttctggtagagcgttgctaaggaaccgtcaggggaagctaattttaaatgtctgcaccagccatcttttcactgctgagcgccactgaagtgatgattttaacagataaaaatcttatctgtcttccacccacctccacatcccccaccgccacccgcatccccattctgactatcttaggtatctccttcttctagatgtcataattcataatgagaagatcatacacaggcttgacagaatcaggtgctttcacgtgtctcctcattactttgtcctgcttgcttttactagcacctactacgtaccagtggaggtagtagggatggaaagaagaaatgacaaattccttgccttcaaggtacttatggtcaattgcagatacagaactccaaagaaattcaaatcacagtacaatcattgattactgtatgatcctggccccttgaactggcagcttgcttacctgctctggaaagttgctggctgccctgttggcaccctgggcatttcttccacatctaaacaagaggttagtagagaagaagctacagcaaggctcatgactctgcttcttcataggcagccttgacttcctagactcctttttgtacctgagtttctggtccaccctaattagctgtaaggtgaaatcctttgcaccatctccctgtgtcccgcttttagagtccttaaagctagataccacatgggtgtagaagcttcctggaagacaagaaatatacctcctctgatatggtatttagcagtcagtatctctgatgttgatttacttacttgtatggaaacttgggaaactcaattcaggccacctggatagtgtttactaaattagtgcttacggaagaatttcaggccttaagggctgatttaagttctcaaatgtgggagaaggaagccttgtccgataccaattccattaacttaagttccggcttactcagtggtacccttgtggcctgagaaaataaattcacattcttaaaaaacaaaacaattaaatacacaaaaaacacaagagagtagctaaggtattggaaaatctggcctatcattctgtaataccatgatcttggcatttcctcacgttttgctactttcagctaactcaggctttcttacaggcctttttctccccaaattcaagtggataaaaagtttcattattgtaaaaattaggctaattattgatgcactcaaaaaagtggtttttggatgctttctttccaactaaaagcacttttgttttttaattttgaaaaatggcatatgtgtgtgtacacacacatataccgtcaagtttggcgggaacatcttaccagttggtagatgtgttcagctgatattaagcagaaattcttgagaatcttaacatcttgggattacaaagtctttcaaatggaagagccttgaaaggtcattttaacacttttgacatccaggacagtgatttctgactctgttttgatggttatccatatcagaggaacattttacatcacaaactggggtaaagatataaaataaattgtacatgtgtttatgtacacacatgtatatatacacccaccatatgtacacacacacatttacagtgtcatatgcatacaaagatcagaaacaaaagtttcatcaagtgatgccttccatactacatacagtgcatgctgtttttctattttatttatttaaaaacaaaatgctggttgcaacccactaaatggattttctgaaccagtggtttaaaaatactaatctatgtgatctcagtttttcttgcctggttgaattatctttcaaaaaaatttaaattttgagatttttgccgtggaagtttctgccaagacgttgctaatgtctcagagacctttatagttttattctaacactaccatccatgttctcattgttgtgttacaaaaaacaaagttcatgattgctacagctgttttggacagctgtttgagtaactcaaaacagatgtgagagccagaggtctgacatttagtggaaatgtgctattaaataccaccgcgtggtttacttaaccctgctagataattgcccacagaggaaaagccgtttttaaaaaacttatgctcttcataaacataaagtatatagataggtaagctattatgtacctcaaatttacaacttttctgttgccccttgccacagagttggtcctgaaggtgtcagctaacctttctttatcttttattttcacaaagagtacctggaagccaagaaaagtcaagtgccttatttatggccattcagcaggttaagttaggcttctaatcttatcttaatggctttgctaaactgttatcaaaattaataaatgagtggcatgcttctccatttagtgataaaccgatggccaacactatcctgcataataggcaatataagcaggagcatattcaagatatgaatgtgtaaacattcagctttgtgattatatctttctggttggtctctagatatacttagttgttcacaaacacttgggagatttgagtggctcagtgtatatttgaacactgaatattagccaatttctatctaatctgtctatctctaatctcttcctttgtaagtatatgtgtagaaattgaattatagtgtaataagtcattatctactttactataaggtactctctaaagctctgccattctataggaaaactacatgggtacaataaacaaacgtaatttaaaaaataaccccattaagtgatttgtccataagtctctgatcatttagcagactaacaaagatatttttatatgtatgtgcattgatgaaagaaacgctctcctagtcagtagtatggtattaggctctctaaaatgtggtaccactttatatagatgaatgaataataggagccaagataagctcttaatgcagtaaaacaatccagaaagcagttagcagtgctactatttctgctacctgtacaatctcttgcctactgacctgtgccacattatctccaccagcccatgccatcctctttttttcataccatcccctctcaaataagcccgcgtacattctatcaaatacccctaaattaccaacccaacagctttgtaaaacctaccgtcttttaaaattaaaatcttattctgtggttcttttatggaagagcaacataaagaacaaaggcagatagaaatatggtgtgccctttttcaggcaccattctgtttcctgtatgctcccacaaaggatttgagcggttatccctttaatccaggactagcaaactacatacagcccaaatgccaaatctggcccaatacctgtttttataaagctttattggaacacagccatacccattcatttacatgttgcctatagttgctttctcattaccagggcagagtagttgcagcagtgctgaatagctggtccagagaccgtgggcttgcaaagcctgaaatatttactatctggccctttatggggaaaatttgccaatccctgctttacgctattatttcgttgtccattctgactcattacatgtatagagtcacaggcttctgtgctgatcaactttcagctgaacaagattattgagctgaaattgaattgatttatagatttatattcatattcaccaaagagcctgcaagtgtggccatttgaatttttttgacttataaaataacagaaatcctaaaaagggacttattcttccttaagtattttaaatagtcagtgaattaatataaaagaggctaaaagcacccagaaacagtactgtcctgcaattccaactctaaaataatgaattacaatcaataatgtcaattttatagtgcccgaggaaattagacttctcgggacctgaccaagccctttatttagactcaggactgccccagcacacttcccttttgtcttgattcatttcctgacaacacatcacattgccagatggacactgtaactgaaggtctacagaaactcatttccaaaaaaaaataaatgtttagaaaatgaaacatatctgaaactttatttatcggtcaagaacttttaaaaatgttgtaatcaagtagcctctgttttgtcagcgtagaactagtccttttacagtagaaaatatcatttgtttttaactttttctaaagtgaaaaaaaggaccttccttttgtaatgtgttaatgagtacgtggggacccaagtgatgagggaggattttagaagagattagagttagcttggctctgggaggtccattttcataaaatatggtttctgaagaaggatctggaacataacacaagtcatttgctgctacatattaagaaataatcaattgataactgagttctgaatatggcttagtgtagaattactaaagatatgtatcattaagcattcaaagaatcatcgttacattctgaagtacataaccataattacattctaaatcacatggctttctaacaacactgtccttcctaaagatctcaagttttcaaaactagaccaaagttacatgccgaaacaagttacccacctttggcatccaaactaaagtgtgccagtgaagggcaagttacttataacacagaaggactcctcttggtcatgacccaactactactttaccaattcacttcagccagtatttatcaaataccaaaagtgtgtatatacggtacagggcattgggcatagagaggtggatgagcaacatgtggaccccgtcctcaagaggcttatagtcttacaggggaagggaattaattctgccaccagacagtattatgaaacataaagatacttttttaaaaaaaccttgctaaaggaatcaaaaagaaggggtgagtgattcatactgggatttcagccatcaaggaaagaatgatgttctcctccccaaatgatgggaacatcatttggtatggatctcccactagtgacacccacagctgaggagctagtacccatttttctccctcttttccctggcttgaggagcatcttaaatacctggcccttacgtggtcaagctgaaaatctgatactcctaagaaatcgctgagtcatgtaggaaattcagaaggaagagaggaagggagagaaggagaaagggagggaagaaagagaaggagagagggaagaaaaacttagaaactatccttaaatgtatactagaagttttgaaccctaaccttgagtgagttttgaaaggtttctattggtgtcgtagctccatacctcttcattccagactagtagttctcaaattgtttcagggagtttttagtcttcttggagccactgagaatgatgggtggaggggaaagggagatgctgtacaggatctctcacagctctgctttgaactgctcaaaatattggaattccatataagattgttttaggagatgtcccattgctatagttaaaacagtttgaaaaccaagattttaaaggaaattgcatgcccaagacaggctattgacatgtatggacagaagtccctacttttctgtccaattatgacttatcatagaacactttctcatcagagtctacttttgaaatacaaataaatgcatacagatgtaggaatctatgaatcaaggccagtgggtctttagccattgcctcgtaaggctcctgatatttgctgaattggggaggaagtggaaagctcattcctggatctggctctgtggcttgcccattactgggacttacctcttcccctcatctgttctttctgttttctcaaatgcctccaatttcatcatggaaatgctcagcttctatcagatagaacaaattctcccaagaggatggagtccagcctctatgtcgggttctaccttgcatttgatgtgcagactttgggcacacagagtcaactactgtttatgtttcaatgtgctgattgtcaagagtgaagagattctgagactttttttaacattaagtttgagttgtccttgaaaacaatgcccaatttgtcagatttctattctgtgccagttttcatccagtttaatgcgtgaactctatggattttacaaatgacgtcttctggatcatgttatctgtttacactgatcttaagtgtatgtaaaggttatttgactagatgtgtcttttgggttttttgtttctgtttttttttttttttttttttccagcagagaataaatggtcatctcaacatttgtttggtaaaagaagcaaattggtatgaaattgtatatttatgcatgttttttttccctttctgatatctctgcctcttcctctctctattattaaaggaagaaatacccctggaaagccaatgagagaggttagtgagattcaggctcacggccatggcttctgtctgtctcatcctgctttttatgtttggcgtttgtgtaagaattgtgtgtgtgcacgcgcatgtgtgtattacacattgtgtcatcatgtaaggatggtagtcacctctccacttgcagctcatgaggaacattcctcaaatgttcattgccgttgtcatcaccatgacgacaagactggggttgggagcaagaatctctttaaaatggcaatcctttgtagtccctaggttggaatcctgccgttcatcatctgttgccatttgcaacactaacaaaatcttcaaaataaatttagccttgaacataactgatgagtcataaagctttcttccacttccaggaccttagcattttctgccagcgcccttagtttttattcttctgggatgacttcattttgcttttgtttccttttttcttggttcctacgctctttctctcccattttagcgaacattttttgagcacttactgtgtgccaagcattgttctcagcacttgccatctttttcatcatgtcatcttcatgacaaacctgtgaggtaggtactcttattaaccccgttttacagataaggagactgagtcaatgagagagtaagcagtgtgtcccaggtgacagagccaaggatttggatccaggcagtctggctccagacccacactcttaactctcatttgaaaggcttacatcatctcaacgtacccttcagaagatgatcttttttatttggtatttgaagccacacagaacaataaccaattcgattaaaaaattaaatattggagttttgagaggtttttaaaatgcctatttatgggttgaaagggatagggtgcagtcttatcactgaatgtggtttcaggttttacggtgaaagatgcttcttactcctattccaccaggaatattgtctgaatatcgaattacctaattaagtgactgttggatgacaaagtgttaactgacagcccaagtaaaatcaaggttgtctttaccaagaatttaatctgaaggaggagagaaggaaagctctcccatgggatgacagtgttctgggagacaggctggatgggtggagagtccttcttaaatgagaagattctggattccttagcaacaggatggactggagagaccactgattcatttaaacacaggagtcgtaatgaaaactctgccaacatcatgccatacaagtctaatcaatttaatgattcttcagtgtgtctgtgccagtgcctccttccaaggctttgggcagtggggccagggagggaatggtaggctgggaggagaaattgaggaaacctgacttggtgaagcattgaatgcccctgacggtttgcctggttcatgtacttcgtatgtgagacttcttgggttcattcttatggtaagtgccccttaaaatttattcattttaactttttgtagaaaaatgcaccataattttgaccaccttaaacatgtttcactcacaaatgaatttcagaaaaggctagcacatgtaattgaagttatataggcatttgcagacttgactacctgaggtgtatggtgttcagacaagtttccagaagccaaagaatcaaaacaataatgaccttttttaatgctatgaaaatatcccaaatgtacgtaaagcagatttttttcagagattaaattatagagaagaaaagataagcaaatttccctgtagtattccggctttcctttggacaactgaatgctaacaatttatttgggaattgtatttttaaaaaatagagcaccagattgctattgaggtcttggatctttgccagaaagtctcaattccaatcgctgtggaaaacaattccctcaggcagtggtgacgtgtgagactaaatgtgttgcagttagcgccaacttgaaaaacatacaactgccctaatgttcaaggcatagtgcctttgtgttcaataatccttaagaatggattaaatcaatactttctatagacatagttttctgtcaccttgtgcctgaaggtgattgcaaatgcctgaatcctggctgcttttcagtacctctcatacttcatagtatgagattgtaattttgactttagaaaaatctgtcaggtaacattaatgacctcccgaatgctctgccttacacacatggataatagaactaggatacaaatctactttctatagtcatgtcacagtgcagtcttacccctccaacggattaaagtatgattctttagggcagtagtttgtaaaaagagattgacttcttttttctggatctaatgaaaaactccatggaaagaaattagaattatttattctggtaaagcaggtatttagtgaagtaaccaaaggcataatatagatgatgaggtgactctaaaagttctttatttttatagcacaaagatggccacaaggtcatttgtgaaaatgcagcagtgtaaaccggttaaaggccacccaactttttgtcggagtgtgcatggcacattaagaataatgaacctgttttccctggcaaatctttaaatagcagatacccctagaacttatgcttcttgagagactcaagaattttccttccagttagtaactgaacaccatttcaaggaagagaagcaccacttggctatataatccataaatgcatttatttgttttattatattttgaactgccatctacatcccctagcacacagcctaaaaagaaagacactttgtgattatcgataagctgacaggaaaaaaaatgagttttctccccttttcgttgatgttttgtaatatgttttctagctactaggtggactacatactatagtcacatgtgggccatgagaaatacttcgaattacattcaggcaccatgttgtaaaggtcctggactttgtttttactgattttgttaaccgtaaagatcgctagtaattaaaaattggcagttagtccatctatcttcaatttatgcatgaataattatgcagatttcccagggttgctggacagccaaaaatagatacaggggaagccctccaacttgatagcagcagttatatatttgtactctgagctctaaggagcagcaaaggccccactgtgtcgtcttcctgtggtttttatggcacagaaagccaaaaatgatttcagttcttcactgagggctgccaaactattggcccactttatgaatagttgcatatgctttgttaaaaaatttttatacttgcagtctcagccaaaatccaaagtgattttctaaaatataattaatactccatgaaattctttgcactaataaagcacaaaaagatagatatacaaacttggtcaccttaatagaaatgcctgaatgacattaaacttttaataagtaagtcttcagttgatctggtgccatcactgtttaagtgcctgcccgtgaatccgcttcattttgtagagaagctatatctcttgaaataaatattaaaacaaaatactctccctagtctatagctttaatttttattgggatatctttaatttttattggtatttttaacaattattatgggaatctgtaaagttgatacatggcaaggtagtaatagcctagtaaagcatttcagttccaaagacaatacttgaatagtggaaggatttaccaatgtgcaataattaaaattagccatgtaaaactatgggacatagacgaaaaggcaagccataaagtaagtctcagattatcttactctaaatctgaattttgctacgaagtacccagggacattgtgctgttctttttctccgtgctgggagattcgtgctaggtcgtgctgcattattagtaaaaggctattgtgatagttaaccctcatttaggaggagctctaagatggattcacaaaatacccaaatgcatacaatacatgtgggtcaccttataattagggtctagagtaatttggaatgtaaagcaatttttattctgaggtttcctaattcaaatgttaatagtgcaccaaaaggtcaattcaagagtttattattattatttttcaacccaagtaaaagcagagagaaaatagccacctccaccatagcctcagaagcaagccaacagcctgaaacagctttgaaatgaaaagttggtgtggcggtgatggtggcagtgataatggtgacgatggttgggtgctggtgatggtagtggtagttgtgaaggtggtgatggtggtttgattgatagtaaaaaaaatgttcgttaatacaagtagagagtaagtaatcaatcaatcactcatagccaaggtggaaaagatgtatcccatcatggaatattcctgttctgatagaaatcttgtgcttatctatggaattcttttgatatatatttacattgggaacctgaatgtagcttgacatttttccatgtaaacaccagtagcctgatccaacattaagctgatactaacaaacaacgtgtaatggcttcattaataaggctttgcttcttcctggaaactggtgaaaaatcaaaccttgttgtgtacaccctcgatgcagcttctgtgttgtcttcacccagaaatggggaatgatttcccaaatggcaaagaaacagagtgatgctatctatctgcaccttttgtaaagtctgtctttctttctctttgttttccaggacacaatgtaggaagtcttttccacatggcagatgatttgggcagagcgatggagtccttagtatcagtcatgacagatgaagaaggagcagaataaatgttttacaactcctgattcccgcatggtttttataatattcatacaacaaagaggattagacagtaagagtttacaagaaataaatctatatttttgtgaagggtagtggtattatactgtagatttcagtagtttctaagtctgttattgttttgttaacaatggcaggttttacacgtctatgcaattgtacaaaaaagttataagaaaactacatgtaaaatcttgatagctaaataacttgccatttctttatatggaacgcattttgggttgtttaaaaatttataacagttataaagaaagattgtaaactaaagtgtgctttataaaaaaaagttgtttataaaaacccctaaaaacaaaacaaacacacacacacacacatacacacacacacacaaaactttgaggcagcgcattgttttgcatccttttggcgtgatatccatatgaaattcatggctttttctttttttgcatattaaagataagacttcctctaccaccacaccaaatgactactacacactgctcatttgagaactgtcagctgagtggggcaggcttgagttttcatttcatatatctatatgtctataagtatataaatactatagttatatagataaagagatacgaatttctatagactgactttttccattttttaaatgttcatgtcacatcctaatagaaagaaattacttctagtcagtcatccaggcttacctgcttggtctagaatggatttttcccggagccggaagccaggaggaaactacaccacactaaaacattgtctacagctccagatgtttctcattttaaacaactttccactgacaacgaaagtaaagtaaagtattggatttttttaaagggaacatgtgaatgaatacacaggacttattatatcagagtgagtaatcggttggttggttgattgattgattgattgatacattcagcttcctgctgctagcaatgccacgatttagatttaatgatgcttcagtggaaatcaatcagaaggtattctgaccttgtgaacatcagaaggtattttttaactcccaagcagtagcaggacgatgatagggctggagggctatggattcccagcccatccctgtgaaggagtaggccactctttaagtgaaggattggatgattgttcataatacataaagttctctgtaattacaactaaattattatgccctcttctcacagtcaaaaggaactgggtggtttggtttttgttgcttttttagatttattgtcccatgtgggatgagtttttaaatgccacaagacataatttaaaataaataaactttgggaaaaggtgtaaaacagtagccccatcacatttgtgatactgacaggtatcaacccagaagcccatgaactgtgtttccatcctttgcatttctctgcgagtagttccacacaggtttgtaagtaagtaagaaagaaggcaaattgattcaaatgttacaaaaaaacccttcttggtggattagacaggttaaatatataaacaaacaaacaaaaattgctcaaaaaagaggagaaaagctcaagaggaaaagctaaggactggtaggaaaaagctttactctttcatgccattttatttctttttgatttttaaatcattcattcaatagataccaccgtgtgacctataattttgcaaatctgttacctctgacatcaagtgtaattagcttttggagagtgggctgacatcaagtgtaattagcttttggagagtgggttttgtccattattaataattaattaattaacatcaaacacggcttctcatgctatttctacctcactttggttttggggtgttcctgataattgtgcacacctgagttcacagcttcaccacttgtccattgcgttattttctttttcctttataattctttctttttccttcataattttcaaaagaaaacccaaagctctaaggtaacaaattaccaaattacatgaagatttggtttttgtcttgcatttttttcctttatgtgacgctggaccttttctttacccaaggatttttaaaactcagatttaaaacaaggggttactttacatcctactaagaagtttaagtaagtaagtttcattctaaaatcagaggtaaatagagtgcataaataattttgttttaatctttttgtttttcttttagacacattagctctggagtgagtctgtcataatatttgaacaaaaattgagagctttattgctgcattttaagcataattaatttggacattatttcgtgttgtgttctttataaccaccaagtattaaactgtaaatcataatgtaactgaagcataaacatcacatggcatgttttgtcattgttttcaggtactgagttcttacttgagtatcataatatattgtgttttaacaccaacactgtaacatttacgaattatttttttaaacttcagttttactgcattttcacaacatatcagacttcaccaaatatatgccttactattgtattatagtactgctttactgtgtatctcaataaagcacgcagttatgttacaaaaaagtattgactggactgcagtactttgtttttattttaatttagttgttgttacttacttacttactttttaaataggtaatacatgcatatgagtaaaaaactataatccagaaagacagtgaaaacactcctaactaccccttcccccatatcaatcaatcatcctcattgctctatgagtagacattattaatttcttatttagtcttccagagggtctttctttattaattattatataagcagttaaaataatatatatgttcctatttatttttttcctattattatttcataggatatagcattctctgcacccagttatgcaccttacttgtttgtttgtttaaatttaaatatggactcaagaaatcttttcatttaaatatataaaatgctttctcattcttttttatagctgtataatatttcattatatgttcataggatattttatttaagcagttccctttggtgggatatgtagtctgttgtcagtctttcttttgctataacaaacaatattgcacatttctcattacatcatttcatttgtgcataaacaaacaaatctgtgggatacttcctagaagtgagattgctggatcaaagggggtaagcatttgtagactgggagatgatacattttgtgcagtgattgattgattgatagtcatagtgtttgtttgtttgttgtgttttttgttttaataatgacaagtatattaattaagtcagtttgcagttcatactttgcttctcaagagaatttcatatcacttctattcttaatgtcaccatctaagaggatgcatgagtgagtagtaagaaagagacacctaaaatgatgtctcacaactggttctggggaagaagaatcccttaccatagtcaaccaccaccatggggagaacctctcctttgcccctgccctgctctgtttcttgccctagctgcaaaggaagctgagaaagtgggtagcaatgtcagcacttcttagggagaggctatctatctttacctattcccaaggttcatggatggggtgggcggggttccccaacagtgttcagatactggtgagccaaaggaataacataagtccaccaggtgcagcctatcctagtgattttggaaataataggagatgagatgatccatctcattagaaatgatgtttgttagtagatgtggcatctctgctgtgaatcaatcacttgctaattttttgaaagtagggtgatgatgctgacctaagtgactaccacattgaaacacttcccttgacatccacacataccaagaaaaattttcatcctatttaaataaacaaatcatttatccttcccaccattacccgaacctacctttgtttgaaacacccagactggctgttttggtgacacttaaggaggtaactgaggaatcttcaatacttcaccacgtctaagacaactgtgtgtggatgactctgaggagggcatttggttttccattccatacttggcacacactagaagagacagaattaattcagttaaaaattaaaatgaatcgagctggcacagattatgcaccggcaagcaaaatgtgtgtttgtttgggagaaagcaccaagactaatggatgtgttctgtagagctgcgatgggatttccctgaatttgtaatgctctaatggtggaatgaatacaaaggcaggcactggcgcacttgcaaagactttgccttcaaattaagtgtaggaaggacacaaatcaaattctttcccacagtagcaaagccattggagtaggaactataaatatgttcttcaatgccccttgcacgtcagtgtactgtgatctcatggacttagctgacaacacaagagtggcagcatgcccaacattccataataaacaatattgtgtgaatgtgtaaagtttggggatgtttgtttgagagtagcttttgtgtacagaaaaggttacctacagtaacttgaggtttaaatgttatatgtacatatgtgtgtatgtacatgtgtgtattttatatacattcaggattttagctcttccataactttattttgaaataattcaaacaagaaaaactgaaacaaaagaaaaattgcaagaacagtacaaagaaagaacccacatataccctttacccaggttaatgaattgtttacattttgcttcatttactttatcgttctctcaatgaatagatgatagtttttcctgaaccattttaagaataagttgtagacatcatgcctccttacatttaaatacatcatgtacatttcctaatatctaggacagtctcttgtataaccatagtacaattatcaaaataaaaaaattatatatagctatcatctactccacagtccatattcaaccaaatattgtcaattgtgccaatgatgtctttcatcattatatatatttccctagtctggactctaattcatgatttcatgacatttagttgtcatatctctttaatcacctttgatccggaacagtgtctctgcctttctctgtcttcaaagaccttcacatttttaagagtacaagacagttactttgtaggatgtgcatcaatttgggtttgtctgatgtgttctcatggtttagattcagggtatgcatttttgtcaggaatactacacaaacaatgatgtgtcctcagcatgtgataccaggaggcatattcccattcttggtgctgttaacactgatcatttggtaaaggtggtgtctgccaggtttctccacttggtatacattttaaaacctaagttttcataaatctttaggttcaacttagaaatttcatttttagatatataaatgtagacaatttgtatgaagtaagaacagtcacttttagtgagcagacttagccacgttgagtagtctgaattttttcgttctaagctgtatttatacacttaatgtgctttattttcaagcctatctaatatctcacagggaagaccaacgccaaccaacagcacctccac

SEQ ID NO: 8 - DNA, 14411 bp, Homo sapiens
  source 1..14411: mol_type = genomic DNA
ctcccagcccagcgcctcccaccccttttcatagcaggaaaagccggagcccagggagggaacggacctgcgagtcacacaactggtgacccacaccagcggctggagcaggaccctcttggggagaagagcatcctgcccgcagccagggcccctcatcaaagtcctcggtgttttttaaattatcagaactgcccaggaccacgtttcccaggccctgcccagctgggactcctcggtccttgcctcctagtttctcaggcctggccctctcaaggcccaggcaccccaggccggttggaggccccgacttccactctggagaaccgtccaccctggaaagaagagctcagattcctcttggctctcggagccgcagggagtgtgtcttcccgcgccaccctccaccccccgaaatgtttctgtttctaatcccagcctgggcaggaatgtggctccccggccaggggccaaggagctattttggggtctcgtttgcccagggagggcttggctccaccactttcctcccccagcctttgggcagcaggtcacccctgttcaggctctgagggtgccccctcctggtcctgtcctcaccaccccttccccacctcctgggaaaaaaaaaaaaaaaaaaaaaaaaagctggtataaagcagagagcctgagggctaaatttaactgtccgagtcggaatccatctctgagtcacccaagaagctgccctggcctcccgtccccttcccaggcctcaacccctttctcccacccagccccaacccccagccctcaccccctagcccccagttctggagcttgtcgggagcaagggggtggttgctactgggtcactcagcctcaattggccctgtttcagcaatgggcaggttcttcttgaaattcatcacacctgtggcttcctctgtgctctacctttttattggggtgacagtgtgacagctgagattctccatgcattccccctactctagcactgaagggttctgaagggccctggaaggagggagcttggggggctggcttgtgaggggttaaggctgggaggcgggaggggggctggaccaaggggtggggagaaggggaggaggcctcggccggccgcagagagaagtggccagagaggcccaggggacagccagggacaggcagacatgcagccagggctccagggcctggacaggggctgccaggccctgtgacaggaggaccccgagcccccggcccggggaggggccatggtgctgcctgtccaacatgtcagccgaggtgcggctgaggcggctccagcagctggtgttggacccgggcttcctggggctggagcccctgctcgaccttctcctgggcgtccaccaggagctgggcgcctccgaactggcccaggacaagtacgtggccgacttcttgcagtggggtgagtgcctaccctcggggctcctgcagatggggtgggggtggggcaggagacaggtctgggcacagaggcctggctgttgggggggcaggatggcaggatgggcatggggagatcctcccatcctggggctcagagtgtggacctgggccctggggcaacatttctctgtcctatgccaccactctggaggggcagagtaaggtcagcagaggctagggtggctgtgactcagagccatggcttaggagtcacagcaggctaggctgccaacagcctcccatggcctctctgcaccccgcctcagggtcagggtcagggtcatgctgggagctccctctcctaggaccctccccccaaaagtgggctctatggccctctcccctggtttcctgtggcctggggcaagccaggagggccagcatggggcagctgccaggggcgcagccgacaggcaggtgttcggcgccagcctctccagctgccccaacaggtgcccaggcactgggagggcggtgactcacgcgggccctgtgggagaaccagctttgcagacaggcgccaccagtgccccctcctctgcgatccaggagggacaactttgggttcttctgggtgtgtctccttcttttgtaggttctgcacccacccccacccccagccccaaagtctcggttcctatgagccgtgtgggtcagccaccattcccgccaccccgggtccctgcgtcctttagttctcctggcccagggcctccaaccttccagctgtcccacaaaaccccttcttgcaagggctttccagggcctggggccagggctggaaggaggatgcttccgcttctgccagctgccttgtctgcccacctcctccccaagcccaggactcgggctcactggtcactggtttctttcattcccagcaccctgcccctctggccctcatatgtctggccctcagtgactggtgtttggtttttggcctgtgtgtaacaaactgtgtgtgacacttgtttcctgtttctccgccttcccctgcttcctcttgtgtccatctctttctgacccaggcctggttcctttccctcctcctcccatttcacagatgggaaggtggaggccaagaagggccaggccattcagcctctggaaaaaccttctcccaacctcccacagcccctaatgactctcctggcctccctttagtagaggatgaagttgggttggcagggtaaactgagaccgggtggggtaggggtctggcgctcccgggaggagcactccttttgtggcccgagctgcatctcgcggcccctcccctgccaggcctggggcgggggagggggccagggttcctgctgccttaaaagggctcaatgtcttggctctctcctccctcccccgtcctcagccctggctggttcgtccctgctggcccactctcccggaaccccccggaacccctctctttcctccagaacccactgtctcctctccttccctcccctcccatacccatccctctctccatcctgcctccacttcttccacccccgggagtccaggcctccctgtccccacagtccctgagccacaagcctccaccccagctggtcccccacccaggctgcccagtttaacattcctagtcataggaccttgacttctgagaggcctgattgtcatctgtaaataaggggtaggactaaagcactcctcctggaggactgagagatgggctggaccggagcacttgagtctgggatatgtgaccatgctacctttgtctccctgtcctgttccttcccccagccccaaatccagggttttccaaagtgtggttcaagaaccacctgcatctgaatctagaggtactggatacaaccccacgtctgggccgttacccaggacattctacatgagaacgtgggggtggggccctggctgcacctgaactgtcacctggagtcagggtggaaggtggaagaactgggtcttatttccttctccccttgttctttagggtctgtccttctgcagactccgttaccccaccctaaccatcctgcacacccttggagccctctgggccaatgccctgtcccgcaaagggcttctcaggcatctcacctctatgggagggcatttttggcccccagaaccttacacggtgtttatgtggggaagcccctgggaagcagacagtcctagggtgaagctgagaggcagagagaaggggagacagacagagggtggggctttcccccttgtctccagtgccctttctggtgaccctcggttcttttcccccaccacccccccagcggagcccatcgtggtgaggcttaaggaggtccgactgcagagggacgacttcgagattctgaaggtgatcggacgcggggcgttcagcgaggtaagccgaaccgggcgggagcctgacttgactcgtggtgggcggggcataggggttggggcggggccttagaaattgatgaatgaccgagccttagaacctagggctgggctggaggcggggcttgggaccaatgggcgtggtgtggcaggtggggcggggccacggctgggtgcagaagcgggtggagttgggtctgggcgagcccttttgttttcccgccgtctccactctgtctcactatctcgacctcaggtagcggtagtgaagatgaagcagacgggccaggtgtatgccatgaagatcatgaacaagtgggacatgctgaagaggggcgaggtgaggggctgggcggacgtggggggctttgaggatccgcgccccgtctccggctgcagctcctccgggtgccctgcaggtgtcgtgcttccgtgaggagagggacgtgttggtgaatggggaccggcggtggatcacgcagctgcacttcgccttccaggatgagaactacctggtgagctccgggccggggtgactaggaagagggacaagagcccgtgctgtcactggacgaggaggtggggagaggaagctctaggattgggggtgctgcccggaaacgtctgtgggaaagtctgtgtgcggtaagagggtgtgtcaggtggatgaggggccttccctatctgagacggggatggtgtccttcactgcccgtttctggggtgatctgggggactcttataaagatgtctctgttgcggggggtctcttacctggaatgggataggtcttcaggaattctaacggggccactgcctagggaaggagtgtctgggacctattctctgggtgttgggtggcctctgggttctctttcccagaacatctcagggggagtgaatctgcccagtgacatcccaggaaagtttttttgtttgtgtttttttttgaggggcgggggcgggggccgcaggtggtctctgatttggcccggcagatctctatggttatctctgggctggggctgcaggtctctgcccaaggatggggtgtctctgggaggggttgtcccagccatccgtgatggatcagggcctcaggggactaccaaccacccatgacgaaccccttctcagtacctggtcatggagtattacgtgggcggggacctgctgacactgctgagcaagtttggggagcggattccggccgagatggcgcgcttctacctggcggagattgtcatggccatagactcggtgcaccggcttggctacgtgcacaggtgggtgcagcatggccgaggggatagcaagcttgttccctggccgggttcttggaaggtcagagcccagagaggccagggcctggagagggaccttcttggttggggcccaccggggggtgcctgggagtaggggtcagaactgtagaagccctacaggggcggaacccgaggaagtggggtcccaggtggcactgcccggaggggcggagcctggtgggaccacagaagggaggttcatttatcccacccttctcttttcctccgtgcagggacatcaaacccgacaacatcctgctggaccgctgtggccacatccgcctggccgacttcggctcttgcctcaagctgcgggcagatggaacggtgagccagtgccctggccacagagcaactggggctgctgatgagggatggaaggcacagagtgtgggagcgggactggatttggaggggaaaagaggtggtgtgacccaggcttaagtgtgcatctgtgtggcggagtattagaccaggcagagggaggggctaagcatttggggagtggttggaaggagggcccagagctggtgggcccagaggggtgggcccaagcctcgctctgctccttttggtccaggtgcggtcgctggtggctgtgggcaccccagactacctgtcccccgagatcctgcaggctgtgggcggtgggcctgggacaggcagctacgggcccgagtgtgactggtgggcgctgggtgtattcgcctatgaaatgttctatgggcagacgcccttctacgcggattccacggcggagacctatggcaagatcgtccactacaaggtgagcacggccgcagggagacctggcctctcccggtaggcgctcccaggctatcgcctcctctccctctgagcaggagcacctctctctgccgctggtggacgaaggggtccctgaggaggctcgagacttcattcagcggttgctgtgtcccccggagacacggctgggccggggtggagcaggcgacttccggacacatcccttcttctttggcctcgactgggatggtctccgggacagcgtgcccccctttacaccggatttcgaaggtgccaccgacacatgcaacttcgacttggtggaggacgggctcactgccatggtgagcgggggcggggtaggtacctgtggcccctgctcggctgcgggaacctccccatgctccctccataaagttggagtaaggacagtgcctaccttctggggtcctgaatcactcattccccagagcacctgctctgtgcccatctactactgaggacccagcagtgacctagacttacagtccagtgggggaacacagagcagtcttcagacagtaaggccccagagtgatcagggctgagacaatggagtgcagggggtgggggactcctgactcagcaaggaaggtcctggagggctttctggagtggggagctatctgagctgagacttggagggatgagaagcaggagaggactcctcctcccttaggccgtctctcttcaccgtgtaacaagctgtcatggcatgcttgctcggctctgggtgcccttttgctgaacaatactggggatccagcacggaccagatgagctctggtccctgccctcatccagttgcagtctagagaattagagaattatggagagtgtggcaggtgccctgaagggaagcaacaggatacaagaaaaaatgatggggccaggcacggtggctcacgcctgtaaccccagcaatttggcaggccgaagtgggtggattgcttgagcccaggagttcgagaccagcctgggcaatgtggtgagacccccgtctctacaaaaatgttttaaaaattggttgggcgtggtggcgcatgcctgtatactcagctactagggtggccgacgtgggcttgagcccaggaggtcaaggctgcagtgagctgtgattgtgccactgcactccagcctgggcaacggagagagactctgtctcaaaaataagataaactgaaattaaaaaataggctgggctggccgggcgtggtggctcacgcctgtaatctcagcactttgggaggccgaggcgggtggatcacgaggtcaggagatcgagaccatcttggctaacacggtgaaaccccatctctcctaaaaatacaaaaaattagccaggcgtggtggcgggcgcctgtagtcccagctactcaggaggctgaggcaggagaatggcgtgaacccgggaggcagagtttgcagtgagccgagatcgtgccactgcactccagcctgggcgacagagcgagactctgtctcagaaaaaaaaaaaaaaaaaaaaaaaaataggctggaccgcggccgggcgctgtggctcatgcctgtaatcccagcactttgggagtccaaggccggtgggtcatgagatcaggagttttgagactaggctggccaacacggtgaaaccccgtctctactaaaaatacaagaaaattagctgggtgtggtctcgggtgcctgtaattccagttactggggaagctgaggcaggagaattgcttgaacctgggaggcagagtttgcagtgagccaagatcatgccactacactccagtctgggtgacagagtgagactctgtctcaaaaaaaaaaaaaaaaaaaagggttgggcaaggtggttcacgcctgtaatcccagaactttgggaggctgaggcaggcagatcactggaagtcaggagttcaagaccagcctggccaacatggtgaaaccctgtgtctactaaaaatacaaaatttagccaggcttggtggcgtatgcctgtaatgccagctactcaggaggctgaggcaggagaatcgcttgattgaacctgggaggcagagtttgcagtgggctggggttgtgccactgcactctaggctgggagacagcaagactccatctaaaaaaaaaaaacagaactgggctgggcacagtggcttatatttgtaatcccagcactttgggaggctgaggttggaggactgcttgagcccagagtttgggactacaacagctgaggtaggcggatcacttgaggtcagaagatggagaccagcctggccagcgtggcgaaaccccgtctctaccaaaaatataaaaaattagccaggcgtggtagagggcgcctgtaatctcagctactcaggacgctgaggcaggagaatcgcctgaacctgggaggcggaggttgcagtgagctgagattgcaccactgcactccagcctgggtaacagagcgagactccgtatcaaagaaaaagaaaaaagaaaaaatgctggaggggccactttagataagccctgagttggggctggtttggggggaacatgtaagccaagatcaaaaagcagtgaggggcccgccctgacgactgctgctcacatctgtgtgtcttgcgcaggagacactgtcggacattcgggaaggtgcgccgctaggggtccacctgccttttgtgggctactcctactcctgcatggccctcaggtaagcactgccctggacggcctccaggggccacgaggctgcttgagcttcctgggtcctgctccttggcagccaatggagttgcaggatcagtcttggaaccttactgttttgggcccaaagactcctaagaggccagagttggaggaccttaaattttcagatctatgtacttcaaaatgttagattgaattttaaaacctcagagtcacagactgggcttcccagaatcttgtaaccattaacttttacgtctgtagtacacagagccacaggacttcagaacttggaaaatatgaagtttagacttttacaatcagttgtaaaagaatgcaaattctttgaatcagccatataacaataaggccatttaaaagtattaatttaggcgggccgcggtggctcacgcctgtaatcctagcactttgggaggccaaggcaggtggatcatgaggtcaggagatcgagaccatcctggctaacacggtgaaaccccgtctctactaaaaatacaaaaaaattagccgggcatggtggcgggcgcttgcggtcccagctacttgggaggcgaggcaggagaatggcatgaacccgggaggcggagcttgcagtgagccgagatcatgccactgcactccagcctgggcgacagagcaagactccgtctcaaaaaaaaaaaaaaaaaagtatttatttaggccgggtgtggtggctcacgcctgtaattccagtgctttgggaggatgaggtgggtggatcacctgaggtcaggagttcgagaccagcctgaccaacgtggagaaacctcatctctactaaaaaacaaaattagccaggcgtggtggcatatacctgtaatcccagctactcaggaggctgaggcaggagaatcagaacccaggagggggaggttgtggtgagctgagatcgtgccattgcattccagcctgggcaacaagagtgaaacttcatctcaaaaaaaaaaaaaaaaaagtactaatttacaggctgggcatggtggctcacgcttggaatcccagcactttgggaggctgaagtggacggattgcttcagcccaggagttcaagaccagcctgagcaacataatgagaccctgtctctacaaaaaattgaaaaaatcgtgccaggcatggtggtctgtgcctgcagtcctagctactcaggagtctgaagtaggagaatcacttgagcctggagtttgaggcttcagtgagccatgatagattccagcctaggcaacaaagtgagacctggtctcaacaaaagtattaattacacaaataatgcattgcttatcacaagtaaattagaaaatacagataaggaaaaggaagttgatatctcgtgagctcaccagatggcagtggtccctggctcacacgtgtactgacacatgtttaaatagtggagaacaggtgtttttttggtttgtttttttccccttcctcatgctactttgtctaagagaacagttggttttctagtcagcttttattactggacaacattacacatactataccttatcattaatgaactccagcttgattctgaaccgctgcggggcctgaacggtgggtcaggattgaacccatcctctattagaacccaggcgcatgtccaggatagctaggtcctgagccgtgttcccacaggagggactgctgggttggaggggacagccacttcataccccagggaggagctgtccccttcccacagctgagtggggtgtgctgacctcaagttgccatcttggggtcccatgcccagtcttaggaccacatctgtggaggtggccagagccaagcagtctccccatcaggtcggcctccctgtcctgaggccctgagaagaggggtctgcagcggtcacatgtcaagggaggagatgagctgaccctagaacatgggggtctggaccccaagtccctgcagaaggtttagaaagagcagctcccaggggcccaaggccaggagaggggcagggcttttcctaagcagaggaggggctattggcctacctgggactctgttctcttcgctctgctgctccccttcctcaaatcaggaggtcttggaagcagctgcccctacccacaggccagaagttctggttctccaccagagaatcagcattctgtctccctccccactccctcctcctctccccagggacagtgaggtcccaggccccacacccatggaactggaggccgagcagctgcttgagccacacgtgcaagcgcccagcctggagccctcggtgtccccacaggatgaaacagtaagttggtggaggggagggggtccgtcagggacaattgggagagaaaaggtgagggcttcccgggtggcgtgcactgtagagccctctagggacttcctgaacagaagcagacagaaaccacggagagacgaggttacttcagacatgggacggtctctgtagttacagtggggcattaagtaagggtgtgtgtgttgctggggatctgagaagtcgatctttgagctgagcgctggtgaaggagaaacaagccatggaaggaaaggtgccaagtggtcaggcgagagcctccagggcaaaggccttgggcaggtgggaatcctgatttgttcctgaaaggtagtttggctgaatcattcctgagaaggctggagaggccagcaggaaacaaaacccagcaaggccttttgtcgtgagggcattagggagctggagggattttgagcagcagagggacataggttgtgttagtgtttgagcaccagccctctggtccctgtgtagatttagaggaccagactcagggatggggctgagggaggtagggaagggagggggcttggatcattgcaggagctatggggattccagaaatgttgaggggacggaggagtaggggataaacaaggattcctagcctggaaccagtgcccaagtcctgagtcttccaggagccacaggcagccttaagcctggtccccatacacaggctgaagtggcagttccagcggctgtccctgcggcagaggctgaggccgaggtgacgctgcgggagctccaggaagccctggaggaggaggtgctcacccggcagagcctgagccgggagatggaggccatccgcacggacaaccagaacttcgccaggtcgggatcggggccggggccggggccgggatgcgggccggtggcaacccttggcatcccctctcgtccggcccggacggactcaccgtccttacctccccacagtcaactacgcgaggcagaggctcggaaccgggacctagaggcacacgtccggcagttgcaggagcggatggagttgctgcaggcagagggagccacaggtgagtccctcatgtgtccccttccccggaggaccgggaggaggtgggccgtctgctccgcggggcgtgtatagacacctggaggagggaagggacccacgctggggcacgccgcgccaccgccctccttcgcccctccacgcgccctatgcctctttcttctccttccagctgtcacgggggtccccagtccccgggccacggatccaccttcccatgtaagacccctctctttcccctgcctcagacctgctgcccattctgcagatcccctccctggctcctggtctccccgtccagatatagggctcaccctacgtctttgcgactttagagggcagaagccctttattcagccccagatctccctccgttcaggcctcaccagattccctccgggatctccctagataacctccccaacctcgattcccctcgctgtctctcgccccaccgctgagggctgggctgggctccgatcgggtcacctgtcccttctctctccagctagatggccccccggccgtggctgtgggccagtgcccgctggtggggccaggccccatgcaccgccgccacctgctgctccctgccagggtacgtccggctgcccacgcccccctccgccgtcgcgccccgcgctccacccgccccttgccacccgcttagctgcgcatttgcggggctgggcccacggcaggagggcggatcttcgggcagccaatcaacacaggccgctaggaagcagccaatgacgagttcggacgggattcgaggcgtgcgagtggactaacaacagctgtaggctgttggggcgggggcggggcgcagggaagagtgcgggcccacctatgggcgtaggcggggcgagtcccaggagccaatcagaggcccatgccgggtgttgacctcgccctctccccgcaggtccctaggcctggcctatcggaggcgctttccctgctcctgttcgccgttgttctgtctcgtgccgccgccctgggctgcattgggttggtggcccacgccggccaactcaccgcagtctggcgccgcccaggagccgcccgcgctccctgaaccctagaactgtcttcgactccggggccccgttggaagactgagtgcccggggcacggcacagaagccgcgcccaccgcctgccagttcacaaccgctccgagcgtgggtctccgcccagctccagtcctgtgatccgggcccgccccctagcggccggggagggaggggccgggtccgcggccggcgaacggggctcgaagggtccttgtagccgggaatgctgctgctgctgctgctgctgctgctgctgctgctgctgctgctgctgctgctgctgctggggggatcacagaccatttctttctttcggccaggctgaggccctgacgtggatgggcaaactgcaggcctgggaaggcagcaagccgggccgtccgtgttccatcctccacgcacccccacctatcgttggttcgcaaagtgcaaagctttcttgtgcatgacgccctgctctggggagcgtctggcgcgatctctgcctgcttactcgggaaatttgcttttgccaaacccgctttttcggggatcccgcgcccccctcctcacttgcgctgctctcggagccccagccggctccgcccgcttcggcggtttggatatttattgacctcgtcctccgactcgctgacaggctacaggacccccaacaaccccaatccacgttttggatgcactgagaccccgacattcctcggtatttattgtctgtccccacctaggacccccacccccgaccctcgcgaataaaaggccctccatctgcccaaagctctggactccacagtgtccgcggtttgcgttgtgggccggaggctccgcagcgggccaatccggaggcgtgtggaggcggccgaaggtctgggaggagctagcgggatgcgaagcggccgaatcagggttgggggaggaaaagccacggggcggggctttggcgtccggccaataggagggcgagcgggccacccggaggcaccgcccccgcccagctgtggcccagctgtgccaccgagcgtcgagaagagggggctgggctggcagcgcgcgcggccatcctccttccactgcgcctgcgcacgccacgcgcatccgctcctgggacgcaagctcgagaaaagttgctgcaaactttctagcccgttccccgcccctcctcccggccagacccgccccccctgcggagccgggaattccgaggggcggagcgcaggccgagatggggaatgtgggggcctgcagaggaccctggagacggaggcgtgcagaag

SEQ ID NO: 9 - RNA, 2877 nt, Homo sapiens
  source 1..2877: mol_type = mRNA
aggggggctggaccaaggggtggggagaaggggaggaggcctcggccggccgcagagagaagtggccagagaggcccaggggacagccagggacaggcagacatgcagccagggctccagggcctggacaggggctgccaggccctgtgacaggaggaccccgagcccccggcccggggaggggccatggtgctgcctgtccaacatgtcagccgaggtgcggctgaggcggctccagcagctggtgttggacccgggcttcctggggctggagcccctgctcgaccttctcctgggcgtccaccaggagctgggcgcctccgaactggcccaggacaagtacgtggccgacttcttgcagtgggcggagcccatcgtggtgaggcttaaggaggtccgactgcagagggacgacttcgagattctgaaggtgatcggacgcggggcgttcagcgaggtagcggtagtgaagatgaagcagacgggccaggtgtatgccatgaagatcatgaacaagtgggacatgctgaagaggggcgaggtgtcgtgcttccgtgaggagagggacgtgttggtgaatggggaccggcggtggatcacgcagctgcacttcgccttccaggatgagaactacctgtacctggtcatggagtattacgtgggcggggacctgctgacactgctgagcaagtttggggagcggattccggccgagatggcgcgcttctacctggcggagattgtcatggccatagactcggtgcaccggcttggctacgtgcacagggacatcaaacccgacaacatcctgctggaccgctgtggccacatccgcctggccgacttcggctcttgcctcaagctgcgggcagatggaacggtgcggtcgctggtggctgtgggcaccccagactacctgtcccccgagatcctgcaggctgtgggcggtgggcctgggacaggcagctacgggcccgagtgtgactggtgggcgctgggtgtattcgcctatgaaatgttctatgggcagacgcccttctacgcggattccacggcggagacctatggcaagatcgtccactacaaggagcacctctctctgccgctggtggacgaaggggtccctgaggaggctcgagacttcattcagcggttgctgtgtcccccggagacacggctgggccggggtggagcaggcgacttccggacacatcccttcttctttggcctcgactgggatggtctccgggacagcgtgcccccctttacaccggatttcgaaggtgccaccgacacatgcaacttcgacttggtggaggacgggctcactgccatggagacactgtcggacattcgggaaggtgcgccgctaggggtccacctgccttttgtgggctactcctactcctgcatggccctcagggacagtgaggtcccaggccccacacccatggaactggaggccgagcagctgcttgagccacacgtgcaagcgcccagcctggagccctcggtgtccccacaggatgaaacagctgaagtggcagttccagcggctgtccctgcggcagaggctgaggccgaggtgacgctgcgggagctccaggaagccctggaggaggaggtgctcacccggcagagcctgagccgggagatggaggccatccgcacggacaaccagaacttcgccagtcaactacgcgaggcagaggctcggaaccgggacctagaggcacacgtccggcagttgcaggagcggatggagttgctgcaggcagagggagccacagctgtcacgggggtccccagtccccgggccacggatccaccttcccatctagatggccccccggccgtggctgtgggccagtgcccgctggtggggccaggccccatgcaccgccgccacctgctgctccctgccagggtccctaggcctggcctatcggaggcgctttccctgctcctgttcgccgttgttctgtctcgtgccgccgccctgggctgcattgggttggtggcccacgccggccaactcaccgcagtctggcgccgcccaggagccgcccgcgctccctgaaccctagaactgtcttcgactccggggccccgttggaagactgagtgcccggggcacggcacagaagccgcgcccaccgcctgccagttcacaaccgctccgagcgtgggtctccgcccagctccagtcctgtgatccgggcccgccccctagcggccggggagggaggggccgggtccgcggccggcgaacggggctcgaagggtccttgtagccgggaatgctgctgctgctgctgctgctgctgctgctgctgctgctgctgctgctgctgctgctgctggggggatcacagaccatttctttctttcggccaggctgaggccctgacgtggatgggcaaactgcaggcctgggaaggcagcaagccgggccgtccgtgttccatcctccacgcacccccacctatcgttggttcgcaaagtgcaaagctttcttgtgcatgacgccctgctctggggagcgtctggcgcgatctctgcctgcttactcgggaaatttgcttttgccaaacccgctttttcggggatcccgcgcccccctcctcacttgcgctgctctcggagccccagccggctccgcccgcttcggcggtttggatatttattgacctcgtcctccgactcgctgacaggctacaggacccccaacaaccccaatccacgttttggatgcactgagaccccgacattcctcggtatttattgtctgtccccacctaggacccccacccccgaccctcgcgaataaaaggccctccatctgcccaaaaaaaaaaaaaaaaaaaaaaaaaaaaa

SEQ ID NO: 10 - DNA, 120000 bp, Homo sapiens
  source 1..120000: mol_type = genomic DNA
gctcacacctgtaatcccagctactctggaggctgaggcaggagaatcacttgaacccaggacgtggaggtggcagtgagccgagatcgcaccactgcacgccaccctgagagacagcgagatttcgtctaaaaaaaaaaaaaaaaaggttggacgtggtggtggctcacacctgtaatcctagcactttgggaggccaaggagggcagatcatgaggtcaggagttcaagaccagcctggccaacatggtgaaaccccatctctactaaatatacaaaaattagctgggtgtggtggcacgtgcctgtaatcccagctactctggaggctgaggcaggaatatcgcttgaagccaggacttggaggttgcagtgagccaagatcgcactactgtactccagcctgggagacagagcaagcctccatctcaaaaaaagaaaagaaaagaaaaaaaaagtccaagcgcggtggctcacacctgcaatcccagcactttgggaggccaaggagggagggtcatctgggtcaggagttcgagaccagcctggccaacatggtgaaaccccatctctactaaaaatacaaaaattagccaggtatggtggcaggcgcctgtagtcccagctacttgaaaggctgaggcaggagaatcatttgaacccgggaggcggaggttgcagtgagctgagattgcatcactgcactccagcctgggctacagagcaagactctgtttcaaaaaaaaaaaaaagtgaaaaagtaatacatgtatgtaatccacaattcaaatcacatcaaaagtgcaactacttttatcaatttatgtatttttccagcaattttccgtgtgtacatatggttttcatgcatgtcagcatccttcacacacagttctgtaccttgcttgttttttcctcttagtatatctcaaattatttatacttcagtacatgaagagtttcctcaacgtttttgtttgtttgtttatttgtttttgagacggggttttgctcttgttgcccaggctggagtgcagcggtgcgatctcagctcaccgcaacttctgcgtcccgtgttcaagcgattctcctgcctcagcctctcgagtagctgggattacaggcacgcaccaccacgcctggctaattttttgtatttttagtagaaacgtggtttcactatgttagccaagctggtttcgaacctctaacctcaggtgatctgccctccttggcctcccaaagtgctgggattacaggcatgagccaccgcacctggcgctttttgcctatttctttgagacctggggttttgggtcacaaaacaggcaaatgccatgagccaccctcctcctctttctccatcttcttgtgctgcctcaggtcagagcacttacctgctcctgccttctcactgggtttccttgtctctggcctatttgtctccagaggggtcaaaacacttcaaatcctcctatttgtctctgtccactgtcaggagttccagttcccagaaccccaattttgcctacaaaatagcgtgtcttttcacggggagaggatttgttgagttttagtgggtactcaaaaagatctaaagccagttgggggggttcacacatgtaatcccagcacttttgggaggccggcctgtgagggtcgtttgggcgcaggagtttgagaccagcctggacaacacagcaagaccctgtctctataaaaaataaaataaaaataattagctgggcatagttgcgcacgtctgtggttccagctactcgggacgctgaggcgggaggatcgtttgagcccaggtgcttgttgaattgagctatgagtgcactactgcaccccagcctgggcaacagagtaaggacccagtttctaagaaaagaagattcattagctagacgcggtggctcacacctgtaattccaacactttgggaggccaagacgggcggatcacttgaggccaggcgttcgagaccagcctggccaatatggtgaaaccccgtctactaaaaatacaaaattagctgggcgtggtggctcacacttgtaatcccagctattcgggaggctgaggcaggagaattggttgaaccggggaggcggaggttgcagtgagccaagatcgcgctactgcactccagcctgggtgacagagtgagtaccccgcctcaaaaaaaagaaaagaaaaaagattcatgatctgctaaagttgaagaagtgggggaaaacattggagtgttagcggcgtcaagatcgggcgtgagcagaaagggcacagcatttgcaaaggcgtggaggagtgattttattgcgttctatccctaggaagcaatgacttggcctctaccatttgcagagcgcattgggaccctgctcccagagctggtttgcagtctgggaactgagatgcgctctgggacttgtagttttccccagtgccaggaaactcaaaaatcgagacatcggatcccaccacgaggtgtcgcccttgagcgagtacggtgggatctatcctatacttcagaaggctgttgcagacatccaacaatcacaaggaagaacgggagtttttctgattgacagatatggttctcaatgatagtcaagattcggatgttaaagcccgccctcttttgcctggttggctggagcaacgaagtgatatttatatgaaccaatgggaaattcttagggaacgaggtagtagctcaatccccaacaccattggtccacattgtctactggcacgtctgcctgccaataagatggtggaacttcgccaatgggcagagccaacgtgcctttttcggaaacacccccttcctctcttgacaacttgctttctgccgctattggctgttgcacaacagtgacggttcttttgtccaataagtcagcaagacggtccccagggggaaggtttactcaaccataggcccgtgcctagtttttattggctagtgtatccgagtggcggtgcagcaggccagtcgcgtgcggcgcgagtgctttgggcgcagcccccggggccggggcgggaggtcgctcgggtcgggtgtcgcctgagaaccggatgaggcggcgaccgtgaggccgagccgggagcgggcgtcttgccgaggcccgggcgggcggggagcaacggctacagacgccgcggggccaggtcgttgagggtcggcggcgggcgaggagcgcagggcgctcgggccgggggccgccggcgccatgggcaaccgcgggatggaagagctgatcccgctggtcaacaaactgcaggacgccttcagctccatcggccagagctgccacctggacctgccgcagatcgctgtagtgggcggccagagcgccggcaagagctcggtgctggagaacttcgtgggccggtgagcgggcgcggcagggatcgcgggcgggtggcggcctagggcgcggagggcggaccgggaatggcgcgccgtgcgccgccggcgtaactgcggcgcttgcgtgcccgcggcggggaaccggacggggtcggggaggcgggccctgtgggacgccctgggcagaggactccctgcaggggctccggagcaggcccgggccccaggggcggtgtcacgggccagggcgccgtaggacaggaggtgcgctggaaccctgcggtccatctggtcccagctttcgtgggtgaagtctgccatctggttggccgtgggtctggggtagatccctcttctgctctttcgggctgtccatcagaggtgaaaccggccatctagatatctattggggcgaccgctgcggtctggctggcttgttcttgtatctggagctgcccccgccgtctggttggctgtctctctgtcctgggcaagcctccctgccaccaccatttggttgtccatctgtccagtcccacctggcagccccctgctgtctggctagctgtccagggtgacctctgctgtctggccgcccatccgtgcccctcacagactttaacactgagcagtccctctgttgggtgacaccagctggcctctactgtctgactggctagctgactcctaggggaccctgtttgattctctctggctgactcttacagcttgattcctggctagcgctggctcctctcttccgtgtgaattcttctgtctgtctggccatctcctagtctgcccatgactacccctgagtgtctggcacaacggctctggaaaggggtggtaggagggtagaggggagaacagagctgaaggaggaggtttggaccctacttcccctctcagctggaaggaggactctgggggtaccttacttcaggattcctttccgagtgctagaacacaggggcccgcctcccagctacagcctacaaattgggggccctcctttggagcctgggaaggggcttcttgcgtgatcaggcctcagtggctagcgctgggatgtagccttctctggacagccttgagaagccgcggtgtgcccatctgtccagtgggcaaactccactctctggggctgtttccaggattcaggaagcaaatgaatgagaacagcccgtgcagccacctctccctcccaccaacccctcttgcctttcttgtctcccagatgggcggccacttctccattccaggaactactcatttgtggtggtgtggctgccaaatgataacatcctcctcctgtcattattgtcattgttattgttgttatcattgtcaagggataatgtcccttcttgattcaacatcttgaatcccaagtaaggagtggggtggaggctgtgttatcatccccaccttagctgagctgggaggctcagaagggactgtgatcacccaaggccactaggctggcgtaaggccttgtgtctgccatcccagagccttggggctttgctccaagcagcacaaatctcctcttttgctaccttgtctctagctcattgccttctgtctaccgtggtggaaaggtgtggacttgcagccagctgggcctggcctgatctcaggctggactgtggtgtgggcccctttgagtgaccatcttcctgcctgcccaggcttctgggacgggggtggggggtgtttgcaaagctctgtctctttcacttgccttgtgaccttgcacaggttgtcttggcctctctaagtcttggttgactctcctaaacaagtttattttattttatttatttatttattttttttttttttgagacagagtctccctctgtcatccagtctggagtgcagtggagcaatcttggctcactgcaacctctgcctcccaggttcaggccattcttctgcctcagcctcccgagtagctgggattacaggcgtctaccaccaagcccaactaatttttgtatttttagtagagacggggtttcaccatgttggccaggctggtctcaaactacttacctcaagtgatcctcatgccttggcctcccagagtgctgggattacaggtgtgagccaccaagcctcgccccaggagttccaagaccagcctgggtaacatgacaagatgccattctacaaaaaataaaaaaattagccaggtagggtggtagtcccacacctgtagtcccagcaactcaggaggctggccctgggaggactgcttgagcccaggatgtccagactgcagtgagccgtgattgcaccattaccctccagcctgggtgacagaaccagatccggtttcaaaaaaagaaaagaaaaagtgcttacttacctaacgcactgcctggcacatagtaggtctacatggatggggctattgttgtttatctggctggttcctttgctatcagggacaaaagctaaccagaatgaaagtgctttcacgttacacacttaagccttatgagggaggcattgctataatccccattttacagagcaggaaactgaggctcagatagctgagcagaacactctcactggaggctgtaaagtgaggagttaggtgttctgggttgggaacctgggtctctctcccatccttacctctcctcagtccctctaccccttgcctttctctcctgtctaccatggtgtctggcagctgccggccagtatggagctggttcctgtggcgacctcctagaatcctgcaatgcaggagttgctcattatatatatatttttacaccgagtctcactctgttccccaggctggagtgcagtggtgttatctcagcttactgcaacctccacctcccatgttcaagcgattctcatacctcagcctcccgagtagctgggattacaggcgcgcgttaccacacccggctaatttttgtatttttagcagagatggggtttcaccatgttggccaggctggtcttgaactcctgacctcaggtgatccgcccacctcggccacccaaaatgctggcattaaaggtgtgaaccaccatggctggcctcgttaagagtattaattcagtacctgaaagccaaagttgtaaaaaggcctctctttgggtatgaggggctcaaacaaggcttacttttttttgggggggtgtaagagataaggtctctctttgttgccgaggttggagtggaggggtgcagtcctagctcattgcagcctcgaactccagggctcaagcaatcctcctgcctctgcctctaaaagcactaggattacaggtgtgagccattgcgccgagcctggattttctaaggatgtggtccgagtgggaacagcccagttagttcagccctatagctggaagtccagatcactggctctgggggccaaggcctgcctgctgggtcttttgttttacctgcgtagcttttgtttttaataagactttccagtgttagatttccagtcaatatccggatttcttgtggctctaagacactcagatctatagagttctgagttgtcatgcaaaggctgtgggcctaaggcctggttccaccatgtctggctgtgcgactcggccacgtggatttggcgttctgggcctcagattccttttctgtaagctgagggtggtaactggtaccctggggcctagatgggtgattgggtgatgcgtgccgagtgcatgtgtcttatacgcatggtggctgttgttgtaatcagtttcacctggcgttgctgagcctttgtcccttgtggcagtaatggcttcgatttcagaagcaccagtcactgtcccatcagactaagagtggccactccagctgccacagtccccactactccctagcactcacccaggcctagatcattttgcttggagcctcctggccctggaacctttgagtttgagacccctggcttgtctgcggtgcaccagcagatagaactttggccctaaggagaaaggagggcatcactccctcttgacccttgtcatttagcctcaggggctggccagaaggaaggccttaggcattcccgcaccctagcctcccgagtagctgggactgcaggcacccgccaccacgcctggctaatttttgtatttttagtagagacgaggtttcaccatgttagccaggatggtctcaatcttctgaccttgtgatccgtccacctcggcctcccaaagtgctgggattacaggcgtgagccaccgcgcctggcctgagatagggtcttatactgtcacccaggctagagtgcagtggcaccatctctgctcactgcagccttgacctcctgggctcaagcgattctcctacctctcagcctcctaagtagctgggactacaggcacgtgccaccacgcttggctaatttttcattttttgtagatacagggccttgctgtgttgcccaggctggtctcgacctcctcgcctcaaatgatcctcctgcatcagtctcccaacgtgctggcattacaggtgtgagccactgcgcccagcctcctcttcattaaaatacaagttataatagcacttctttccctttcttttttttttttgagacggagtctggctctgttgcccaggctggagtgcagtggtgcgatctcggctcactgcaatctcgcctcctgagttcaagtgattctcctgtctcagcctcccgagtagctgggactacagttgcgagccaccacacctggctaatttttttttttttttttttgagacggagtttcattcttgttgcccaggctggagtgcaatggcacgatcttggctcaccgcaacctcccctcctggtttcaagccattctcctgcctcagcctcctgagtagctgggattacaggcatgcaccaccacgcctggctaattttgtatttttagtagaggcggggttttcccgtgttggtcaggctggtctcgaactcccgacctcaggtgatctgccggccatggcctcccaaagtgctgggattacaggcgtgagccaccgtgcccggctaatttttctatttttaatagagatggggtttcgccatgttggccaggctggttccaaactcctgacctcaagtgatcttcctgccttggcctcccaaggtgctgggattgcaggtgtaagccaccgcgcccagccccgtcttctttaaaataggagttataatagcacttctttccctttcttgaatagggattaagtgagacagtttggagtgcttggcatagaagaagtgcttaaaacattaggtgttgttcgttcattaaaaaatgtttcctgagtacttttactgtgtgcctggggacatggccctgagcaagttaccagaacttctgctctggaggagctggcctttcagcaggaagcaaataaaggagaagcatgggccacttagtggctcaggcccacaatctcagctctttgggatccaggcgggaggatcacttgagcccagaagttggagaccagcctgggcaacatagaccccgtctctacaaaaaataaaaacattagctgggcatggtgacacctgtagtcccagctactcaggaggctgaggccggaggatggcttgagcctgggatttcaaggctgcagtgagctctgatcacgctactgccttccagcctgggcggaagaacgagacctcgtctcaaaaaaaaaaaaaaaggcgataagtatgatggaaaaaaggatcaaggagcaggatgagggagagatcacagttggagggggtacattttattttattatattattattctttgagacggagtctcactctgtcttccaggctggagtgcagtcacgcgatctcggctcactgcaacctccgcctcccaggttcacgccattctcttgcctcagcctcccgagtagctgggattacaggcgcctgccaccaggcccggctaattttttgtatttttagtagagatggagtttcaccatgttagccaggatggtctcgatctcctgacttcgtgatccgcccgcctcggcctcccaaagtgctgggataacaggcgtgagccactgcgcctggccagagggggtacattttaaatagggaaattggtgacatttgagcagagccttgaaggaggcgaggaaggaacccctggagacgggaagagaatccagtgcaaaggtcctgatgtgggaggatgcccggaggccagtttagcaggccagtggagggagatcagatctgggagatattagggtgggaccaggcctctaggaacattgtgggcagggaggctgtctgagcagagggaagtaaagctggtggcgctactgctgtccctctggacctggccaagctgagggctctctcctttgatttccagcttcaactcagttttctcagtaagcagactccacaggcatgtaggcgccccgtgccatttttcttttaataagaagcagctgtgccggggatgctggcgtttccagctgcgtttttatttggcctttggtgatgtgtccctccagggatatgtggatgagccgcgggggcactgcctgtgcctcagtgggtgctgcaccagtgcacatcggatgcccgttggctcctgtccctgacagatggaggggcacgtgatgtgttccttgggctggtttgtccctttaacagatcttattagtttagagccacttggaaatgacatcttctgtttccagtgactttccttttgggcaaagacaaattgcatcttgaaaaggccatacatggccgggcatggtgactcacacctgtaatcccagcattttgggaggccgaggcaggcagatcacaaggttgggagtttgagaccagcctggccaacatagtgaatcccgatctctactaaaaatacaaaaattagccaggtgtggtggcgcatgcctttagtcccagctatttgggaggctgaggcaggagaatcacttgaacccaggaggaggaacttgcagtaagcggagatcacgccattgcactccagcctgggggacagagtgagactccatctcaaaaaaaaaaaaaaaaggaaaaaaggaaaggccatgcaaggctcggttagggtggtctgcagtgctgggcctgctggaattggtacagtccagagggatctgtgggaatatggaaggcttggttctgccacacaccaaaaaagtgacctcacttctctgggcctcagtttcctcatctggaaaatgggaacatggtggtctctgcctactgggagtggactgagaatcacgtagcaaattgttgtgaaacaggcagcatttgtgatctcgttggttggcttttgtctccttttatctgggatcaggactctgatgacaggtgtacgtttcttttctcttgctctgtcccccagactggagtacagtggcgtaatcatggctcactgcagcctccaactcctgggttcaggtggtcctctcacctgagtctcctgagtagctgggactataggcatgagccaccacacctggctaattacaaaaaaatttttttggcagggagcgatggctcacacttgtattcccagcacttggggaggccgaggcgggcggatcacggggtcaagagattgagaccatcctggccaacatggtgaaaccctgtctctactaaaaatccaaaaattaggtgggtgtggtggctctcacctgtagtcccagctgctcgggaggctgaggcaggagaatcgcttgaacctgggaggcggaggttgcagtgagccgagatcgtgccactgcactccagcctgggcgacagagcgagactctgcctcaaaaaaaaaaaatttttttttttttagagacagggtcttactttgttgctcagtttggtgtcaaactcctgggcccaagcgatcctcctgccttggcttcccaaagtggtggaattacaggtgtgagccgccgaacccggccttagtttctttttccttaaagagaaggaactcatcattactctgttgatataaatggagtgcctatcagtgcaggcaatgttcttgctctggggatacagccaggaccaggacatgcaggcacgccctgttccccagatcctgaaatatcgaccagaagttgttcctggttcctttctaagtgggaatcatggctgcaaacaagtaattggccgtgagagttatttacacacattttgtgtacggtgatgagaaatgggagaaaaaatgcccagcatcggatcaccagaggtcaggagttcgagaccagcctggccaacatggtgaaccctcatctctactaaaaatacaaaaattagccgggcgtggtggcaggcgcctgtaatcccagctattcgggaggctgaggcggagaatcgcttgaacctgggggacggaggttgcggtaagccgagattgcgccgctgcactccagcctgggcaacagagcgagactctgtctcaaaacaaacaaacaaacaaaaaccaatgataggggatttggccagataagcgtgtccagacaaccgactatcaactcgctactcagagggatctagaagaatctttaatgacccagaaagctgcacaagacctgttaggtaccagatgaaatgggctgtgggatcctgtcttgtttaaaacgattgtatttgctcagtgaaaagaccggaaagacatactctgccctaaccccacatgtgaatcgtctccccatgtgattcttggtttgtttttgctggtttggggattaggtttataatcaggaagacagatttctccaaagctgcgctctaggctgtccaagtgctttttcagagttacttattgacggataacagcccttgataggttcataacattgaaatcccctggtaataacctggattgtttctggatgagggcggaagatggccttggggacagttgtagatttagagaggaggttttcttttcttttctttttctttttttgtttttttttgagacgggatctcactctgttgcctaggctgaaatgcagtggcgtgatcacagctcacagcaacctcaacttcctgggctcaagggatcttcccacttcagcctcccaattagctgggaccacaggtgtgcgccaccacccccagctaattttaagaaattttttgtagaggtggggtctcattattttttgcccaggctagtctcaaacccctgggctcaagtgattctcctgcctcggcttcccaaagtgctgggattacaggcaagagccacggcacccggcctaggttagatttagagttttcagagttggcttaggcggtagaggctggcctttgaatggaaccctgtctcgctgtcgctctcagcgtttatatttggctcagagccacatctgccaaacttctgcccgatttgaatgaaagtgctgaaattataggcccctcggctgctgaaaaaaagtgagaacatcatgtaaaccgtaatttactgggattgccaactacaagctgtaattaagcccttattgtgttaaagctttggaaaaatccaagccaataatgagatatttatagggcattagctacaatctgaataaagggaaaatgtggccctgcgtctgaagcaggactgcaaagagaggaaagacgcctgcttccgggtgcgttttgggtttctgtgaatattggtaactaggtccctgctgggtggtgggaaattttcccctgtggcgtcacccgtagcttgaaccgggagctggatgactgtttcagtttcatctgctgctggacatttatgatgttaagagccagtgtttatggagaatcaccgtgtgccacatgtgcaagatctgaccagtgtcttctctgcccaggggtggcagctgctgctcttagcatccctgctttataggtagagaaactgaggccagagagggagactggcctgaagtcacacagggaggaggacagaggagttggagcttgaactggatgtgggccctctagagccacacatatggcggctttgggtgggaaggtgtgggcctgactcttgagagcagggctgaatggtgggcaccatggcgtttgtatctgaggactgggccaagattacagagggagtgagcaacgcgtggctttggatatgcatcgaggttgtcagctctgtgtccagcctgcgtgtggtaagcagcaaccactctacaccagttgctgggcacccagcagggactgggacagacaggacaggtgaacagttaaatgagcaagaacattctggggcaggcacaggggctcacacctgtaatcccagcactttgagaggccaaggcgggcagatcacttgaagccaggtgttcgagaccagcctggccagcatggcgagccccatctctaccaaaaatacaaaaattagctgagcatggtggtacttgtctgtcgtcccagctacttagcaggctaaggtgggaggatctcctgagcccaggaattcgaggttgcattgagctatgattgcaccactgcgctccagcctgggtgacagcaagacccggtctcaaaaaaaaaaaaaggctgtatgcggtggttcacgcctgtaatcccaacactttgggaggctgaggtgggagttcgagaccagcctggccaacatggcgaaaccccatctctactaaaaatataggcaggagaatggcgtgaacccgggaggcggagcttgcagtgagccgagatcgcaccactgcactccagcctgggcgacagagcgagactccgtctcaaaaaaaaaaaaaaaaaaaaaaaaaatataaaaaattagccaagcatggtggcgggcacctgtaatcccagctactcgggaggctgaggcaggagaattacttgaaggttgcagtgatccgaggtggaggttgcagtaatccgagatcatgccacggccctccagcctgggcaacaagagcgaaactctatctcaaaaaaaacaaaaataaaaatattctgaagagtgagaagcggtttgccctgtactgcattgggtgggggaatggctgcagggggctgcttcacatgtggcttgttgggatgggtgtcctgcagtggaatagccccgccaggacttgggggaacagcatcgcaggccagggaaacagcaggtgcagaggcctcgcacacacccggcccgctgagtgccccctgcggaccggaaaggaccagtaggcacgtgagagttaggacgctgcccgtggaatgccgacttttctaaatttgaattacgcaagtagagcgtggagacagtgttcttggaaaaagggaaaccattacagatgaggaagagcacactgcccagcccgtcccttcctccagctctacctgggagcaccactgtcacttcagggtatgtctagccagacccctctggtgtttctgtacttaggtacatgctggtacctatagagaatacgtggcaccattatgggtggttattttttttttttttggaacaggtctcactctgtcacccaggctggagtgcagtggcacagtcatggctcgctgcagccttgacatcctgtgctcaagccatcctcctacctcagcctcctgagtacctgggacaacaaccacatgccaccacgcccaactaatgtttataatcttttgtacagatggggtttctctatgttgccaaggctggtctcaaactcctgggctcatgcgatcctttcacgttggccccccaaagtactgggattgtagacatgagccacctctcccagccacgtgcatatatttgttgaatgaaagtagctaaaggctggaagtggtgactcacgcctgtaatcccagcactatgggaggccgaggcaacatggcttgagctcaggagtttgagaccagcctgggcaacatggtgagacctcgtctctaccaaaaatacaaaaattagcaggcgtggtggtgcatgcctgtactcttagctacttggaatcccgaggtgcgaggatcccttgagctagggtagcggtggaacttgcagtgagcccacactgtgccattgcactgcagcgtgggtgacagagcgagaccctgtctcaaaaaaaaaaaagtagctaaaaaccagaatggagtgaatttcactgcacagtcatggaggggaccaggcagaggacagccctgggtcttggttttggagactcacagcctgcctggggatgcagggaccctgaagcaaggacatcttcctttggaggaagtggagatttgctccatctatataaagagtaataacagtaataggctgagaccctgaggctgggcagcgtgggtgtctatctgcgttggcttcgagggctgtaagatggggctagcagcgtcccctccagggtgggagtgaggccctgtatggcaacctgcggggtgccccctctgacttttgcttcctgcctggctgctcagtggccctggcaggggcaggcaccactgctctttctgttacaagagacctcctttggataaatctgaacacgctcccatggcagacctatggggcggtagacaagaggccagcagagctgtcccaggccctggtgacacctccatgcccaggtgaaggaggagcaggctacttggagcctgccctgtgacacactttcgcggtgatgagagcttctcagggctgcgatcctggcgggccagtcaagcgggcaggagcagccccagccagggtgaccctgcctgctgggtgatacgccctggcacgaccaggccagccctggggaaagcccccagggcggatcagggagggacacagctgtcctggccatgagacttctgtcttttgtatggatacacagggtccttctagagggtcacagcctccacccccgggaggcctaccagctggccgcgcagccaggatcctgcagccaccaggacactgcctttccaggttgttcttttcttttccttctttttttttttttttttgaggcagagtctcacagtgtcgcccgggctggagtgcaatgcatgatctcagctcactgcaacctccacctcctgggttcaagtgattctcctgcctcagcctcctgagtagctgggattacaggtgtgcaccaccacgcctggctaattttttgtatttttagtagagatggggttttgccatgttggccaggctggtctcgaactcctggcctcaggtgatccacccgcctcggcctcccaaggctctgggattacaggcgtgagccgccgtgcccggcccccaggttgttcttttctacatcaacatcaggggacagtgactgagagaggccacgagccactggctcagcttgacgaaggcttcctgtggtttgggttgatgtatctctctgtcttgcaacactgagttccccgttgtctgggcggaagccagtcagacggaagcccggcttctgtggtgcctgccctggtggcctggacaggttgctgggaagctcaggtcaggctgctttctgaggtggggaggccccacctggaatgtgctcccagcactgggtgaaaattgatgcacaggcttgattttttttttttttttttgagacggagtttcgctgttgttgcccaggctggagtgcaatggtgcaatctcggctcgctgcaacctccgcctcccaggttcaagcgattcttctgcctcagcctcccgagtagctgtgattacaggcgtgcaccatcacacccggctaattttttgtatttttagtagagactgggtttcaccatggccagactggtcttgaactcctgacctcaggttatccgcctgcttcagcctcccagagtgctgggattacaggcatgagccaccgcgcccttaaactcttttctgttaaaggagttattcaactgtttactcgttgtggagaaaaaaaaaaaaaaaaaaacaggccgggcggtggctcatgcctgtaatcccagcactttgggaggccgaggcgggcggatcacgaggtcaggagattgagaccatcctgactaacacggtgaaaccccacctctactaaaaatacaaagaattagctgggcgtggtggcgagcgcctgtagtcccagctactcgggaggctgaggcaagagaatggtgtgaacccaggaggcggagcttgcagtgagccgagatcgcgccactgcactcccgcctgggtgatagagcgagactccgtctcaaaaaaaaaggaaaaacaattcaccctgtccggaagtgcacagagtaaggctgggtgtcctttgcatgggaacgacctctagcagtctgtggctcttgccagattttttatatatatatatatatttctaggtgtgactacccccgactcatccaaccagtgagcctataagtctagtaacaaacgctcccgctccacagtccaaagtctcaacagaatgtgactgtcttgcaccaggtccctgctatatttagtgcctccaagaatgtttggcttttgttttctgttttttttttcttttgagacaaagtctcgctcttgttccccaggctggagtgcaatggcgcgatctcggctcactgcaagctccgcctcccaggttcaagcgattctcctgcctcagcctcccgagtagctgggattacagacacctgtcaccatgcccagctaatttttgtagttttagtagagatggggtttcaccatgttggccaggctagtcttgaactcccgacctcaggtgatccaccctcctcggcctcccaaagtgctgggattaccagtgtgagccaccgcgcctgggctggtgtggtttttttttttttttttggagacagggtcccactctttcacccaggttggagtgcagtggcatgatgtcggcttactgcaacctccccctctcgggctcaaaccattctcccaccacagcctcccaactagctgggaccacaggcgcgcaccacaatggccggcattttttttttattttcggtagagacagggtttctccatgttgcccaggctggtcttgaactcctgagctcaggtaatctgcctgcctcagcctcccaaagtgctgggattgtaagcatgagccacaacgccctgcctagaaataattttagatttagagaaaataaataagcttcaaatttacagaaagtacaaagataacacagagagctcctgtacatccttcaccagtgtcctctaattttatatttcttacaaccaagaaattaacctagctactcaggaggctgaggcgggaggattgcttgagtctaggagttaaagcccagctttggcaacataacctcttctctaaaaataaatgaatgaggccggacatggtggctcacgcctgtaatcccagcactttgggaggcagaggcaggtggatcacctgaggtcaggagttcaagaccagcctggccaacatagcgaaaccccatctctactaaaaatacaaaaaattagccaggtgtggggacatgtgcctgtagtcccagctatttgggaggctgaggcaggagaattgcttaaacctgggaagcggaggctgcagtgagccgagatcgcgccactgtacttcagcctggacaacaaaaggagactccatctcaaaaaataaaaaaaaaaaaatgaatgaatgaaattaaccttggtatactactattaagtgaggcctggcgggatgttgtggctcacactgtaatctcagcactttgggaggccaaggtgggtggatcacttgaggccaggagtttgagaccagcctagacaacatatcaaaaccctgtctctacaaaaaattgagtgtggtggtatacacctgtagtcccagccactcgggaggctgaggtaggagaattgcttgaacctgagaggccaaggttgccatgagctgagatcaagccactgcactccagcttgggcaacagagggggactctgtctcaaaaaaaaaaaaaaaaggaagggaggccaggtacagtggctcacacctgtaatcccagcactttgggaggctagattgcttgagcccaggagttttagaccagcctgggcaatatagtgagacctcgtgtgtagaaaaaaaaaaaaattagcttggcctggtggtgctcacctggagtcccagctcctctggaggctgagacaggaggatcacttgagccctggaggttgaggctgcagtgagtgatgattgcaccattgcacaccagcccgggcaacagagccagaccctgtctcaaaaaaaaaaaaaaaaaaaaaaagccaaagccagaatgtacagatttcttcaatttttcccatatgagactaatttaaaaaaaaattttttttttttatcgagatgggggtcttgctgtctggaagtatacatactgagaaattttatttttcaaacaaaatcaccccttttcctgtcttaggactggacattgcatctagttgtcggatctccttaagcctttttctggtctgggaagcaactcagcccttccttgttttttataaccttggtaagtcatggaatgtccctcaattagggcttatctggaattcttcatggtgagcctggggtgtgagttttggggaagaaggccattggtgaggtgcccctctcttctgtgaatctttttttgtttgtttgttttttgtttttgtttttttgagatggagtcttgctctgtcgcccaggctggagtgcagcggcgcgatctcagctcactgcaagctctgcctcctgggttcacgccattctcctgcctcagcctcccgagtagctgggattacaggctgccaccatgcccggctaatttttgtatttttttttagacggggtttcaccgtgttagccaggatggtctcgatctcctgacctcatgatctgcccgcctctgcctcccagagtgctgggattacaggcgtaagccacctcgtccagccatcttctgtgaatcttatcaggagtataggataccaacaagactgataaattattgacagtgataactgatgatgctgaccttgatctcttggctgaggtaggcttgctaggtttccccactggaaagttactagttttcttcttttcatactctatcctttgggatcatggaaaattttatttttattttatttttggagagtctcgctctgtcatctaggctggagtgcaatggtgtgatattggctcactgcgacctccgcctcccggattcaagcgattctcctgcctcagccgcttgagcagctgagactacaggcgcccaccaccacgcccggctaatttttttttttcaagagatggggtctcgctgtgttgctcaggctagtctcaaactcctagactcatgtaataatcctcttgcctctggctcccaaagtgctgggattacaggcattaaccactgtgcccggccttttctggcactattgaaaagaccatcctttctccctaaagttgcttttgtctggaattagttggccatatttgtgtgggtccaacctgaactgtctgttctgtgacgttgatgtatggctctgtcctttctccaaaaccacatatctttcttctctttttagatagagatgggggctgggcacagtggctgacgcctgtaatcctaacactttggaggcaggtggatcacttgaggtcaggagtttgaaactggcctggccaacatggtgaaactccgtctctactaaaaatacaaaaaaattagctgggcgtggtggtgggtgcctgtaatcccagctaattgggagactgaggcaggagaatcacttgaacacgggaggtggaggttgcagtgagccaagatcgcgctattgcactccagcctgggcaacagagtgagactctgtctcaaaaaaaaaaaaaaagaaaaaaagaaaaaaatagagatggggtctcacaatgttgcctaggctggtttcaaactactgggctggtgatgctcctgcctcagccttccacagtgctggcattatgggcgtgagccaccacgcccactcatttctatattgctgtagctttatagtaagacttgaaatcaggccatgtgagtcctcttttttcttgtttctcaaaattgttttgtctagtctagttcctttgcctccacatatatattttagaatcagcttgttgatttcatagaaaagatcattgtgtattagtacgtggaaagccacggtattagttttttgtttgtttgtttgtttgtttagacaaagtctctctctggcacccaggctggtgtgccaatagtgttgggattacaggcgtgaaccactgtgcccagctggtactggtttttataactgtgtattattccatccactgtcactacttccccaggaccagtacagtttctgcctcctcagtcttgcacctttaaccttgtcctcacccccaggctgttctccctgcagtggacagagggagcctgttaagaatatccttcctagctgggcgccgtggcttacgctgtaatcccagcactttgggaggccgaggtggaaggatctcttgagcccaggagtacgagaccagcctgggcaacataacgagacccccatctctacaaaacatttaaaaattagccaggcatggcagcgcatacttacagtcccagctactcaggaggctgaggtgggaggattgcttgaacccaggaatttgaggctgaagtgagctgtgatcctgtcagtgcactccagccggggagacagagggagaccctatatccttcctctacttggaatcctccctggccctcagttccctcagggtaaaaatgaagtcgtccctgaggctccatgatgttctcatgcaggtgaggcgctgtcctacctcatggctttttcacatgctgcttccactgcctgcactgcccttcccccagataaccctgtggctcatttcatcagcattctaaggcctctgcttaaaagcctccttctcaaaaggctctccccctggccactctgctcaaacgccccaccctgttctctctgtccccttcccctgcttaatttttcttggaaccacttgtcattcctgtcattgttccacctatgcgtttggtttcttgttttctttttttggggtggagtcttgctctgactcccaggctggagtggagtggcgatcttggctcactgcaacctctgcttcccgggttcaagcgattctcctgcctcagcctcccaagtagctgggattacaggcgcacgtcaacatgcccgtatatttttgtatttttagtagagacgaggtttcactatgttggccaggctgatctcgaactgctgacttcaggtgatctgccagccttggcctcccaaagtgctgtgattacaggcatgagccaccgcacccggcctatttgtttgatttctctttctgtctccccccactagaaggggaatgccccatggtagggcggtgcccctggctgtagcgcagtcccttgcatggtgcctggcatgcgataggtaatcggggcacccatctccctctcgggatgcactcattgatgtacttgtcaatcactgagcaagacccactcagcaatgtctgctgagcctgctctgtgccaggctctgacctgaactgccacccttctggagtcaaacaggcctggttgccaccaagaggagttaggcctggcagaggagacaagcattagtctcacaacagaaggaagtaggccggacgtggtggctcatgcttgtaatcccagcactttggaaggccgaggtgggcagatcatctgaggctgggaggtggaggttgcagtgagccaagatcacgccgctgtactccagcttgggtgaaagagcgagactccatctcaaaaaataaataaataaataaataaataaaaaggaagtggagactttcattgagatcagtatcaaagggcacgaggtggcagggcatggtggctcacgcccatagacccagcactttgggaggctgaggtgggaggattgcttgagcccaggagtttgataccagcctgggcaatatagtgagacctcatgtcaacaaaaacagacaaaacaaaaaaaacaggggagggagggctacaggagggtgggatgaggactggccacagttggaggccaggcccttcctggggatcccagcggttgttactctttaagaaggacctggcctggtgtggtggctcacgcctgtgatcccagcactttgggaggttgaggcgggtggatcacttgaggtcaggagttgaagaccatcctggccaacatggcaaaaccccatctctatgaaaaatacaaaaaaaagttagttagctgggcgtggtggtgggtgcctgtaatcccagctacttgggaggctaaggcaggagaagtgcctgaacccaggaggcagaggttgctgtgagctgagatcgcaccgttgcactccagcctgggcaacaagagcaaaactccatcgcaaaaaaaaaaaaaaaaggctgggctcagtgactcacgcctgtaatcccagcactttgggaggccgaggtgggcggatcacgaggtcaggagattgagaccatcctggctaacacggtgaaaccccgtctctactaaaaatacaaaagattagcggggcgtggtagcgggcgcctgtactgtagtcccagctactcaggaggctgaggcaggagaatggcttgaatcctggaggaggagcttgcagtgagccgagatcacgccactgcactccagcctgggcgacagagcgagactccgtctcaaaaataaataaataaataaaagaaggacgtgttcccttgttcttctatggggacatggggaactcctgtactgttttattttcctgaaatatttttattgaaatataattcacataccataatacctaatccttttgaaatatactattcagtggattttagtatattcacagttgtgtaaccagcaccactatctgattttgtagcactttcatttcccctaaacccatacatatgaagcagttcctccctcccccagcacctggaagccactaatgtcctttctgtctgtgaatttgccaattttggatatttcctataaatggaatcttacagtatatggccttttgtgtgtggctttgtttatttagcatcatgttttcaagattcatccatgctggttgggtgcagtggcgcacgcctgtaatcccagcatttgggaggctgaggcgggcagatcacttgagggcaggaattgatgagaccagcctgcccaacatggtgaaaccccttctctactaaaaatacaaaaattagctgggtgtagtggcacatgcctgtaattccagctactctgggtggctgaggcacgagaatctcttgaacctggggggcaaggttgcagtgagccgagatcactccactgcactctagcctgggcaacagagcaagactctctctctctctcaaaaaaaaaaaaaaaaaaaaaaaaaagaattcaccaatgaagccacctgggcctggacttttctttgtgggacgttttttgaatactaattaaatttcttgtacatctattgagtttttctgtgtcttcttgagtcagtttcagtaatttgggtctttctaggaatttgtccatttcatctagggtgtatttaatttgttagaatagtattcccttatcatcttttttatttctgaaaggttggtagtgatgtctcctctttatttctgatttttgtaatttgagtcttatctctttttctcttggttaatctagctaaaggtttgtcagtttggttgatctattcaaagagcaaattgtggtggtgttaacttctctctccatttttttagtctctttatttcttctctaattatttccttcttttctctttggatttggtttaccctccttttctgaggttcttgaagtggaagattattgaaatctgaaagtatttgaaatctttctcttttttttgttttttttttttgagacggagtctcgctctgtcgcccaggctggagtgcagtggcacgatcttggctcactgcaagctccgcctcccaggttcacgccatcctcgtgcctcagcctcctgagtagctgggactacaggcacccaccaccatgcctggctaatttttgtatttttggtggagacggggtttcaccatgttggtgaggctggtctcaaactcctgacctcaggtgatccacccacctcggcctcttaaaagtgtggggattacaggcgtaagccaccgcgcccggccaaaatcttccttctttttaaatacagttgcttacatctatgaatttccctgtaaacctgctttagctgcatccataagttttgatatgttgtgttttcattttcatttatctcagcatatcttctcatttctcttatgatttcttctttgatacataggttatttagcagtatgttcatttctatatatttgagaatttctgaaaaacatctttcttgtgttcatttctaacttcatttcactgtggttggaggaactactttgtatgatttcaatctctttaaaattattgagtcatgttttatggcttggcctcgaatacggtgtgtcctggagaatgttccatatgcacatgataagaatgtgtattttactcttgggtggagtgttctgtacacatctgtcaggtcttattggtttcgtattttctatttccttgttatcttttatttggttgttccatccattattattatttttcttgcctgataccaatgctgatatccatccatgattgaaagtggggtattgaagtctccaactttctttctttcttttttcttttctttttggagacacggtcttgctctgtctcccaggctggaaacgtggtggcatgatcatagctcactgtagcttctgtctcctgggctcacatgatcctcccacctctgcctcccgagtagctgggaccacaggcgtgtgccacacccgactaatttttgtattttttctagaggtagggtcttgctatattgaccaggctggccttgaactcttgggctcaagtgatcctctcatcttggcctcccaaagtgctgagattacaggcatgagccactgtgctcagccccaaattggccaatatttctttcttttttttttttttttgagacagagtcttgctctgtcgcccaggctggagtgcagtggcgcgatcttggctcactgcaagctccgcctcccgggttcacgccattctcctgcctcagcctcccaagtagctgggagtacaggtgtccgccaccatgcccggctaattttttttgtatttttagtagagacggggtttcaccgtgttagccaggatggtctctatctcctgaccttgtgatccacccgcctctgcctcccaaagtgctgggattacaggcgtgagccaccacgcctggccaatatttcttttgttctgtgctttttccttcctccctcccttcctctttaccttcctctttaccttcctctttccctccctcccttctttccttccttccttcctttttgttcttgttcttttctttttcctctacccttctttcttttccttctttctttttttctttctttgtttttgcttgattgcagcatcatgagagagtcctgtgcttttttatagctgcaagtattcctgggtcgagcctactcccactaacactgatcactctcccccttgaatttttaggttatttctagtttttcccctcctgccagagacttgggggtccgcaggcttgtgtgtctgctatgctcagggtggataccctgcaagggagtgccatgttgcatcagaagtggatttagagtgatgttgccaggcccaccaggaaaggctgtgccaaggctctttgctggggtgccaagaagaagggtctgtgcctgttgtggtgccaggcattgacatccttcactcccacccccgtcaccctcatgaactagtgaactagtcctgtggaatagggccttatgcgtgctagaccctgggtttgtcctgctgacaaccccatagtgtaggtgctgttatcccaatttcatagagaaactgagggctggggaagtggcagccttcattcagttcctgccgtgaggctgtggctgagctgccaggctgcagagtcttcacccaatgatcttgctcagttgtccccatgaggaagctgagcctggccttcctgtctctggagtccaaggtttcctttccttgtgtgcccctggaagtgctgtgtggtgaccgggatggtgcctggcagatggagattagacgcaggttggattggtgcctcattggtcaggagggctgctcttagctgtgtgccaatagaccggatgacttaatctctctatccttggtttccccatctgcaaaacagggttggccagagccctgtgaaggtggaagaaggccctgtgtgcctggagctttgtgcagtgccctggagatgctagcttgtttttctttcttttttttttttttttttgagacagagtctccctctgtcatgcaggttgtggtgcagtggctcagtctccgctgactgcagcctcaacctcctgggctcaagtgatcctcccacctcagcctctcaagtagctgggaccacaggcgtgtgccaccacgcccggctaattttttgtagaggcgaggtttcatcatgttgcccaggctggtcttgaactcctgagctcaggtgttccgcctgccatggcctcccaaaatactaggattacaggtgtgagccaccacgcccggccgtgatgccagcttcttttgccgtgcagctagcatttgctgaacacctgctgtgtgccagatagtgtgctggaggcagggcagtgaacaagacagacgagatccctgtcctgtggagctgatgctctagctgggggcctgaggggtgggaaggaagcacaggtgctcgggtgagaaaaaacatcatgcggccaggcatggtggctcacacctgtaatcccagatctttgggaggctgaggcaggcggatcatctgaggtcatgagttcgagaccagccttgcaaaaccccgtctctactaaaaatacaaaaattagccaggtgtggctgggtgtggtggctcacacctgtaatcccagcactttgggaggcggaggcaggtggatcacaaggtcaggagatcgagaccatcctggctaatatggtaaaactccgtctctactaaaaatacaaaaaattagccgggtgtggtggcgggtgcttgtagtcccagctactcaggaggctgaggcaggaggatggcatgaacccgggaggcggagcttgcagtgagccgagattgcgccactgcactccagcctgggtgacaaagcgagactctgtctcaaaaaaaaaaaaaaaaaaaaaaaaaaaattagccgtgtgtggtggcgtgcgcctgtagtcccagctacttgggaggctgaggcagcagaattgcttgaactcgggaggcaaggttgcagtgagccaagatcacgccattgcactccagccagggcagcagagcgagactgtttccagaaaaaaaaaaaaaatacaaaaattagccagacgtggtagcatacgcccgtagtcccagctgcttaggaggctgaggcaggaaaatcacttgagcccaggaggcggaggttgcaatgagccaagatcctgccactacacttcggctggggtgacagagccagactccatctaaaaaaaaaaaaaattctttaaaaatcaggcacacagtgtgatctgacttgcagttttccaagcctgtggggcagggagcctgggggaggctttgccctgagatgggagacttggcctcaggacattagagcgaaacagaggaggaggggatgggtctggatatccaaggcaggatctgccgagagatacgctgtgggggtgggacaaagacctcaagaacgggtccgggctgttcctgtcacttgtgacattgtggactgagtctgcctggatatttccttatgggctggctccccatcaccccgggagagtctcggggtggagggaactagaacgtgtttgcctggaggtcactacctactcccctggaaggaaggggctccaggaggctggctgtggaatgcagactgtgggtggtgcccggctgcctgcctctagttcacttgggccctcagggtggtacagagctggaaatccatacatggctgaccaccctgtaagggctgcagacacagtgagcgttcactttgccctggcaactggaactgtctcctccagtcctcaccacaaccgttttacagagcaggacacctgttgcaagatgggagagactttgctaacaaggtcccacagctggcactcaccaggctggctggggtactcaggccaccccttgcagtggggagcagttaggatgacaccgaggacacccctaggagggcggagttgtgagctccaggaccccacatttgagcagtttccccgtcactcttgaaaatgctgctgggccggccagtttctttggggtttctcagtactgctgaaagttacaaggtcaacactggcctgcaatcacagttataaaaaagttataaaagcctgacattcaaatcacgttggagactataaaacagcaagtttttcatttgcacacctcacatgacctcaagcctgctgtccatacacaggaaatggggatgtgcggaaaaaaaacccgaagtggaggacatcatcccccacgcataatccagtccgtgcatcgcacttgaccttcggcactgcagcctgcattgctccccggactagctcccaagattgatttagccagttccctgccagtggacatttaggtcattatcggttttcattccacaaagtactgccctcagggagtcggctgtccttgccaaaccactgcattaatatgtttctgggtgctggggaaagggcgcttaagacccctgccctcaaggtgttgatattctagttgggactgttagataaatgagcaattaggctgggcacgcttgaaatcccagggctttgggaggctgaggtgggaggatcgcctaggcagcatatcactacagaaaaacacaaataaaaaaagttagctgggcgtggtggcaagtgcctgtagtccgagctactcaggaggctgagggaggaggatcgcttcagcccaggagtttgaggctgcagtcagctatgattgcatcactgcactccagcctggatgacagagtgagatcctgtctctgaaaaaagaggtgcaaataaaccagaaaagtaccaactagtgggcagtgctgtgtttagaaggaaaacagggcaacatgaaggggaggtgggcatcagtaggggacagacctctctgaggaggtgacatctgagttgagtccctggtaaccggagatagccaggattgtggaaatacttggaggagatgagatggtctttcgaagcaggaggccagcatgtgcaaaggccctgcgacagcaatgtctggcctccttgctgtttctttttatttcattttttgagacggagtctcactctgacctatgctggagtgcagtggcatgatcttggctcactgcaacctctgcctcccaggttcaagcgattctcgtgcctcagcctcctgagcagctaggagtacaggcacacgccaccacaccccactaatttttctgtatttttagtagagacaaggtttcaccatgttggccaggctgctctcgaactctggacctcaggtgatccacccacctcggccttccaaagtgctggcattacaggtgtgagctaccacgcccggcctttttgctgtttcttgaccaccaatgtggctggaggcagggagtgagggggtggtgggggaggagggcacggaggtgacagggccatggggggcacttgggaactgtcaaaccgtcaaatgttatgagcagaggagggtcatgttcttacattgtatcgagttttcctttttgtttttttgagatggagtttcactcttattgcccaggcaggagtgtaatggtgtgatcttggctgactgtaacctctgcctcccaggttcaagcgattctcccacctcagcctcccgagtagctgagattacaggcatgcaccacacctggctaattttgtatttttagtagagacggggtttctccctgttggtcaggctggtctcgaactcccaacctcaggtgatctacctgcctcggtctcccaaagtgccgggattacaggtgtgagcaaccgtgccggctttttttttgttttttgttttttttttttttgagacagtctcactctgttgcccaggctggagtgcaatggcatgatctcacaatctcagctcactgtgacctctgcctcctgggttcaagcggttttcctgcctcagcctctcgagtagctgggattacaggtgcccaccaccacgcctggctaatttttgtatttttagtagagacggagtttctccatgttggccaagctggtctcaaactcctgacctcgggtgatctgcccgcctcggccccgcaaagtgctgagattacaggcatgagccaccgcactcaaccaattttttttttttttttagtagtagagacagggtctcatcatgttgcccaggctggtttcaaactcctgggctcaagagattgcgtgccaaggtgctgggattataggcacgaaccactgtgctcagcctgagttttactttgattcgatggggcgaatgttctcttttgggtatcatggtaagagtttcacaaacccttccacctcctctctgaggcaggtggcatcattcccacataacagattgggaaactgaggcacaaagaggttacctgacctgcccatcttgtccagaaaggaaatactggattccagccagggcctggagagtcccagagccacgatcacgaattgccacaggtcacctcctgcttttgctcccagcctgttgtgtcccttggatgagaccagggagcaggtgatgccacggcttgagtgccaagggcgggcctcgagccgggagctgcaggattcctgatcagggaggggctgctgggctgggaatgttggggaggagtgaggccaggagtggattgtggaagtgagaagtctcctcatctgtaaaatggcagatttggcccattgttctgcaagcattggtcatctgcctcctgcctgggtgtgtgttgggtactggggagagagcagagaaggggccgatacgggaccctgcgcccatgaggctgccactctaataggatgttgaggtgggggcagggacagactgcagctgggtgaacacatcaggaacccggaagatgccagttgtgagtggcactgagcattgagcgggttgatgtgtgaaagaaggggagcagcttcctatggcggggggagggagggtgcagtttgctgggagctgcccgcctgctctgttaatgctgcaggaagaaggttccaggctgagggaacagcctgggcaaaggccctggggcaggacagtgtctggtgtgtttcgggaacatggaggaggcatatgtggctggagtaaagccagcaagacagagagtagggggaggtgaggacaggaaggtgacaggacaggtcgtgcagggcttggggggctgcagggaaaagtctggcttttattccaagtgaagcgggagcccaaggagggcccataacaaaggggtttacagtgacatggtgtgcacaggcaccttgtggctgctttgtgggaggcagattgtggggaccaagggcacgactgcactggtgtaggcaggtgacagtgggacacgctgacagccttggacgtggagggaattgagcagaatcaggcctgatgtggaggtgaaaccagcaggactcgcggctggacaaggcgggtgggtgagggccaggggagccccaggtctgcagcctcgtgaggggtttctcccctccctgccctttggggtgaccacagggatgcagtggcacctacctgcggacactgtgtgggccgagcactgtaaggcttgggcgtccttgctgggtgaccaatggctattgttggaaggatgaggcagggaccgaggtgggcagaggagactgggcatgggtccccacttctgctccaacagagcgacagagaagcccctgaggtgggtgcgggtgactgcgggtctgcctcattggtgtcccacccacattcgtgtcctggctctgctcctccctcgctgagcgtcctgggcaagtcctgagactgaacctcagtccacctgtctgaaatgggacttttggccctggcatccttgtgactttcaacccctctggggttgtcagaggatttgccgctatgttgcccgagatggggttagagacagcctgttgggtggccagcgttccttgtgtggctcttatcagagtcctgagagaagaggccagggtggaaattggccctggagtgtgggctcctgccgaagcctcttcctgtggccagtgccatgctgaaggctggctgtggtgtcacgtgagccctcccagccacattcaggctcaaagagactgtgctgagcatatggtgacaaggaagggatcccagcccagggtcctggccaggccctgccagcaccaggctgcacaggtgaggggtggcttgccctggggtgctggctctgggccacactgctgactcaccctctgtgggcttatctgttgattctccctcccatgggaaggctctgggtttgagcctgcatcgttcctgcacgtagccgtccccaccctcataggggctggaagtcaaaaggcgcctggtggagccttgtggtctgttcaaaaaacggtaaataaacagcctgggcttctgatctgctggactcaacctggcacctctcccatcgctgctgggtgctgcctcccagctgcacccttccctgcctgtcccctaccgccttcctggagcgcttatccccttccagggagaggtggcccactttagagctctgaaacctgctctggtggggtgaagtgacttgagccaggccaagccggtggctgggccctctgtggcagactggaagtgtcctcccatttcatggatggccaagtcagtgcccagagaggggtagagacctgtccagggccacacagcccaggaggggcggagctcgactttgaacccaggctgcctggctccacagtctggattcttcttacccattcaacaaatacttaatgagcacacactgtctggcaggcactgttctaggtgctgaggatctagcagtgaccaggccaggtgcagaagtcttggcgtgtcacaggactagaccttcatcagaggccgttttgctgggagtgggaaggggtgtgtatttgggagggaggggcgcaagccatcacacctgcccatggccaggtaggcagggcctatgggagggtttcctggcagagggaacaccccctgcaaaggcctgaaggccagcagtgccagagagaactcagaggaggcaggtgcagggggtggggctggggaacccggtcagcactgggactaggactggacaggacgggctaggaccagtcacttggtttctgcaagagagaagcttggaggcaggatcttcattttagaaaggtcactggggaaggtgggaggttgggccaggaccctggggcctggcctgggcccatggataggaggccaggtactgaaatgatgcaatagtactaggctaggtgcagtggctcacacctgtaatcccggtgctttgggaggccgatgcgggaagattgcatgaggccagaagtttgagaccagcctgggcaacatagcgagaccctgtctctgcaaaaaataaaaaaattagccgggcatggtggtgtgtgcctgcagtcccagttacttgggaggctgaggtgggaagttcactagggtccgggagttcaaggctgcagtgaggtatgattgtgccactgcactccagactgggcaatataggaagatgccatctctaaaaaaaaaaaattagccaagcatggtgacatatacctgtagtcatagctactcaggaggccgagactgaggtttgcctgtaccctggagtttgaggctgcagtaagctgtgattgtgctgctgatgcagcctgggcacagagtgagatcctgcctctaaaataaataaggccgggcgcggtggctcatgcctgtaatcccagcactttgggctgctgaggcaggtggatcacctgaggccaggagttcgagaccagcctggccaaaatggcaaaaccccatctctactaaaaatacaaagaaattagccgggtgtggtgctgggcgcctgtaatcccagctacttggggggctgaggcaggagtaagctgagattgcgccactacactccagcctgggtgacaaagcaagactccatctcaaaaaaaaaaaaagttaataaactacttaattgtgcatctcctgtgtgccagccctactctatgctttggggatggaatgttggaggatcccaccttggggagctgtgtgtgagctccccacacagctcagatgggggtatggggtctgtatgtgagccagaacaaaatgcagctaagtgacatttagcatgtgttagttccacagagaaaaatgaggcatggggggtggaggtgggagaggtgtgaatgggggtgagagaagtctctgaggaaatgtcattcgagcggaatcactctgagcttggcaaggttaccctgtcttactgacgggaaacctagaccagagaggccaggaagcccgcccaggatcacacagcacagaggtggccaagcagggactggaatgcagggcagcctgggtgcacagagggcactgtagcagcagcaaagggagaggagaggagtaggtagatttcagtactctcagaatgcggatgggatcaacgaggaggaagtagatgacggaggctggaaagtcacttcctgctaagtggccagtgtcagtgttccaggcagagctgcttgggaggtggtttctggaaggctccaagtactcctgctgctgtgtcccagaaaacccttagggccaggcccctgctcaccaagctcctaggagacttctggggggctcatttcggaggcagtccaggccgagggtgaatgttggtgccctttgcatgcagcagtctgggaacttttagaagcaaaatcggataagtcccagggctcctggcgctctcagcctggcatgcgaggccctctgcgcctgccctgccctgtcctcaaactctcccctgagagctgcgtctccgtcgcccaggctgtgccctcctgtgcccgacttagaactgttcggaataacactcaaaattttaaggaaattaaacactcgaacaaaggatttttagcaaagcaattttacttctgtacagaggggtgcttgtccttggccagtcgccatgagagcacacctgaacaaagggacacgagagcctttattcctgatgcaagtcctgctcctgtaccctctccccattggccggggtcgggtcatacaatctaaaccaattttggttggctaaacatttgaatttttgtagataaggtgggcacgtaaaagagagaggaaaggggaagggatgtctgtagtgaactagaaagttagtcttctttgtaaataagggaaggaatgtgagctggtactggtaacgcctggtactgtggcgtgcctgggcatctaacaaagccagaaaggaaaaaggaaaaaagagtgtgtatgtgtgtgtggggtactatgaattaaaagattgatcagcctgtttgaagagaaacctcatcatattccacactacaaataccccaggcccagaaagtcaccttctcctgcctgtgcccacagctctgtgttctcttgggcgtcactcccgccctatgttctgaagctgtgattgtccgttgtctgagctgggcgctggtggcgtctggggcatcaccattgtcctcacagtgcctggcgcctcagacacaaagtggagtcacaggacagcacaggccacaggcaaacaccagaggtccaaagccgggccctggctgggagttactggagggtctgcctaagatgtgtttgctcagaaggccaggtgccctggtggttagacagctcaggccctgtgccttcagtccatgttcatgccacccccagatgctgtgtgaccctgggcaggcccccaccctctgggcctcatttgcatctgtaaaatggagccagcagacccattttaatggatcctgtcatggttaaatgggttaataggcaggtgcagtggggtcattgcagggagttcaagaccagcctggacaccatagtgagaccttgcctctacaagaaacttaaggtggcctggtgtggtggctcacgcctgtaatcccagcactttggactccattgcactccagcctgggtgacacagtgagactctgtctgttaaagaaacaaacaaacaaaaaaaccaaaaaacttaaggtggtggtgggtacctgtgatcccagctacttgggaggctgagacgggaggatcacttgagccctacagttggaggttgtagtgagctgtgaccttaccactgcactccagccagggcagcagagtgagaccctgtctctatttaaaaagaaatcaaaaaggttaataatcatgaaaagttctcaatgccttgcttggcatagagtcagtgttgaatagctattagctactctaatgttttgaactcagtaatgcgtgtgtatgatgcggaattcaaagatgtcggaaaacatgcagtggctccttccccaccaggccccagccgccccgggtcctgttttgtttccctttggttgtcttagtcacaaagtacagactttcttctgtaccttttccttccccttcccccctcccccttcccttcccccccccacttccctttccccttcccccttccctttcccttttccttctcttcttcctttccttttctttcttcagtaaaactgatcactacaaaccttttctttttttctcacttagtacaccaaaaagggagttacatgtctagaaaggacaggctctttttgtgtgtctgttgctgcatagcagcatggataggccataatttatatataaatacacgtattttattctattttaaaggtttttgttttgtttttttcccccgagacggagtttcgctctttgttgtgcaagctggtgcaatggcgcgatctcagctcattccaacctctgcctcctgggttcaagcgattctcctgtctcagcctcctgagtagctggcattaaaggcacccaccaccacgcctggctaatttttgtaattttagtagagatggggttgcaccatgttggccaagcaggtctcgaactcctgacctcaaacgatccacccacctcggcctctgaaagtgtttggattacaggcgtgagccattatgcccagcaatatatcttatatataaggtgattgaaaatatatgttttcaaaaagaaaacatattttcagtcagcttccttaggttgaacgtaatttatatttaactagtcccctgttgctgggctttaaaattctttgagatctgaatttttcgtcttattgagaaactaacagggttgtaacaattctgtgggcaaattttaatggaatgtccaccctgtacttttgtatctgaatcttcacgaacatgttctccttgacttgtgaccttttcctgagatttcagttagatatagttaatcgcttaagtctttttttttttttttgagacggagtctcactctgttgccaggctggagtgcagtggcgctatctcagctcactgcagcctccgcctcccaggttcaagcgattctgcctcagcctcctgagtagctgggactacaggcaccctccacctcgcctggctaattttttgtattttagtagagacggggttttaccgtgttggccaggatggtcttgatctgctgacctcataatctgcccgcctcagcctcccaaagtgctgggattataggcgtgacccactacaactggccaatcgcataaatcttaaacatataccttgattttcttgtcttcttcttcttcttttttggagacagtctccctctgttgcccaggctggagtgcaacggcgcaatcatggctcactgcagcctcagtctcctgggctcaagtaatcctcctgccacagcctcccgagtagctgacactacaggggaatgccaccatccgcagtgaattactttttactttttgtagagacaggggctcgttatgttgcccaggctggtctcgaactcctgacttcaagtgatccacccaccttggcctcccaaagtgctgggattacaggtgtgagccactgctgcaagttttgattttctaataaatgattgtaccttggtacctactggctagatcaagatgcaggacttcttcatggtctcagaaagtccctcctgccccttctagtccatttcccgaaagggaaccactgccctgatttctatctccagagactagctttgccggttcaagttcaagtccaccctgtgactcagcaagagaaacaaggacatgtgtctacaaaaagcgcatatgagaatgttcagaacagctttatttgtaataaattcaagctaggaagaccccaaatgtccatccaatggtgactagacgaacagactgtagtccatcagtgcaatggacagattcgaccacgaaaaggaatgaacgtcagacacacgaagcagacaggatgtctgtgattgcatcacatgctgctcctgtgttgttttatcgttgacatcttccacttgcacacttcaaaaatagtcattgaaaggatggagcaggggcactgttgtgaggggcacgtgctgtcaccgccgctgctggtgattcagtgtctagccagcgccgcatggtttctgagatgctgcatttgtcttttttttttttttgagacagagtcgttctgtcacccaggctggagtgcagtggcgcgatctcagctcactgcaacctctgccttccaagttcaagcggttctcctgcctcagcctcccaagtggttgcgattacaggtgtccaccaccacacccggccagggtttttttttgtctttttttttttgtattttgtattgtttttgtttttgttttgagatggagtctcactctgtcacccaggctggagtgcagtgatgcgatctcggctcactacaatctccgcctcccgggttcaagccattctcgtgtcttagcctcccgagtggctgggattacatgcttgcgcccccacacccggttaatttttgtatcttaagtaaaggcggggtttcaccatgttggccaggctggtctcaaactcctgacctcaggtgacccacccaccttggcttcccaaagtgctgggattataggcgtgagccactgtgcctgacctgagacactgcgtctctgatgtgcaagatgccaagtgtccctgcccctcaggtccctacctgtgagctaggtggcctggggctctggtagggccagggccaaggctacttgtggcgttcatgaggttaataccctgggacagcctggtgtccactgtgactactgtgacggaaagacaaggggccatgctaagaggtgactttggggtctgtcacctgcatgggggcgcccgctcgctgtttccctcgttcagttcactccgcctcccaattgatgtagcttgttccctcagtccccctgctcagagaaccctctccaattatcccagcccccaacccctctcacccctgcagtatgtcttcctcgcacccacccccgtcagaatgttggcgccagtgtcaccagcacctccccaagtgctcaggagccagtgagaaaggttcgctccttttcatgcaagccatgagctgtgatgttgtccaagtctcgtatcctgtttgtgcctcaggctcctcatcagccgaatgggaggctgacggaaagggattagagctcaggcatcagcttgaactggggcacgtggcgtgacaggcctagtgcctggcaggcaggtccctcgggctctttgtcatcctcaggagtgtggctcgaagacaggtagcatcccaggcctggagagctgactgtgctgcctgtggctgcagagacaggatgcagaggccagggctcgtcccccagagccttgcaagtgtctgtagggcgctcccctctgtcttgcctcctcccactctctggctcttctctatccggcctgccctcaggttgtgaccatccacctcccaaactgccctggaatctgcctacggcctgtccactggcctccgtacccctgcctgccatctctctggtttcgcccctgatgtcactcacatgaaccacagcggtcacccccacctgcctcctgctcctgccctctcctctgccctgcatcagccagaggggggtttaaaagcttacatttgttaataatctggctaaagcttaacatttattgtaatccatccctaaatcccagctggtggcattgctctaacagtgatgaccagcctcctcatcataatccccagcactgccaccctcaaccccccagcgctgaccactggaggctgcttctaaaacttcagccctgctctgccagcagcgcccctggggggtcttcgtagccctgttgcccatcacgatcccttttctcatgcagtccaggctgcaagcccccgccgagggcttgggctgacttgttgtgtagtcagtgctgtgtctctgcacccagccagaagtggtgggacagccccccggctgacgggctagaacccatcatccagggtgtgtggaaagagcacatctcccccccgacgccagccactgggtaatacattcccaggaatttccagtgcccagccccagctgagaaacaggtcttctggaaccctccagcaccctcatcaggggttcccagcatgggtagggccacctgccagctgggaatgattgtagtgctagtgacactcactcagggacccaggatgctgtctcgttctgtacagggcacagctgtacagtaccaattgccctgtgtcctgtacaaattttcaacgatccaaacatctaggtgcaaaacctgtttgaaattctctgtgttggccaggcacggtggctcacacctgtaaacccagcactttgggaggccaaggcgggcagatcacctgaggttgagttcgagaccactctggccaacatagtgaaaccctgtctctactaaaaatacaaaaaaattagccaggcatggtagcgcgtgcatgtaatcccagctactcaggaggctgaggcaggagaatcgcttgaacccgaggcagaggttgcagtgagttgagatcgagccactgcactccagcctgggcaacaagagcgaagctctgtctcaaaaaaaaaaaaaaaaaaaaaagaaaaagaaattccctgtgcctagaacctttcaccattttgtatgaaacaacagaatttcctttcgagcctttaatgtaccccgagcccactgtttctacttcagtcctcactggaaagctttcattttcctttctgagtgtacagggtgacttcctgtcttcctccttgctggaatcctggtgtattcactgtaagtcggagcaggctactccctctatcttctggggtggttgtgcctgagtcttttccattgtgaaagacatggaattgattcctttcttccttccctccttccttccctccttccttccctccctccttccttccctccctccttccctccctccttccttccctccctccttccttccctccttccttccctccctccttccttccctccctccttccctccctccttccttccctccttccttccctccttccttccctccctccttccctccctccctccttccttccctccctccttccttccctccctccttccttccctccctccttccttccttcctccctttcctccctttcctcccttccctcccctccctcccttccctcccttcccttctttccttgatggagtcttgctctgtcgcccaggctggagtgcagtggcacgatctcagctcactgcaacctccgcctcctgggttcaagcgattctcctgcctcagcctcctgagtagctgggattacaggcgtgtgccaccacacttggataatttttgtatttttagtagagacggggtttcgccatgttggccaggctggtctcaaactcctgacctcaagtgatccgcccacctcggcctccccaaagtgctgaggttacaggcctgtgccactgcacccggccaggatatgtacttttcttaaacagctctgtcgaatagtaatttacattccgcgaaatcgatccatttcagaattagtggtctttagtcattttacagtccttttttttttcccacacagagtctcgctctattgcctaagctggagtgcagtagtgcagtcatggctctgtacaacctcagcctcccgggctcatgccatcctcctctctcagcctctctagtagctgggatcacaggcgtgggccaccacgcccagctaattttagtttagtttagtttagtttagtttttgtagagatggggtcttactatcttgtccaggcttttacagttaattttagtaaacatcaccatagtccagatgtagaacattttcatcaccccagaaagctccttcccctccattggcagtcacccccgttcccacatccaggtatccactgatctgccttctgcttctgtagatgtgacttttctggacatgaaacacatcctattttgtcatcaataactttcctcgtattttacccatatacatgtggcattgtgttgatttaaaacacataggaaatgtgttgatctcctgggtatgggggaaatttaacaaatacatgccagggaatgggccccctgggagtacggggggtggggcacagcctgccagagggaaatggttctggtcactatgaccttccatgcataccttcctgagctcttcaggcctcaggaccctccaagaccagagcattccccagggcccagctggggttggtgcctttgctgaggtcgcccaaattgcaagacagagttgctccaccacatgtggtcacacttcctgcccctcgatccggacgcaagagtaatttctgtccctctccccccctcacagggacttccttccccgcggttcaggaatcgtcacccggcggcctctcattctgcagctcatcttctcaaaaacaggtaaaatggggcggcctgaggttcagcaggaagtggatgtggatgtgtggttgccaggagttgctgggggcggagggtggaacttgggtcctgggctgtcattggacattgaattcacgtgttccacatgtgtgaggaaattgaaaaacggctcagtgaacacttacacacccacactgcaagccctcagctgtgaccagaatgccaggtgccatgtgtgctttcttttttcttttttttgagacagagtctcactctgtcacccaggctggagtacagtgatgctatcttggctcactgcaacctccacctcccaggttccagcgattctcctgcctcagcctcccaagtagctgggattacaggtgtgaccctccatggccagctttttttttttttttgtatttttagtagagacagggtttcaccctgttggccaggctggtcttgaactcctgacctcaagtgaccctctcacttcggcctccctaagtgctgggattacgggcatgagccaccacaccggccccatgtgtgcttttcatgtgttatagataacccgattttgctgaacgctttcaaagtcagtagcagacgtggtgacacatccatccttcacgccccagtgcacctccccatgcaataaagacgcctgtctacaaagtcccagcaccatgccccagagaacgagtcattcccgcatgtcatccacgtcccagtttctactcagcatgtcgccagttgtcccccagatatctggctggttttatagctgctctgctcaatccaatgctatactcttttgtaatctcttcttctcttttcattaaagcagcctccccataatcactttttttattttttttaagagacagggtctcactctgttccccaggccgtgcagtggtgtagtcatagctcactgcggcctcgacctcctgggcccaagcaatcctctccaatcagcctctcgggtagctaggattacaggtgcacacaccaccacacccagctgatttttttttttttttttggtagagatgggggttatgttacccaggcaggtcttgaagtcctggcctcaagcaatcctcctgcgtcagcttcccacagtgctgggattataggcatgaaccatcacaccagccctctaccattgctttttattttttattttatttatttatttattttttgagacaaagtcttgctctgtcgccaggctggaatgcagtggcgtgatctcggctcactgcaacatccgcctcctgggttcaagcgattctccttcctcagcctcctgagttgctgggactacaggtgtgtgtcaccatgtctggctaatttttgtatttttagtagagatgggatttcaccatgttggccaggctggtcttgatctcttgacctcgtgatccgcccacttcggcctcccaaagtgttgggattacaggcgtgagccaccgcgcccggccaccattgctttttaatcagactttgactcttagggagacccagcctgttgaatatagtatggcctatgtgtggattttttcctgttctttccttccctgatctcagtgtatttctattcttcccacccgaggctgacatgaggtgggcgtatatcccagctggaaaccccctcgggcctccttgggaaggatcttgggtcagaagctagacccgggagaggtaagggtctccgtgccccttccctgctaatctgcaacatcagctctgggcgttcaacactcagtttgtgttaatgtcttcttgcggcccttttaaatactctcacactgggaaggcagctgacacacacacccccattctacagatggggaaactgaggcttagccatgctgcctgcctttccaatgggccccagatctgggacctgcatccaggcagatctgacctcaacgccagctctcagcttggcctcccaagactcctcactttcgtcctctggccccgcccaacctggcaagaaggcgtgtctccagtgagagacagcagccgatgggcccaccacctcttctttatgagctctgctatttcgtacgccaccgatgggccaatgggctgccacctctgggttcaggcgtccaatcagctgtgccaggaatgggcagccccaaagtcctgagagtcactatagaaatcagtgttggtagttttctgtttctcattgagcaggatggggacagatgtgcaaactgcatttttattttattttattttgagacggagtctcactctgccacccaagctggagtacagtggcgggtgatcttggctcactgccacctccgccttccaagttcaagcaattctcatgcctcagcctcctgagcatctacaggcatgagctaccacgcccggctaattttttgtgtttttagtagagacagagcttcaccatgttggccaggctggtctggaactcctgagctcaaatgatctgcccgcctctgcctcccaaagtgctgggattacaggcgtgagccactgggcccggccacaaactgcatttttaatgagtccctggtgatgctgccagtctctggccacaccactgggagagcctgccctgcttggtttaggcttggagcggagactgcccaggttcccaacccagctcctagggagggaccaccactgtgtttcctgtctggacagtgatgacaataacaccaccttgttagccttaaagcacacgttatttactacatgtcagggaggaggggagagaagcaggcagagagccttggccaggagggagcacagagcgcaggcctacccagtacctgacccggatgaacgatgatgggttcctgatgtctgtccccaccttacagaggagggagccaaggcttcctgaccacttgccttagggcacatgggaacattgtctttaaagcccacccttaagccacctcttgggggaatgtggccttaggccaaggtgtgacttgaccagatcctgtggctgttggtggaaaagggaccacaggggccagtgctgaggccagtgccctggaggaggcaggagtaggtgctggaaggggtgggggcaggtgggggatgggtgtggcagctgtggtggaggtggatgcatagttgcatcctgttgggctggttgaaaagggagttccagaagtgtcccacatgggtggggccttttcctgcctcccagcttgcacccctcagccccgcctgatcatggcattttcagtctctgtctccttttttgttttgttttgttttgttttgtttgagacaaggttctgctctgtggcccaggctagggtgcagtggcacgatctcggctcactgcaacctccacctcccaggttcaagcaattcttctgcctcagcctcccaaatagctgggactataggcgcacaccacctagcctggctaatttttgtatttttagtagagacggggttttaccatattggccaggctggtcttgaactcctggcctcaagtgatctgcccaccttggcctcccaaagggctgagattgcaggtatgagctaccgcgcctggcaaatttttaaattgagatgaagtcttgctatattgaccaggctggtcttgaactcctgggctcaagcaatcctcccatctcagcttcccaaaatgctgggatgacaggggtgagcccctgcgcccgaccaggctccaatctcttattgctccaagtaggtgcccacttggtgctgggccttagctgatctccagggaggcagcgtgagcacctggcatggtcccagcccccgagcccagcctgtgagtgtctgttggattcaccttggggttgggggcccagagagaacattctaggtagggaaacagcattagcaaagcagtgtggggaggtggtgaggcttgggaggggccagaaggcaggagggactgggactggaaggcatgttgaggattcaggcagtgggagctggggtggcatgcatggtggcgggagaccactggctgccatgttcaggagggacagtcagggaccagaatgcaagcggggagtgggggatagggagtggcagagaggctggcatggcgccaggcaagaggcaatgggggcctggccctggtggtgcgggcagatgccaggcagtctagactgtcttccaggcaaggcattaagcagcataggcacccttgctgggggaggtgggtgggaggtaggacgccttactaagaggagaggaaaatgaacacattgcgggcatcagtgattgctggggccggcggggccttgtggggtatacaccagaccacgtggctcctagggattggcagctggctctctgtgaccaaactcagaaccaggctgccaccctttactggcccgggacttgttaaagtgacttccctctctgtgccttggtagcttcatctgtaaaatgggggtgatggtggcgctgccatcgtggccatggcaccccattggctgtggtatgctgtctcttcctgtggggtctgatgtccaaagacagggcccccagggcgcagcccacgttcccctctggttcccgcagcttgccctcattccagccatccccagtgaaccataacttccagccatagaagtttaaacattacctaagaccataaccaccaggaagtttggtggcccatgagtgaaccctgccctcactgggaagcagccccgtaaactctgagtgcctgggactgttcctgtgtggaatgtgcacagtgaggccctgtgaaccacccctccccaccgcccttggccttgaactggcctttggtgtgctcaccggaaccaaggaagagatgtcaggacctggctccagggcttcccattggcctcagaatcaaatcgagcctccttctcaaggccttgtggcccttgccagtctctgggacctcacctcctcctggtccccagccactgcccccatccatctccctcctgattctcaggcccagcttgctggttcccactgcttggcctctgtgctcactgtgctgcctgcctggaacgccctgttccctacctgccactgtctgctgctcacccgcacctggtcacttgccgccttcgttccccggtccccggcagcacgagttatcctgttcttgttttttctttttcttttttttttttttttgagatggagtctcgctgtcgcccaggctggagtgcagtggcgccatctcagctcactgcaagctccgcctcccgggttcacaccatgctcctgtctcagcctccggcgtagctgggactacaggcgcccgccacctcgcccggctaatttttttgtatgcttagtagagacggggtttcaccgtgttagccaggatggtctcgatctcctgacctcgtgatccgcccacctcggcctcccaaagtgctgggattacaggcgtgagccaccacgcccggcctgttttttcttaatggactctctctgcgccagcacacgagaacaggcatgcagatcggctctgcccagcacagggcctggcgccgagcaggtgctccgcatgcacggccgagtgaacgagctcaaagggctggtgctgtgccccttcttgcctactgggcgggaagtgatgggggttactttaccaagcatcttcccctggtgagcctggtccatcactctgccattccatctgcagccttgtatctagagagcagaccaagctggcgtgcgtcaggctgtgggctggctgggatgcctgcccaggctgacaccttcccagtggcaatttgtcctggactgggagatatttgcgtattgcctcggattagagagaactcaagggctaaatgggcatgggaagtgttgtgtgctgtgcccacttcttggtctgctgaaggctctcaaaagtcctgcatgagtggatcctgcctgctggcgtggtagctagggtctcctgatggtggcagatccccaagttgttccccctggtcctgcctgccaacagcaggtttgggaaaggcagatctcctctccttgccttcagggccagcctcgtcattgtgttctttgctgggggaacggtgagaagatccagggcagagccccagtgtgcaaagcactgggaccctagcccagcccctgagggttccctgagactaacagctgagccgtgtttgtgctcctgatgggatttgatcgcagtcatatgggagccccggcactgggttctgtgtcattgcattttggggaaactgaggtgctgagagaagggtaggaacccggagctgggtgtcgctaggctgtgaaaccacgaggcaccccgaaaactctcctccctctctccctctcctcacctccccaaaccctgctgtcttttctgttgggctgaaggcaggtcttcccagcaggacctgggcatttcaaaattcttaagtagtgccagcgggcacgtgaccagtgtgctttgaagatagggagggccattctctgaccaagggccttcggtcactctggggctccacaagctcctttgaaacaggaggctccgaagacctccagggtctccaggccagaggtgactgtggcctctggcaaggggctgcttcttcatgtcccaggccccctgaccctgagaaggtggcagcttgcacctgtggctcccttctggggacacctcaaagggcctgaggtgcaggggattgactgtttagcacagtggggccccagttgggggttcctgggagtgatgtcctcctaggttagagcacagattcttttttcatggattttaattaagcagctgctgtatacgagatgctagggggaactgtgatcacaccaagtctctgctctctcagagctccagcttcagtaggggacacaggcttgggagggaggcagaacctctctctggaaaaacccgcaagtacaaccagtgggcccacagttaggaggccctgtggtgggcgaggacggctgactccctggccttggcagcgtgattgctggatgactgcccagattaatcctttactcctgctgtgtgccaggctgggtccctcagagtccccagggcctgatcacatgccagctgcgaacctctctgagggggcccgggctgaccctcctcccagggagccctcctggctcagggtgccgggtgacagtgggggtgtgtgtggagctatcaaaatgctttgcagtttgccgaggaattacaggaactggctttggtatctggaaatgcctgtctgcagagggtggctgtggggtgcagcttgatggcagggaccgggacaggcagagccaggggtggctcagtggcttgttggctgggcctcggctgctgctgctgtggacaagttgacagggaactcagtgttaaggcctctggctgattctttgggccagtggattgttaaaaaaaaaaaaaaaatcatctcatctccagcacttgagcgcatgcagcgttccagaggcccaggctaggccctccactctatttctctttttgtcattgttttgagacagggtctctggcctccccttgtcatccaggctggagtgcagtggcgtgatcacagctcactgcagcttcaacctcccaggctcaagcagtcctcccacctcagccacccgtgtagctggaactacaggcttgcgccaccacgcccagctaatttttaatttttttgtacatgtaggatcttgctatgttgcccaggctggcctccaatgattctcccacttcagcctcccaaagtgctggagttacaggcatgggccactgctctcggcctggtggaagcttttaaacctctattgggctgggcatgatggctcatgcctgtaatcccagcactttgggaggccgaggtgggcggatcacctgaggtctggagttcgagaccagcctggctaacatggtgaaacctcatctttactaaaaatatacaaattagccaggcgtggtggcatgcgcctataatcccagttacttgggaggccgaagtatgagaatagcttgaaccggggaggcagaggttgcagtgagccgagatttcactactgcactccagcctgggtgacagagcaagactcagtctcaaaacaaacaaacaaaaaacctctgttgacctggcattcagcatttactttcaccatgccagggagccctgtgaagaaaggcaggcagctgcggcagacctggtcggtgcctgggcctttttctctggtgtggttctgttgctcactgacccactagggaagaaacggttttctggcacctgctgtccatatccttcgcccacatggaggggttggccgacagcagaaggatcttggaggagagatcacaaagaacagcccctgctggccgggcgcggtggctcacacctgtaatcccagcactttgggaggccgaggcgggtagatcacgaggtcaggagatcgcgatcatcctggctaacacggtgaaaccatgtctccactaaaaatacaaaaaaattagctgggcgtggtggcgggcgcctgtcgtcccagctacttaggaggctaaggtaggagaatggcatgaacccaggaggcagagtttgcagtgagccgagattgcactactacactccagcctgggtgacagagcgagacttcgtctcaaaaaaaacaacaacaacaaaaaaaaacagcccctgtcttctctgatcccctgttggttcccagcctgcatgtgacaaccggggaaggtgccgtgctccaaagtctggcatgtgagtctggctgcctggttccagccccatctcgtgtctgcccctgactgggcggacttgggtggggcaggtggtccttcctgggcccgtttcctggtccttgcgttggggaatggcctgaggttccgggggaaccttttgcagctcagacacctagattcagcttgctggggaagcctgtggcagccgggcaggcagaacctccatttctcacctaacatgcgtgagtgtgcccttggggacacagcaatgaccaaggcagatgggcgtcccttccctggtggcatggacattcaaggtaaagctctctatattagatttcttctcaccctttgtcagatggtagtaagtgttatggggaaacgaaggcaggggaggagggggctgggtggagcagctgctgtggggagagagatctgcaggaggtggggatgctgtgtgacttgagagagtagcttgccctctctgggctcctgcctgtgtgtgctgggggaacgatggcgcccactgcccctggtgctgtctttgccacatcattccttggggacttctgcccaccagctgctcagaccgtagctgtgctggctatgctcttcctgtgcaggtattgactctgagtcctcatacagcctgttatgatgcgcattttacagatcagtagactgagacctgggcaggccctctgactacagactgagctcattactgcacacagcgtgctgccagtacatgctgggctctggggtgctggagccgcaggtcctggccccatcaatacaatccaaagtgagctggctctgatgaggaagaggccaagatgccccactcagggaagtcttcctgggagaggtggtagccaggcagacctgggagtaggaggaggtagggctgggctttgtagacaccacacttggtgggacagaggcctgctagggagagggcctgtgtccttgccaccagcccatcttccacgccatgtccccctgcactctttgaagggagatggtctcttttggggctaagctggggtcctggagccagaagagaactgagatttgctgtggggggttgggagctgttccatttttagtggctgctacaggaagagcggccgagtgtttccccttgtccctgcagaaggctggagtgtaactgtccttgggaactgggtcagctgatagcagggctgggggtgggggtggggatcctgaatcctccagcagatgtcctcattgccctgatctgggtggccagtgcctgtgctggacacggtcctcagtcatcggagcccactgagtctccccctgaccctgcagagaatttcaaagaggcgaagttccttccagtggcctcacaaaggctatctggcttaggagccattacctgaagccagaatttctgagttccaagtcccagctccatcacggaacttggcccaaggcccttaacccctctgggcctcagttttgtcatctttgaaatggggatcttagagatgcctacctgtcaagggacttgtgaggcgcaacgggaccacacgcagggcctggccagagtgccgtagtttcttcggttgccatgatgggacggtgaaactcctcacactcttctttctgccttgaagattctagacctggctgggtgttcatctccctttttgcctttgcttgaggcagtttatggcatggctgtgttattcacgtcgccaggtctcctcctggtggacgttgaggccattttcatttttttactcttaaaaacgacagggcagtgcgcatcttcgcatctccggggtgggtcaggtctctgacctctttgccagtgtgacttattacccctttctttctttgtttttctttttgagacagtgtcttgctctgtcgccaggctggaatgcagtggtgtgatcatagatcatagctcactgcaacctccagctcctggctcaaatgatcctcccacttcagccgatattaatccattttcatgctgctgataaagacgtatttgagaccgggcaatttacaaaagaaagaggtttaatggagttacagttccacacagctgggctggggaagccccacaatcatggcagaaggcaaggaggagcaagtcacatcttatacggatggcagctggcaaagagagtgagagagcttctgcagggaaactcctgtttttaaaaccatcagatctcgtgagacttattctctatcacgagaatagcacgggaaagacccacccccatgattcattgatctcccactgggtccctgctacaacacaagggaattatgggagctacaagatgagatttgggtggggacacagagccagaccatatcagcctcccaagtagctggaactacaggtgtgcgccaacatgcctggctaattttttaaatttctgtagagacggggtctcactgtgtcacccaggccggtcttgaactcctgggctcaagtgatccaccctcctcggcgtcccacagtgctggataataggcgtgagccactgtgcccagccatttcccccttatttttagcatcactacagtagctgtgatctctgagctttggggatatcccctccccaacattttactctgaaaattcgaacatctggaaacgtcaaggctttgtacagtggacacctgtgtactcggcagccaccttccgtgatgaacatgccttatatttgctttgtcctcaatctgtgattcgggactggatttctcttgtttcctggtgggacccacactgcttgtcaattacttattttgttccccttcatcccagtcttgctgtgactttcagatacccccgggtcttatatacactcagggttatacccagaaaacatttctcctgggggatttgtctctaggtagggggccctcttgaatagtcagggggagaaagaaagactcaagaccagctctgaggaggcggcaggggtgccccttccctctaccttgtgggctccttggggaagaaggacaagtgagtgccatgagaaatacccctggggattttgtggagctggaatgtgctggtggaccatgaatccacaaggacttgggcatcgaactcccttgactgggacccacagcaagggaggctctgcagcatcaccttaatcaaatggactcaccctctctgggtgatgtatcctggtgcttcctcttctgttcatcagtcaatcaacaaataaatggctgggcgtggaggcatatgcctgtaatcccagaaactttggtcattggttatgtctacctgtttatttttgggggagggggattcataatatgtcatgacgtatattaacagtttgcaaagtgccacatgggaacgtaatcttcaggatctggaaagaggctcagtctattcagtctataggaacccccgcctcccccaagacccttgtcatgagaacgaatctttcactcccaaattcctagagtgacgatgattgggtcattattttcttttttattttattttattttattttatttatttttttatttttttgagatggagtcttctctgtctcccaggctagagtgcagtggcgcaatctcggctcactacaacctccgcctcccgggttcaagcaattatcctgcctcagcctcctgagtagctgagactacaggcatgtgccaccatgccaggctaattttttgtatttttagtagagacagggtttcaccatgttagtgaggatggtctgaatctcctgaccttgtgatctgcccacctctgcctcccaaagtgctgggattacaggcgtgagctactgtgcccagcctgggtcattactttcattcaacaaagcatttctccccgcagtccatgcgcaccctgcccacagctctttctcattttcagcatctctcttccctttctagaacatgccgagtttttgcactgcaagtccaaaaagtttacagactttgatgaagtccggcaggagattgaagcagagaccgacagggtcacggggaccaacaaaggcatctccccagtgcccatcaaccttcgagtctactcgccacacggtaggcagcacgggtggggacccatcactgaccgtttctggtcgttcatggacagtgctatgggtgagcctgtgtacttccactcatgggtatcatgtgcccattcacaaacagttgatattcacacacacatagccccttgatctgtatcttcccacttgtgctaggtatgtagtacccagacctctgtctcagcttgaagaaagagcatgccaagaagttgtttggagtggtgggggattgcagccatttcccccttttaccaagggcagccaccacttggctcaaggcagccagatctgctggtgcctcaagagaggccagaaccagtcttctgtaaaatatcctgggttttttttttttttttttgagacagagtcttgctctgttgcccagtctggggttcagtggtgtgatctctgctcgctgcaacctccacctcccaggttcaagcaattattgtgcctcagccgcccaagtagctgggattacaggcatgcaccactacacccagctaatttttttttttttttttttgagatggagtctcgctctgtcgcccagactggagtacagtggtgtgatctcagctcactgcagtctccgcctcccaggttcaagctattctcctgcctcagcctcccaagtagctaggactagaggcaactgccgccacgcctggcaaattttttgtatttttagtagagatgggatttcaccatattggccaggcttgtctcaaactcccgaccttgtgatctgcccactttggcctcccaaaatgctgggattacagacgtgagccgccgcgcccggccaaatttttttttttttttttgagacagagtctcgctctgttgcccaggctggagtgtagtggcgcaatctccactcaatgcaaccttcacctcccgggttcaagcaattctctggcctcagcctcccgagtagctgggattacaggtgtgtaccaccctgcctggctaattttttttttattttttattttttttatttttagtagagacggggtttcaccatgttgcacaggctggtctcgaactcctgagctcaggcaatccacccacctcagactcccaaagtgctaggattacaggcgtgagccaccacgcccagcccattcagctacttttttgtatttttagtagagatggggtttcaccatgttggccaggctggtctcgaactcctaacctcaggtgatcgcctgcatccccctcccaaagtgctgggattacaggttttagccaccttgcccagccaaatatcctgattttaaaactctgcattcaaacagcagcccggggccatagacatcctctggcccagaggcacagattgctaccatgatgggttccttgcgataagttttaaatttgtttttcaataaatgacacctgcatgtggctcagaattcaaaaattacagaaaggtatatcgcaaaaacctaccttgtcaaccagttttgcacacatattttaggttcttcagatgacaatgcaaacatgagctgggtgtggtttcacacacctgtcattcaagctgcctgaaaggctgagtcaggagggtcacttgggcccaggaagtcgaggttgcagtgagctatgatcacatctgtgaatagctactgcacttcacctgggtaacatagcaagaccctctatcttaaaaaaaatgtgtaagcaaaaaacatgtaagcaattgtgattgtatctatgtatatgttgtgtatgtgtttatcactccttttccttaaattgttagcataacataaaaatcacttatgctttttttgagatggagtttcactcttattgcccaggctggagtgcaatggtgcaatcttggcttaccgcaacctccacctcccgggttcaagtgattctcctgcctcagccccctgagtagctgggattacaggcatgcgccacctcacccggctaattttgtatttttagtagagacggggtttgtccgtgttggtcaggctggtctcgaactcccgacctcaggtgatcgcctgccttggcctcccaaagtgctggcattacaggtgtgagccactgcgttggcctatgctttttttttttttttgtatgcctctcagaatgtttctttattatatatttatttttttttttttttgagacagggtttaacactgttggccaagctggagtacagtggtgagatcttggctcacttcttctcctgggctcaggcgatcctcccgccttagtctcctgagtagttaggacaacagatgcacaccatcatgccaggctaattttttatatttttggtagaggtagggtttcgccatcttgcccaggctggtttcgaactcctgagctcaagtgatctacccatcatggcctcccaaagtgctgggatgacaggcatgagtcaccgcgcctggcctcatccatttgtcttttgtttttgtttttttgagacagtcttgctctgtcgcccaggctggagtgcagtggtatgatctcagctcactgcaacctccaccttctgggttcaagtgtttctcatgcctcagcctccagagtagctgggagtacaagtgtgtgctaccacgcccagctaatttttgtatacttagtacagatggggttttgccatgttggctaggctggtctagaactcctggcctcaagtgatccacccacctcggcctcccaaagtgctgggattgcagatgtgagccaccgcacccagcctcatctgtttgtctgtaatggttctttggtattggctgaatggatgggctgaaatttattcagtcatttaggtctattccagtctgaactgtcctgatttagaactgtgccattgaaatggagtaggtagaaggtatctgtaggatgggatcctagaaggggagttactggatcaaaggtgtggttcaggcagagtgtcaggcgacatcctcaagtctgagccccgcgcaggaactttggtagtcagctgggtggctgcgggcctgtttgtgcctcccctctcctggctctgaatgcctttccttctggtttccctcccagtgttgaacttgaccctcatcgacctcccgggtatcaccaaggtgcctgtgggcgaccagcctccagacatcgagtaccagatcaaggacatgatcctgcagttcatcagccgggagagcagcctcattctggctgtcacgcccgccaacatggacctggccaactccgacgccctcaagctggccaaggaagtcgatccccaaggtaaccctgagcctagggcagtcccctcttccaggtgcctctgagcatgggatgtgcccagcatccttggttccaagtcactggcgttctctttaatccatggccgctgtaggaaaaggcctcctggaacatggcacttcctccgagaaccagcagtgctggtgggcatcccctgggaagtcactgtgtggcagttggacggtcctccttggacatggcagtgcccatgttgccagagtgggaagctagcctagggctgaaggaagggcccagcgctccatcgcccagatgcgatcttaggtcccatctagctgttactctgctccctgagacatggtcccctcttagtcagaacgggaacttcagtcctaacccagatagctgatgtgaggactgttgaacttttgggttgtttctgatctttgcatggtgagatcgtctatttcccttcgagttgacacccctgggcccctctagtcagatccttctactgaaccctcactgcagaatgtgagcaggaaggggccccagggagggcacagctgtggcccccttgatgcccaaattggcacccaccagagatcttcactctggcttccatctgtccccagtgtctcatgcacatgccacacatataacacacacggttagcacagagccaggccctcagcccccgtgggagcagttgatctgcagaggtgagactttgctagaaagacatccttgactctggaatgacttgtggagaggtggaattggatgggatggtttccagagtggaattttagccattcaggcaagaggtagtcctggaaacagtcgtgtcaaactcaaatgttcccttgggactttgccggcacttggaaagtccagcatcaaaatctggcccaggaatcatgtttacgtgaggtttcccaaagcctgcagcagcagaggttgtccttaataacacaaatgacaataacggccagcatttgttgagtatttgccgtgtgccaggctcacccttatgaccaccctgtgagatcagggctgtgaccatcttcattcgacatgtcggaaactggggtccaggcctgtgacgttctggctttcccaggtgatgtgacctggaagtttcagggccaactggaccccaggtggcttgcagctgccagctgatgctctttcctggtggcagcctctgacctctgacctctgggctctttcaggcctacggaccatcggtgtcatcaccaagcttgacctgatggacgagggcaccgacgccagggacgtcttggagaacaagttgctcccgttgagaagaggtgtggctttgggggtgctggggaagcaggaggatgggtggggtccttatcattactgaaaccccagcacctgttccctgcctgcctggaagtcattgcttctccatttcaccgtaactccttctttcttttccctttgagctatgtatctttttcttctgatttgtatgcattcgtttttcaagtgcacaattaacacctgctggtttctgaaacattagaaaacaagtgtatagaaagaggaaactaaactcacccgcagccacacttcccccagacagccactggtgaatctgcagctcccagctccccagggtttataactttaattaatttttttattactttctattatgagccttcccttcccttttccttttcctttttgttttttgagacggagtttttgctcttgtcacccaagctatagtacagtggcacaatctcagctcactgcaacctccgcctcccaggttcaactgattctcctgccccagcttcctgagtagctgggattacaagtgggcaccaccacgcccagctagtttttgtatttttactagagacggggtttcactgtgttggccaagctggtctcaaactcctgacttcaggtgatccacttgccttggcctcccaaagtgctgggattacagccatgagccaccgcacccggcctattatgagcattttcaaacattcccaaaagtgtggaaaaaagttcaaagaatcctcgtggatggcttccccagcttcggtggttattattattattttcttcctggaatattttattttttcattttatttatttatttatttatttatttatttatttatgagacggagtctctgttgcccaggctggagtgcaatggtgcagtctgggctcactgcaacctccacctcccaggttcatgccattctcctgcctcagcctcccgagtagctgggattacaggtgccagccaccacgcgtggctaatttttgtatttttaattgagacagggtttcaccatgttggccaggctggtctcgaactgctgacctcgtgatccacccgcctcggcctcccaaagtgctgggattacaggtgtgagccaccgcacccggccatcttcctggaagattttaacacaaatcctaggcactggctgggcgaggtggctcacgcctgtaatctcagtgctttgggaggctgaggcaggaggatgccttgaggctgggagttcaagactagcctgggcaacatatcaagtccctgtctctactaaagattaaaaagttagctgggcatggtggcatacacctatagtcccacctacttaagaggctgaggtgggaagattgcttgagcccaggagttcgaagctgcagtgagctatgatcacactactacactctagcctgcacaacagagcaagatcttgcctctaaaaaaaaaaaaattctataaatcctaggcattgtagcattttacacataaatacccacatttcttttcaaatacttccccttgccatcccatttgtttttttctataccattcatttgtggaagaaaccagaccacatcccacatttgggatttggccaattattgttctctgttagctggtaattagatcaggttcaggttcaagttcaggtacagatcttctgataggagtaacctaagtattttttattttattttaaaaatattttaaatattttgggtcgggcatggtgactcacacctgtaatcccagcactttgggaggccaaggcaggcggatcacaaggtcaggagatcaagaccatccttgctaacacagtgaaatgttgtctgtactaaaaatacaaaaaattagccaggcgtggtggcacacacttgtagtcccagctactcgggaggctgaggcaggagaatcgcttgaacccaggaggtggaggttgcagcgagctgagatggcgccacttcactccagcctgggccacagagcaagggtctgtctcaaaaaaaaaaaaaaagaaaaatttttcaagcattttattttatcggagcagcagttttaggttcatagccaaactgagagggagatacagagatttcctatcagccctatagcccacacatctgtaacctctcccactttcaacgtgcccagcagagcggtgcatttgctagaactgatgagcctgcgttgacccattgtcaccaccccaccccacatccatggttgacatcagggttcactcttgctgttataagtttttttctttctttctttctttctttctttctttttttttttttttttttttttttgacgatgtcttattctgtcacctaggctggagtgcactgggacaatcatagctcactgtagccttaaactcccaggctcaagtgatcctccgagctcagcctcccaagtatttgggattacaggcatgtgcgattgctcctggctaggttttattttgttttgttttatttttttcagacagagtttcattcttgttgcccaggctggagtgcaggggcacaatctcagctgactgcaacctctgcctcctgagtagctgggattacaggcactcgccaccacacacagctgatttttgtgtttttagtagagatggggtttcaccatgttggctaggctggtcttgaactcctgacctcatgtgatccacccgcctcagcctcccaaaatgctgggattaaaggcatgagccaccgtgcccagccttcttttgtgtttttttaaagccattcctcccctctggcatctactctaagctgcgggcacctcctgcctttcccttcatgcttagccgcagtcatttagagcatttcttttactcctgggttttccacctcgatgtctgagatagatgtggggaaaagttcagaccttggttgccagcatcccccagcactgctgagatattgagtggtgaggcgaccccggatcccaggggaatgctgtcagggctaaattcaaaaccctgtttagctgtgaagatccggggctgagaagcaaatctgtggctggctgaggtttggggaggatttgctggtgctagagaggaaagcagaccctacccaaccccacgccctactacagccaccccgacccggctgcccttggacactgttaggcctccatcttggatcctaagggcctttggggtctgtgggcactagccaggctgaggatttggtgatatgggcctcttccccttcctcctgactcactgatgtccacagctgcccttctctgccttccttcctgtttctaagaacgaaggcgcttccactctcagctcacttgtaggcctgctcccgttttgtgacctcaggcttcagaagccctcccactggaccctttttcctggcgtactaatgactcacaactcctcctcctttacgggaacccaggctaggcgtggtggctcatgcctataaccccaggattttggaaagcacagttgggaggatggcttgaggcccagagtttgagaccagcctgagcaacacagcaagaccccatctctctcttaaaaaattatccaggctgggcacagtggctcacgcctgtaatcccagcactttgggagaccaaggcgggtggatcaaaccccagctctactaaaaatagaattagctgggtgtgttggtgcatgcctgtaatcccagctactcgagaggctgagacatgagaatcgcttgaacccaggaggcagaggttgtagtgagctgagattgcaccactgtactccagcctgggtgacagagtgagactctgtctttaaaaaaaaaaaaaaaaaaaaaaatccgtgtgtgatggtgcacgtgcctgtactcccagctactcaggaggctgagtccggaggatggcttgagcccaggagttcaaagctgtagtaagctatgattgtgccactgcaatgcagaatgggcagcagagcgagactccatctcttaattaagtaaatcaagccaaatccaagccagatgctttttactggcccctgctgtttccttctttgtgctgtcacacaggtgatggtgactctggcttcacagggatctaggttcagatcttgggtctcctactgtgacctcaccttggcatgtcttcgtttccctcctccctcttggatccaagagagatctggcgaggatgaagagcagtcacatcccacaagaccctacaggatagatgaccggcacctctcccttgcttctcaagagaaacatgcacaaccccactacaaagaaaagggagcacaggccaggcactgtggctcacgcctgtaattccagcactttgggaggccatggcgggcagatcatgaggtcaggagttcgagaccagcatggccaacatggtgaaaccccgtctctactaaaaaaacaaaaattagccaggcgtggtgacgcacgcctgtaatcccagatgctcaggaggtggaggttgcagtgagctgaggttgcaccactgcacttcagcctgggcagcaagagtgaaactctgtctcaaaacaaaaaaccccacaaaacaaaaacctagccaggagtgcaatggtaggcattccacttggattctttgcaacagtgtgtattgaattatccagcttttctcccccatatactgaagcgttaactttcagttctacctccttctcggtgtagttttggactttcttttcagttccattgatctctctggacatgaataccctgatgtacccaactgtttaaaatatactcgtttgatagtggattttagctcttccctattgctcttgtttttaagatgttatttcttttttttcttgtgagacaaggcctcgctctgttgcccgggctggagtgcagtggggtgattacagcttgctgcaacctcgaactcccaggctcaggtgatcctcccatctcagcctcccaggtagctgggactatacacgtgtgctaccacgcctcgctaatttttgtatatttttgtagagatggggttttgccatgttacccaggctggtctggaactcttgggctcaagcgttccacccgcctcggcctcccaaagtgttggaattacaggcgtgagccaccgcacctggccttgagattttttttctttttctttttctttttctctttctttttattcagagtcttgatctgtcgcccaggctgaagtgtagttgcatgatcttggctcactgcaacctccgcctgccgggttcaagcggttctcctgcctcagcctcccgagtacctgggactatagtcacgcgccaccatgcacggctaattttttgtatttttagtagaggcggggtttcaccatgctggccagggtggcctcgagctccttaccttgtgatctacccacctcagcctcccaaagtgatgggattacaggcgtgagccaccgctcccggccgagatttttttctcacctatctttgaatctcagcttgtagatttcatctgccccaaagcttttttctgtccctgcgcacacaggctggatgtgagctctccttcctccaaatacttaatgttgctcttcgcagctgccatgtgcattcgcaccctctgtgttgtttctgagtaacatgttatgacagctgtgagtgcctcgtgggacaggatccatctctatacttgaatcttgcccatccccgtgccaggtccacttggctcacctagctttgcccctgacctgactgcctctccccacaggctacattggcgtggtgaaccgcagccagaaggatattgagggcaagaaggacatccgtgcagcactggcagctgagaggaagttcttcctctcccacccggcctaccggcacatggccgaccgcatgggcacgccacatctgcagaagacgctgaatcaggtactgcaagggtttgcacgtagtgtgcagtggcataggctgtgcactgcacaacagctgcaatcctcactggcacttgtttcaggctagagcagcacttgttttagcaaaatgggttcagtccacatttagcctaggagtttgagaccagtctgggcaacatatggagaccccatctctaggaaaaatagaaaaaattagctaagcatggtggcacatgcctgtagtcccaggtactcaggaggctgaggcaggaggatcacttgagcctggaaaatcaaggcttcagtgagccatgttcatgccactgcactccagcctgggcaatagagtgagaccctgtttcaaaaacttaaataactaaataaaagaaatgtacttgattcagggtctggtgaagagcagatgttcagtgacttggtgctgctactattacaaccatcactgttattattaccaaaattttaattatcattgtaattattcagtcatttacccagaagactgtatgcattgcctggggttggtgacagggggttaataactcttttttatttattattattattattattattattattattttttatttttggagacacagtctcactctgtcacctaggctagagtgcagtggcatgatcttggctcactgcaacctccacgtcccaggttcgagtgattctcctgcctcagcttcctgagtagctgggattacaggcgtgtgccaccacacctggctaatttttgtatttttagtagagatggagtttcaccatgttggccaggctggtctcaaattctgagctcgagtgatccgcctgtgtcagcctcctgaagtgctgagattacaagcatgagccaccatgcctggcctatcgttctcttcttgtaagtaattgattcacatggtgcataaacagaaatggtattaaaagctatacagtgggccagtgtgtggtagcaggggcaagacgctcctcctcgctgttttctagcaccttccagggtggcagcagggcctcagcagcactccagcagtcatcttttcatgcacatatcagggggacacagtgtccacacgagagtaggttcctgtccttgtagaaggcataattctaatgggggagactgacacccaacaaaccgccagataaatgcacgatcaagaatccagtaggggcgcgggggccgggaaaagagccacccagagaaggcagctcaggagagcaaagagggaagtcagtgtctagagggaggggccctccaggagaggaagctggggtgcttacaaacgggagtagggagaggaagggaagtaaaactccgcagctggctggggcctcctgagagccagcagtgaaaagtccagctggcctccagggagcctggagggggctcagcctccttccacgtggggtgcttcccagagcagcagcgccccttcctctccatttgctcatgacttaagtgccctagtatcctgtcacagaccaagggaaggccagcgtagctccctgcctttctaggcagcccacatagacgggggtcgatggccagggctgcagggcagggacccttggtcacggaggtctttgggttaccccacttgctccatgccatagatgtgaggttccttcatgcctcttttctagctcgccagacactttgtatttattttttatttttttgatgattttttttttttttttttttttgagacagagcctcactctgttgcccgggctggagtgcagtggcatgatctcagctcactccagcctccacctcccaggttcaagtgattctcatgcctcagcctcccaagtagctgggattacaggcgtgcgccaccacactcaactaacttttgtatttttagcagagacagggtttcaccatgttggccaggcttgtctcctaatctcaggtgatctgcccgccttagcctcccaaagtgctgggattacaggcgtgagccactgtacccatcccggccttcccctcaaccccagatggagtctcgctctgttgcccaggctggagtacagtggcacaatctcggctcactgtaagctccgtctcccgggttcacaccattctcctgcctcagcctcccgagtagctgggactataggcacccatcaccacacccggctaattttttttttttttttgtatttttagtagagacggggtttcaccgtgttagctgggatggtcttgatctcttgacctcatgatctgcctgccttggcctcccaaagtgctggaattacagtgtgagccactgcccccggcccatgcccagcctttttgatttttcagacaaggtcttactctgttgtccagaatggattgcagtgacacaaacacggctcattgcatcctcagcctcctgtactcaagcgatccttttgccttagcctcctgagtagctgggactacaggtgtgtgctgccacacctagctaatttttaaaactttttttatcttttgtagagagaaggtctcaccatattgcctgggctggtctcaaacgcctatcctctagtgatctgtctcaacctccccaagtgctaggattacaggcgtgagccactgcacccagctttctctgttgtaggacagatggccaaactctgctttacactttgcaagtataggctgattttatggctttgtttttctttttctttttttttgagacagagtcttgctctgtcacccaggctggagtgccattgtgtgatctcggcccactgcaacctccacctcccgagttctttctcagcctcccaagtagctgagactacaggcacccaccaccacaccgagataatttttgtattttttggtagaaacagggtttcattgtgttggccaggctggtctcgatctcttgatcttaagtgatccttctgcctcagtctcccaaagtgctgggattgcaggtgtgtaccaccatgcctggcccacatttgtctattttgaatcttccttgcttttctctgtagatgcagatgcagccggggagctcatcttgagtgcattctccaccttttcaggggcgatctttccatcttagtttgtagggcctgtccccatgtgtgttcattggcccccgtttccgtggtctggatggactgtccttgcaagctgttgcttgtcctccaaggcgtggataggcccagtgcctgatgtcggccccgtgggctgtttgtagcctcttacactcatgggcagctccgtgccgtctccgttcccagacatgagtgtgtctgtggcttgatttatctgttgctgtctctcaaggctgtgtggtgtggtggccgcatagtggcaccctggtgttggcccttggttggggggagtgtgtctgccactccctggtatcctgcccatgccaccctttctgatctctgacctctctcctgcagcaactgaccaaccacatccgggagtcgctgccggccctacgtagcaaactacagagccagctgctgtccctggagaaggaggtggaggagtacaagaactttcggcccgacgaccccacccgcaaaaccaaagccctgctgcagtatgtaccccggcacccaccaccaccaccaccctggcccctgccttccatcagccacagggccccctaggctgggcaccactcatcactcgtccactcattgattcagcagacacttgctgcaagccttctgcgtgccaggctccatcctaagcatggcattcgccccagtggaggggacaggtgtccgtccctgcccctggagtgctcagaatggggggaagtgggacgaatgggacaaaaaacaagaaagaaaatgtatagtgtgttaaatgtcaaaatatgaaagtggtgctagtgtgggagttgtcgggaacagcctcctttagaaggtgagcattggccggccaggagcggtggttcacgtctgtaatcccagcactttgggaggccaaggtgggtggatcacctgaggtcgggagttcgagaccagcctgatcaacatggtgaaaccccgtctctactgaaattgcaaaattaggctgggcatggtggctcacacctgtaatccccgtacttttgggaggccgaggcgagcggatcatgtcaggagatcgagaccatcctggctaacgtggtgaaaccccatcactaccaaaaaaaaaatacaaaaaactagccaggcgtggtggtgggcgcctgtggtcccagctacttgggaggctgaggcaggagaatggcgtgaacccaggaggtggagctttcagtgagtcgagattgcgcaacttcactccagcctgggcatcagagtgagactctgtttaaaaaaaagaaaaaaggccaggcacggtggctcacgcctgtaatcctagcactttgggaggctgaggtgggtggatcaccaggtcaggagattgagaccacggtgaaaccctgtctctactcaacgtacaaaaaaattagccgggcgcggtggtgggcacctgtagtcccagctacacaggaggctgaggcaggagaatgacatgaacccaggaggcggagcttgcagtgagctgagatcacgccactgcactccagcctgggtgatcgagcaagactgtctcaaaaaaaaaaaaaaaaaaattgcaaaattatccaggcatggtggcacatgcctgtaatcccagctacttgggagactgaggcaagagaattgcttgaacccaggaggttgaggttgcagtgagccgagatcgtgccattgcactccagcctgggtgatagggcaagactccgtctccaaaaaaaaaagatgagtgttggccaggggtggtggcttacgcctgtaatcccaacattttgggaggccgaggcgggaggatcacttgaggtccggagttcaagaccagcctggccaacatggtgaaacccctgtctctactgaaaatacaaaaattagccaggtgtggtggcaggcgcctgtaatcccagctactcgggagactgaggcaagagaatcgcttgaagccaagaggcagaggttgcagtgagctgagaacgtgtcactgcatatcagcctgggcaacagagtaagactccgtctcaaaaaaaaaaaaaaaaaaagaagttgagtgtcaggcgaagacctgaagcaggtgagggcagggcaggagccgtgtgggattaagcccggccagtgcaaaggccctggggcaggactgggccgggcatgtcagaggaagaccctgtggctggatggagtgagtgaggggagtgggaggaggtgatagagcaggttgtgcagggccttgtggggcctcagggaggacattggcttttgctgtgagtgaggtgggagccatggacagttctgagcgcaggagagtcaggactgactcaggtgctcacaggctccctagccgtggtgggagaagagacatgggagagcgggtgggagccagaccttggctaggttaggtccctctccagcttggcctcttaagatccaccccatgacttggttggtgcagctgcttagctgtgagattgggaagcaggtgtgcccccacaatcccaaattctcactcggggactcttctgcctctgaccttttggcttttggcctgtaagggaccttgaggcactggaacagctggaccagagcaggtgacagggacacctgggtagctcatactgcagacagtgccatgcatgaggcacttcccacagggacaccaggaggacaccgcctcctctggccatcacagccctggcatccccccaccccctctgccaggcagtagtgcatggtcgtgggctaaggggccagagtgcttttatgctcagacagccttgactacgttacaaaacactttctacagagcagatagtggccctttgcaggcttcaggaggaaattcatagccggggatggtggtgcacccctgtaattctagctacttgggaggctgaggcaggagaatcgcttgaacccaggaggtggatgttgcagtgagccaagattgtgccactgcactccagcctgggtgacagagcaagactctgtctcaaacaaacaaagaaacaaacaaacaaacaaacaaaacacaagattcagcctactagactgaaggaagtgttgttgtggaggattcagcctaagggtggacctgggcctgctgggtgaccacaggcaggtgattggacctctctgagcctcattttctgcacctctaaagtgagggtcatagcagctgtcatctcacatggccatggggacaaactggcagattacaaggtgcctgtaatcccagcacatggggatgccaagtcaggaggattgcttaaagccaggagtttgagaccagcgtgagcaacaaagtgggatcctgtctctgaaattaagaaaaaaaaaaaaaattaggctggggacgatggttcacgcctgtattcccagcactttgagaggcttcagtggatggatcacttgaggtcaggagttcaagaccaccttcaccaacatggtgaaaccctgtctctatgaaaaaatacaaaaattagccaggtgtggtggtgggcacctgtagtcccagctacttggaaggctaaagcaggacaatcacttgaacctgggagtcagaggttgcagtgagccaggatcacaccactgcactccagcctgggcagacagagcgagactgtatctcaaaaataaataagtaaataaataaataaataaatttaaatactacttgttaagcctatggcaggactgggccaggggatgcccatcacaaacagtccctgtcccccggggcttagcacgttacgtcatttgtaaccagttgccttgcagggccctccctgcccaggcactctcaccatggagaagcgccactgttatctgtgtctcctgtcaagagctgggccttcttgctttagcattttatctgagggtccaaggtcctcatgcagacatgggcggtctttctcggttcacgccttacaagagaacgggaattacggtaatagacttcccccagcctgaattctgcacttggcttttctcttcttgttaaagcaaagcctggagccttctgtctccgcctggtgcagcccacagactgttcatgtatcccagtgcccatggggacacccagggtttttttgtttgtttgtttgtttgtttttggccttaaccgatgcttgtaagttcatctgtgactgtacaggcaaggattcctgcagggcaaagaccccagcagagggatcttgggttaaggaacatacgtgtttaaaattgatttttaatttttcattttattttatttatgtatttggtggttttttttgtttttgttttgagatagagtctcgctctgtcacccaggctgaagcgcagtggcatgatctcagctcactgcaacctcccaggttcaagcgattctcctgtctcagcctcctgagtagctgagattacaggcatgcgccaccacacccagcaaatttttgtatttttagtaaagacaggggtttcaccatgttggccaggctggtgtcgaactcctgaccttaggtgatctgcccacctcggcctcccaaagtgctgggattacaggcatgagccaccatgcccggacctcatgtatttgttttttaaacggggtctcgccttgttgcccaggctagagtgcagtggtgcaatcccggctcaccgcagcctcaccacttgggctcaggtgatcctcccaccacagcctcccgagtagctgggaataatacaggtatgcgccaccatgcctagctaatttttgtatttttgtagagacaaggtctcactatgttacctaggctgatcttaaactcctgacctcaagcaaaccgcctgcctgaactttccaactatgagatcgcagacgtgaaccaccacgcctggccttgtttttttaatttttatttattttattttattcttttgagacaaggtctcttgttctgttgcccaggctggagtgcactggtgcaatcacggctcactgaagcctggacctcctgggctcaagcaattcttctgcctcagccacctgagtagcctgatcctcaggcgtgcaccacagcacctggctaatttttaaagtatttctagagactggatctcactatgttgcccaggctgtctcaaactccttagctcaagcgatcctcctacctcagcttcccgaagtgatgggattacaggagtgcaccaccatgcccagcccaactccccctttttataaggacaccagttatattggctatgagcacaccctgtgatattctcttgactgattacatctgcagtgaccctgtttccaaataagagtacattccgaggtacaggggggcaggattcaacccgaattccgcgggacaccgaccagccggtcacaattgtccagaatgctctgattgtgcagcgtgggttgggcctgtaaatcacctccagggcccccaggaggctggtgcccaggtgtgctttgtcccctgtggctgagagcaggtccccagagtctccatccttgcctaaccctccccctccccccgtcgcccagtctgttgtctgtcattagtttagtgctatgcctttgctgaccttggtcctggtttggtccacaattcaaattctccattccaggctgggtgcagtggctcatgcctgtaatcccagcactttgggaggccaaggcgggcggatcacttgaggtcaggagattgagagaccagcctggccaacatgccgaaaccccatttctcctaaaagcacaaaaattagctgggcatggtggcgggcacctgtattcccagctactggagaggctgaggcaggagaatcacttgaacccggcaggcggaggttgcagtaagctgagattgtcccattgcgctccagcttgggcgacagagtgagactccagctcaaaaaacaaaaaacaaaaaaaacaaattccccattccaggtgaagcattaacctaggcctttgtgtgtctcctggaaggaaattaaatgtgcacaccctttacttcatgtgaggaaagagattttggggatctgggcagcttgtgcttgcctctcccagttggggtatgaaggagacccccctttctttggcagcccagccttggtggccctgacagtggtcaccatttgagcagttcccctttaggagcaagtccccaggtacttcagtagatcatgatttttgggagggaaactgatgaagggagacagcccagtaccctaaggagagcaattaggaatgcttaggaaaactaaaacgtgaacaagatcatcctacttttttactattcacgatgccaataggcaatgctgagagactctttttaagggccaggcccgttctaaggggcgacacatgttattaccactttttgtccattagatgagcaattgtttaccaacaaaaattttctttcttttttttcttctttttttgagacagggtcttactctgtctcgcccaggctggagtgcagtggtgcgatctcggctcactgcagcctccgccacccagattcaagcggttctcctgcctcagcctcccgattaactgggactagaaacgtgcaccaccacacccagctcgtttttgtatttttagtagagacggggtttcgccatgttgtccaggctaatctcaaactcctgggctcaggtgatctgcctacctcagcctcccaaagtgctgggattataggtgtgagccaccgtgtccagtatatatatatattttttaataaaatgtggtctcactgtgttgcccagggtggtctcgaactcccagactaaagccatcctctcacctcagcatcctaaagtgctaatattgcaggcatgagccaccgcacccggccaataaaacattttaacttgtgtgaaaccaggtgtctttgcagaattaccattagtggcagcattttttctttttttgtgggcacacaaaataacagtgcattttaggatcagtgacttcttggaggtaatgagatctaaaaacatcttcagtctccacgaaggaggtagatgttgttaccctcaacccattttgtagatgaggaatcggaggctcagaggggcaaagtcctgtccaaggcctcacatcccatcgatgggtcaggaccaaccccagcaggctgggaggtggcgggaacctatggaagccacctgaattgtggggaagtggctacctttccttcccagcatcctgtaaatcaagttgagcttcagggcagaggtgctgagctttgacccctgaacttcactcctgtcttctgcaaagtgggaggaataagtgggccttctcagatcgaatgggtgaataatcggaacaggcttagcttgagcctgactcgtagccagcatttgccattgggagctcttgaatttggtttatttgtcttaatatagacagaagacattttgctgctgaaaaatggtaaaagaacagtaaaccctggcttgacttggaacatcattccagagtagtgtggaaacctccgttttgatgcttgctttttccttttcctcataggatggtccagcagtttggggtggattttgagaagaggatcgagggctcaggagatcaggtggacactctggagctctccgggggcgcccgaatcaatcgcatcttccacgagcggttcccatttgagctggtgaaggtagtgccccccggggctgggccctcccgtctctggtcaggcaccctcctgctggcctcaagccaggcctcctcccaggcaataaggtctcaagctcctacctctaggcctgaacttgtggtgggcagggtgtggcctggatgaggtgtccccatgggcttccttttctgacactcagctttgaggttttgggcagaacaatatgaaaacccctgtgtttttcctctgacaaaagccaatatacattctttgcaaaatacatagaaaatacagataaatttacatgagaagatgtccctagcatgtcattgaagaaggaaaaaataggcattggagccagcatgtgcaacatagcactgagctgatatatacaacatccttatgtatgaaactgaacatggatgtctgtctacaagtgtttctttgtatttgcaaggatgtttgcaaaaatgtcagccctgggtgctaggatttgggacttctttttccgtgtgtgtgtgtgtgtgtgtgtgtgtgtgtgtgtgatttgcttgaagttttatactgtttacaatgagcacatagcattttttattaaaaaaacaaacagttttttaaaatcagaggagcaagaccaaatgcagtggctcacgcctataatccgtgggaggccaagggggcctgatcacttgagcccaggagttcaagaccagcctgggcaacatggtgaaaccccatctctactaaaaatacaaaaattatccaggtgtggtggcatgtgcctgtagtcctagctacttgggaagctgaggtaggagaatcacttgagcccaggaggcagaggatgcagcaatgagccaagatggcaccaccgcactccagcctcagtgacagagccagaccctatctcaaaaaaaaacaaaaaaaacaaaaagaaagaaaaaagaaaaagctgggtgtggtggtgcatactgatagtctgaaaaatctaagtttacatgaatttatattcccaccaatatgatgagagagttggtgtcatgtcatgctttctgaaactgggttttaattaattaatttgtttgtttatttttattttttttgagacagggtcttgctctttcacccaggctggagtgcagtggtgcaatcacagctcactgcagcttcgaccttcctgggctcggatgatcctcccacctcagcctcccgagtagctgggactataggcgtgcaccagcccacctggccaatttttgtatttttagtagagatggggtctcactatgttgcccaggctggtctcaaactcctgggctcaagccatctgcctgccttggcctcccaaagtgctgagattacaggtgtgagccactgtatctggccagttttcaattttttaaataaaattttgacgagttaaatattctgccttgtgaatatagccacacgtgggagagaacgttccccagatgcacgcctgccacgggggcgccccgggtgcctccatgcatgtgcttggtttgtctcttctcagatggagtttgacgagaaggacttacgacgggagatcagctatgccattaagaacatccatggagtcaggcaagttccacgaggagagtcaccactgttccttcctctccgtggtgcgaccccccagctaattgggtcacccacacctctgagtccctaatcgttaggccttaagagggctcttggatggttttctgtagctgcgagcccctccctgagggtctccaagggcacatgagggtggatgtgtcttagtcctgcgtccattgcaggcttcagggctgtctgcagctcctgatcaaatagggcttagttcctgcccagtcggttggtgtgaacctcatgctaaactaagaatgctcactgcagatttgcctggggaggggcggggcggcactgaatcagggttttgggaagccagcatgagtccccatcatggcttcctcgtgagcctcttgggtcccctccttattctaacaaaggtagttgctccaggtgtctgcccttccatcgccgtggggtcctcgggtcaccctgagggtttccgggcagtggactcaggcatccgaccccacacatgacacaaccttcattccttgttggggacccggccagggccaatgaaattgctgaccatgctttgtttctctctgacttatctcccctgcccccgggtctggacggtttcaggaccgggcttttcaccccggacttggcattcgaggccattgtgaaaaagcaggtcgtcaagctgaaagagccctgtctgaaatgtgtcgacctggttatccaggagctaatcaatacagttaggcagtgtaccagtaaggtattgctccctcggcagggtgactcctgaccttgtggaaacgggggtacgggggtttggtatcaggctcccagcgcctcattggcccccactggtgccttttctccccatatcgctttgtgtccgtgaacttggcctctccccagaggctggggcaggagcatgtaggcctgggcccaggcacacaggggagtgccaggcctcctggactggccagacagatgcacagttgtccctgggaccctgataccaagcctagcatgtgtctgatgaaattggggtttcactgggctgttgctttgctgcctcctgggaagcagagagggaccccccgcgtcaactgctggaggctgagctccttgaagctccctggctgtcaccccttcttgaccaatgcccggcattctcagacttccctggagccaccgacttctctgtccctcagctccgggaatggcctgaatgccagcgacatcatgagagccagctggggtcctaagtgcccctgcccaccccctgcaccccacgctgtcccccaggggcagcccatttttggatccacttagtcacagtgcctctatgcgctctcgacgagccactgcctccactcagcaggacgcgccgggctcccccaacccgcgccaacgccgcgggcctggttcccagggcagcacgctttggccaagcagctgaaatgcctcccagtgggcagtctgtgcttgcgcgaccacagtgtccccagcgctccgggttgccagggaatttctgcttgagcccctctgttcttagtctggaaaagcccacatttgctgcttaagcttcttcgattagaaaagggagggggaaaacagtccaaacaggttggaaaacgctcgtcctagagccaggtgtcatggacatgaatgttagaggactccgcacaccttggctgtctgtctgtgcaatgacaaccccccgtggcccttctgtaactacaccccagaccgagcccacacccccaaaccccagacctctttgatccgaagcagcttccggggcaaatgcgggcgcaggctcccccatgcatggactaatcagatgactctcgtttcttctcttctctctgtctcctgtcctgcgtgtgtggcctgcactgtccctgggtgtctttctgcctcatcctgccctccgcatgacccaggacggggctcttcacccccgacatggcctttgaagccattgtgaaaaaacagattgtaaaactcaaagagccgagtttgaagtgtgttgatctcgtggtctcagagctggccacggtcataaaaaagtgtgccgagaaggtaacaggttttgttctcatctccgcatttgtccccgtcctccccctccatgtgttagtctcaacccgagcatctggaaaattcagcctcggcaggaacccccttccgcctaccagttgtcacttagagatgtcgccaccttgcattggcagatggaatggggggagtggcatcacacgtgggttgtggctgcccgtgggggcggtcagcctttgttgttgccaaacgcattgcatttactaagcagtgccctttcctggaacccctagagaaaggggtttcccagccagcaccaaaacagcaaaacacaggaaacacatcatctgtatagccctgcatgttctcacagtctaggccacctgagagtaaccattccattttccccgactcgtggacttgacccacactgcagaagatgggactcccctgtgcatgaggtctggttaagttggtgctgcagatgaagcctggggaggtgggggcatttggcgagtgtgtgccacagatacagtgatcaggagtggttctctgcaaggagttcctatcgaggctgatggcccagatacccgccttaccattctagaacagacgctactcactcacgctggcgaggcccttcagggttcctgctctcacccagtgctgggcaagaggggggtgccctgaagccctgcatggcaaacatgcccctgcttttctgctttcatgttgcctcctgcctcctgccccccggtcactggctggaaaagcagctctgctctcctgctgtctccggtccacggtgcccccactcttctgctcttagctcccagctggactcactgggggccaggagcaaggtgtgggctcggtgggccccctcatatctcattccccacccccctccgcattttctacctgtgtggttcatgttgcttcccgtgccacgaggaccccgccaatgcgaccactctgcttgttcccccagctcagttcctacccccggttgcgagaggagacagagcgaatcgtcaccacttacatccgggaacgggaggggagaacgaaggaccaggtactggccttttgtcttctttattgggtataatttacatgcagtaaatgtcaagtgtactgttctgtgcatgctgacagctgcatatggcaaagtaacccttacctcaatcaagatacagagcggttccgtcacctcctaaaatccctgtccctatcatgctgacagctgcatatggcaaagtaacccttacctcaatcaagatacagagcggttccgtcacctcctaaaacccctgtccctatcatgctgacagctgcatatggcaaagtaacccttacctcaatcaagatacagagcggttccgtcacctcctaaaatccctgtccctatgcccctttgtagtcaacctctcaaaaacccacaggccaggctgggtgtagtaactcacgcctgtaatcccagcacttagggaggctcaggcaggaggattgcttgagcccaggagttcgagaccaacgtgggcaacatagcaagaccttgtctctacgaaaacataaaaaaattagccaggcgtggtggcgcatgcctgtggtcccagttacttgggagggtgaggtgggaggatcccttgagcccacaagatcaaggcttcagtaagttatggtcgtgccatcgccctccagcctgggagacagagcgagaccccgtctcttaaaaaagaagcagcaaaggaaatccccaggccctggccaccaccagcccgctccctatcctacagtccttcaagtggactcccacaacgtaaggcccattgactcttgactcccttcctgccacccttcttccctccctccctcccctcggcgtctgcatttgggagccaagcgtgttgtttgttgtatctgtagtttgctgccttgattactaagcaatcttccagggaatggatggagcacagcaaggacctccacttgcctgctggagggtgtttggggtgctttttgtgttgtggttttttgtttttttttttttttttgagacagagttttgctctgtcgcccaggctggggtgcagtggcacgatcttgactcactgccacctccacttcccaggttcaagtgattctcatgcctcagcctccgaagtagccaggactacaggcacatgccactttacccacctaatttttgtatttttagtagagagagattttcactatgttggccaggctggtcttgaactcctgacctcaggtgatctgcccgccttggcctcccaaagtgctgggattataggggtgagctaccacgcccagcctgctttttctttttttaacatttaacgctttcttgcaaaggcatgcaagcacacaccccaagttgctgcctacccctcagctgagactgtcacccacgaagcactgggccgtccttatactctcctgcagccgcagcctcagcctcccaagtagctgggactataggcgtgagctaccacgcctggctaatttttgtatttttagtagagatgaggtttcgccatgttggccaggctggtcttgaactccttagctcaaatgatccacccacctcagcctcccaaagtgctgggatgacaggtgtgagccactgctcccagatctgttttgagtcactttctctcagttgtcctctgtgttctttttacaactgtttgttgaaaccagagcttaattaagcccttgcttgctatgtcactttgtttaaaatggtccctctccccttgccattgatggggatgaaatgggctcatttgtcctgcagggaggcgcccagttttgatttggccaattgctccctcagggcaccagtccacctatgcctcatagctgctgtagcttggaaattgtatcaaaagtctggaagagtctgattctttttgttgttactgttggtaagaatgctgccggcccttccacagcccctggtgcccacctgccatgctgccaggccggatctgagagcgctgggttgaggagactcaggccttactaaaccagccacgctcgctcccacagatggagcaccctggcattttccagcaggcgacaggtccgagtgccttgccctactttattctcaggaacttggaggtgcagtgaggggaagtgactggccaagggccaggggagtccagtgacgcgcatcccagcgcctcctccccagcagcctggcctgttataaatgggaatcaagccagtgagctgcctggatccatggttcccatagaccaacttcatcctgggcaaaagacaagaaggatgagggagggagagtttcagcaagtgcagtggactcataagccctgctcctcacatgagacctttctagcttgatagcttgagcgtgtgtgtgtgtgcgcgcgtgcacgtgcacgtgtgtgttttattttagtgttcataattggacaaattagcttcgcagttttaatgcaacactttgaacacgccaggcgctaaagactttacaggctggacacggtggctcacgcctgtagtcctagcactttgggaggccaaggcaggtggattgcctgagctcaggagttcgagaccagcttgggcaacacggtgaaaacccgtctctactaaaatacaaaaaattagccaggtggtgtggcgtgcgcctgtggtctcagctactcggaagactgaggcaggagaattgcttgaacccaggaggcagaggttgcagtgagccgagattacgccattgcacgccagcctgggtaacacagtgagactctgtctcccaaaaaaaagaaaaagaaaaaaatacaaggcagtggcttgcagtggttcacacctgtaatcccagcactttgggaggccaaggtaggaggatcacttgagcctaggagttcaggaccagtctgggcaacatagtgagaccccacctctacaaaaaaagaaaaatcagccaggtgtggtggcacatgcctgcgaccccagcatcttgggacgctgaggcagggggttgcttgagcccaggagtttgaggctatgattgttctactgcactccagcctgggagacagtaagttcttttctcaaaaaaaaaaaaaaaaaaaagccaggcgcagtggctcatgcttgtaatcccagcactttgagaggccgaggcgggcggatcatgaggtcaggatttcgagaccagcctgaccaactcagtgaaaccctgtatctactaaaaatacaaaaattagctgggcgtggtggcaggcacctgtaatcccagctatttgggaggctgaggcaggagaatcgcttgaacccaggaggcagaggttgcagtgagccaagattgtcccactgcactccagcctgggcgacagagcaagactccgtctcgaagaaaaaaaaaaaaaaaacaaaaaaaacaactgcacattattaaacccttggcagttgggcctcctgtcaccccattccacagctcagtaacgtgaggcccagggtcacacggccaattagtggctcaatcaagactccagaccttggggacagcggccctgcctgtgactggcacattgggctgcgtggctgtgctctgttgtcccaggctctgttgcctatgagggtgtggggagtgcgacgccagcccctgttctcctgtctgggaagcctcctggttcccacgccttccctgctggcaaggccaggaaatgctcttgccgctgcccccccttgccaggcttggccttgtactcacagtgacccccgctctcccccagattcttctgctgatcgacattgagcagtcctacatcaacacgaaccatgaggacttcatcgggtttgccaagtaggtacttttagagactggctggtcgggcggcaccaatcctcactctcagatccaaggaggtgactgagttgggattctctgagagggcaggtgtcagacagtctctgtcgggggtcctggggtgaaggcagagccaactgagaatatctggaagctctcctgggctgatagtggtccactgtccccaaccaacacgccttctgtgaggcatccccatggttagtttagggagagggcagtgctatgttcagatctgcagggagagggggaagccagccagctgctgcaccccctctccttcaggacttctcagagcctttagcgaccagtgtgcagcttttcccagactctgccacttcatggacagcatctcatgggctcagggctccggaagctgctctttgggaaatgctgcctggggtctccctagcttcaaggcatacactgtagatttaaaccagaaccttccgtggcacccagatgagggcccacatcggggagccctgatttcagcaggatgtcgattcagtgtgcgtggtctcaggcatcacccgctgattccttcagccccttggcatgcttaggcctcactcagattgttggagaggctcacgcaggccttcctgcctgaggcaggccgggtggtgccgctggtatgccctctcgctgggccctgtgatagagcagtgggcaaacccacacccagctccccaccctcagaggaagaccacatgcagggaaccgatggggacccagggcgttaaggtgtagtgtgcttagtgctgggcggggccgtgcagggcttgtgggtgtccagagggcggccactgggccttgccttgaggggtcaggcaggcttcctaggggagggcctctagagccaaatctcaggctatggagtcaccagatacaacatttatcggtgcacctgacaaagctgattgaggatctgttccgtgctgggcaccaggtaggtgaggagaagggaggaaggaaaacgaaggaatgagggcctcatcagaacccctcctagagatgagccgaagtccctgactgggcctcccctgcctgtgggtggcagcccccggccctgtgctcccggccgccgggtgtgtgtgggctcacagcgctggtccccatctttggtttgctgctgttttcctcaccttgatgtctctgcttctcacacttcatccacagttccttctcacaatctctcctgtttttcctttgaccactctttcctctggattcctgggccttcccacttaccccagctgttactatactgagcagctggtgacctggtgggtattgcctgctgtgtgcctttgccctggtgtgtgaacggggtacgccctggctgggtggccccagccctgggtgggacatccctggggcccgctgaagagctacggggtgctctctcagagccagggccagtgctgggcctctgggccaggaccttgaccgcaccagctgtagcccctgctgtttcagagcctgcaggctggggaggtggagtccttaaacaaattgtcacaaggatgatgagagtaggaagagagggtaggggatagactatgggaaaggggagctgggaatgtggcctggagagatcttcctgaagaagtcaggtgatgccagggggacccagagaattggacccagggaaggaaggctaccagaccaggcaggtagaggtaagagagccagcggccaggccccatcgccaggagggccctgcaggtccaggggaggattttggattttcccccaagacaccaggatgcttctgattagatccaggcccaggagaggggccaccttgtgggctgctatttgagggagccctggcaaggatgggagccaggaggcccttaggaaatagcacctctggaacctcactgtcacccagccatcactgtggaggttggctcagctcagtgccacctccttcagatgctgttgatgaaaatccttcttgtgcttgaatgttctgggcttcccattgccctccaaatgtatattataaacagggcccaagcctggcgcagtggctcatgcctgtaatcccaatactttgcaggaggccaaggtgggtcgattgctggagcccaggagtttgagaccagcctgggaaacatggtgaaaccctgtctctacaaaaaatacaaaaattaactgggcatggtggtggtgcgtaatctcagctacttaggaggctgaggtgggagaatgacctgagcccaggaagtcaaggctgtgctgagccatgatcacaccagggctctccagcctgggtgacagagtgagactctgtctcaaaaataaataagtaaataaatagcccagataagaagccctataataaacttactgaatgttgggaatatcactggataaaattctgcctttgttcttagttttccagcctttcctgatctagaaacagaagcctactttctcccttatcctacagccaacttggactttaaaacaaaacccccgaggtagtcagcaaaggaaggtgaccaagctgacttgcttttccatattgttctgaaagtttcagccaaagcaataagaaaagacaagaaaatatgatggataagtaacaggagatatatgttgtttgcaagtggtgatatgattgtcagagtagaaaatatattagaaccgtaaggtggtggagtaggtgtccacatataaaatatagtgggatttgtctatgccggcatgaactagccaggaagtaggatggataaagaagaaaagagatctgggattgtggatgaataaggaaccttatagaaacacaccctgtcgaccttggatgtcctctaaatttgggtcaggagtcatgcaagatatgtgtcatttcatgaccagcagctgtcccacagtctgatgtctaagactggatggctctgtggttagagccacttacaggctggtgttgggatcaaatgatgagaagagtaggaagaagggccaggtgcagtggctcatgcctgtaatgccagcactttgggaggtggagccaggcagatcccttgagtctaggaatttaagaccagcctgggcaacacagtgaaacctcgtctctacaaaaaatcaaaaattagctgagcatggtggtatgcacctgtggttccagctactcgggagactgaggcaggggaactacttgagcccgggagggtcaaggctgcagtgagctgtgattgcgccactgcactcatcttaggcaacaccttctcacacttccccttagaaactccgggattctagtgacatctggaagtaacctgcgctttagtaagtcggctgagatgagggcctagaagcctcaattgaaccagatacatttacttgttccgtgtgcccaggccgtttcccttgcgcagctctgtgtgtgcagggggcttctctctgcctctacctgtggctgctcacttggtccccagggagagaacggccacattcgcctcttccccttcttcccccccggcatcttgtccacgtgaaccctgtctgttctttggtttcagtgcccagcagaggagcacgcagctgaacaagaagagagccatccccaatcaggtagcacacccctctgcagtctcccgctctaccctgggggcgggaggacgctaagtgacagctaagcccccgtgatggagctcggcctgtgtaaagccccaccccacagcctcagtaccaggccatctgctctctctagaggccacttaggaattgataattctgggagatggcctgagagccaacactctggcagggcctagtgggcacattttacccacccagaaggccctatgtgccatccaaggccagggttagaacttgactcttggctgggcacagtagctcacacctgtaatcccagcattttgggaggccgaggtgggaggatcacttgaggctaagagtttgagaccagcctgggcaacatagaaagactctgtctctacaaataataatatttaaaaattacctgggagtggtgggctcatgcctatcaccccagctacttaggaggccaaggtgggagggtcacttgagcccagcagttcatgaccatccggggcaatacaatgagacctcatcttaaaaattaataataggctgggcacgatagctcacacctgtaattctagcatgttaggaggctgaggcgggcggattgcctgagctcaggagtttgagaccagcctggctaacatggcaaaaaccccatctctactaaaaatacaaaaaattaaccaggcgtggtggcacgcgcctgtaatcccagctactcaggaggctgaggcaggaggattgcttgaaccttggaggcggaggttgcagtgagccaagattgcgccaccgcactccagtgtgggtgacagggccagactctgtctccaaaaataataataataaagatataaataagaatttttcccttgagcgggggtctgtgacctctttgagctttccaacacagccccagggattgggagcccctaggtgagagccgctggaaactacattgtcactagcagctcaggggagcttgggatagttgaagccccacacctggagaagccctgagccacaaagggttgtaccttgacatcttaacccagctagaggccttgtgaaatatgaacggctgtatcaatgcctgccttcagtaccttattattattattattattttgacacagagtctcgcattgtcacctgggctgcagtgcagtggcgcaatcttggctcactgcaacctctgcctcccaggttcaagcgattctcctggttcagcctcctcagtagctgggattacaggtgctcaccacaacaccaggctaatttttttttatttttttcttgagatggagccttgctctgtgtcccagctggagtgcagtggcacgatttcagctcactgcaacctccacctcccgggttcaagcaattctctgcctcagcctcctgagtagctgggattacaggcgcccgccagcacgcccagctaatttttttgtatttttagtagagagggggtttcaccatcttggccaggctggtctcaaactcctgacctggtgatccacccgcctcggcctcccaaagtgctggaattacaagcgtgagccatcacgtccagcctttttttttttttttttttttttttttgagacagagtctcactctgccaccaaggctggagtgcagtggcgcggtctcagctcaccacaacctccgcctcctagcttcgtgtgattctcctgcctcagccttctgagtagcgacgattacaggagcctgccaccacccctgactaatttctgtatttttagtagagacagggtttcaccatgttggccaggctggtctcgaactcctgaccccaggtgatccacccgcctcgcccggacaaagtgctgggattatcatgccagcctttatcattaatttttaagaaaacctggacgggcacggtggctcacacctgtagtcctagcactttgggaggccgaggcgggcggatcacctgaggtcaagagttagagaacagcctggccaacatggtgaaaccccgtctctactaaaatacaaaaaattagcctggcatgatggtgggtgcctataattccacctactcgggaggttgagacaggagaatcacttgaacccaggagatggtggttgtggtgagccaggatcacaccactgcactctggcctgggcggctgagcgagactccatatcaggaaaaaaaaaaagaaagaaagaaaaggaaaccataatcttcgcaaaatttctgcctatgtccctcccttctccccattgggcaggggtgggggcggggactccaccatgtaccttgcacgatcatagagcctactggaaggaagaacgtaaccattgcatgatttatttttgcgcttgccgtaggtaatacatatgttgttgcttttttgtttcttgagataataatgaattaaatattaacaccatgaatatgattaatagcatgtaattttttttcttttgctgttttttcccctgctcttctcttctcctgtttttgtgcttttcctgctttttctttgtccccttcacgtcccttccatctcttttcctttgcctgctcttccctgatttacccacaaccctaactttgcatattcaaagggggagatcctggtaagtacatgcttagtgtggtagcaaacattagagaatctagtggtgatggagaccccgcccacccctaatattccctgttccccatcccctccaaataacaaaaatactaaaaatcgagctaacctggaaaccccatgccgcagccggcgctggactgcacgttgccctgggtataagtcgactcacacaggcactaactggaccgccacccttgaaggcgcacttctgcagccagttcctggcaggttttcctggtttcctgtaggtcagggatggcaaatacttacacaccgcccctgcctcccctcacatccctggctgtggaagatctcgcttaagccagaccagaattcattcttggcactgcccctcctccttctatctcctatgcagatgtcactcatggatcagagcatatttttccacatggcagaaatcttgccctcttgtgcccatggcagacatggctagttgatctagcactctttgccttgtgccgctcctctagcacacgcccatggcagacattgctaagcaatcctagcattctttccaaataagcttgccagcactcctgttctatagcagatgtggctaagtgattaaggtattgtttttctccctatatgataccctcttctctatgcatggcaggcatgactagtcaatcaggagcctctttcctagatgctgcctcttgtcctccagataaattgatgaggctcttctgttccacttaccctttctcctatccttggcctgtgacaggcaacactaattgatcctagcaccgtttcctgccacgcccagaattctcaccacagtgcttcaggtatcttgtaccagtcgattgacatggctcccgagatgaatcatatttgctgtccatccctgctgtgggtaacacctccttcctttgtgcagaaccctcagctggggcccagtgtggggcgtgagatgggcgtgaggcccagtccagcccagcccagcgggaagcagcctgctactcatagctgagaactgaacccagctcaaggagctcacctctaggcagccggcctcagcccggctcttacacttggacagcacagcctgggcctccagtcctagcaggggctcccttttgctggacattctcccactgccagccaccaaggcgctggtcatccctgccactgccctctggcggggctcttctggcaatcccagggtctttcttgtagctgagccgatcctatgccagggcctcgctgctcccagggcctgggtgtgcagatagggccatgggtggggcagtgacgggaggaattagttggcctcgggcttgtggttttcaggttcctcatgtgttccccccagtccctttgaatttgccaggccaagaccaggaacctgcttctcccttgtaccccaagaggtttaggggttcctcttttcctaccagaggccacatagcccagccccgtcatgagcgtggccgtggcctctgggtctcccatctgtggttcccatctctacccgggagactcaggccaggaccctcacccaggaaagagactggagcagcctgccagaggatccctgctttgccgccccctgcctgccctgccacccataccgccccatgtgcctgcctgcctgtcactgtgcaccctagcccgcaacggcctgccgcctcttctgtctctcccacccctacttccttctaagcccagtcccattgggatgtgtcccttggatgcaaacctgactttctgctgaggcctggctgctccctttctctggctcacaagtggtggatggctaacgggcctttgtttgccacccacagcttgcagctccctagggtgggattttgtctctgaacccgtgtggagaagggcacctcagggcttctgccagacgtcctgccccaaggcttggtgtgccatccccagcatggccccgatcagtgccctggccctgtggccatgcaccccaaagtgtagcgtgggccctgtgctccagctctgaccaacactaaccccggctggaggcaggagagccaggccaccgaggggtgtgcgggcacatccctctccttagaaaccgggccaggcctaggagtatggaggcctcacatttctctgggggagcaccgacagcctgtctccctgttttccctcacctggttgtcattcagtcatggaaccagggtctactaagcactcgttctgtgcccagctctgggctgagacaaggcagtgcccccaccccgctccccccgggtgaatggaggcattcccagactgccagacctttggtgctaacaccaggacgtcctggacagaccaggaagagctcgtcactgcgttcccagaggggatgctgtgacctcacaggggctgctggcctcagccccctcacccaccaccaggcagcccgtgaatggccagatgccaggggtcactgcctgctccaaacaactgtgagagtcctgtctgctcatcccagggagggataagtctgtacccttggccttaacaaggggcgcccggtggcatctcatgctgtccccagcctgggcagtgacttctgcatggtccaggggtccctgggtactctttagccacctccgtcttcatggccacctggggcttagcactcacatccagccaccaaggagccgctggagctgtgggctggtggccctggttcagaatgtcaggcccggggtgggtcggggtagtccggatgaagcccctccagaggaccgcccccgactaggacagcatctgggccccagagggattcctggaggccccatctctggcgctcctgccgtgccgtgccctgccatgccctgcactgggggatgcaggccagcccttcgcagctgtccatggccatgctcagcccaccctttgtagcttggccaagtctgtcagtgcctgggtcccaggccgccctgtgcgtgcctccgtgtgcttcctgcagctcccagggccctcgtcctgagtggggtggggggctctgcccacacatgcctccagcggccagggagcatgggagcacagcccccaggctgcctgccgttagttgtcaggtgagtccctgcgcaggcctgggttctgacccccacgcagatgacagctacagccacacaatccccatccatggggtctcccagcctgaaaccctgatgtgtcagtcaaaaggatgaccaccaggcttgcagccagcttgggacatgagccgcgctccttcaatgtccttggggagggcccctgggctcacacctttgaccctagccctctgtgtggatgctacccttggaaccttatctcacgcaaacaagtgcagttcctcagatgtcacatttcatgtgccacagccccacacacaagccccagggactcctcccatgggcccctttccatcaggcctctgtgagtctataccccatcagcccctggcccagtgagtctgtctgtccgcccacctgcccaggtggcgcctcatgttggtttcctgctggaaatgcttgggacagggtggaactgggtttcctgggctttggggctggaggtgtctctattgcggtccctggcttcccactgagctgtgggcaaggctgctgcgctgggggatggctggggcacggagcgaggttccctgctaagctgcgcgctttcccccaggtgatccgcaggggctggctgaccatcaacaacatcagcctgatgaaaggcggctccaaggagtactggtttgtgctgactgccgagtcactgtcctggtacaaggatgaggaggtgagtggcaggcgggagcagggctgctggggtaggtggggcagccagggaagagcgggtgggcgctccctctgggcagaactcagtcactgcgccactctgccctgagtcaccattaggactgtaactcgccgggcacggtggctcccgcctgtaatcccagcactttgggagggcgaggcaggtagatcacgaggtcgggagtttgagaccagcctggccaacatgatgaaaccccgtctctactaaaattgcaaaaattagccaggagtggtggcacgcgcctgtaatcccagctactcaggaggctgaggcaggagaatcgtttgaacccgggaggcggaggttgcagtgagccgagattgcgccactgcactccagcctgggcgagagagcgagactccatctcaaaataaacaaacaaacaaacaaaaaacaaccgtaacccagggctggagagcagccaccatgtgccaaaaggcttacattgtacctggcccccatgggaccagctcctagagtgcaaaagggagatggagggtgatggagtcactagcaggctagaaacaggccctgacctccagtgccactgtgactgccccgtgctcaagagaaggggccatgcccaagggtcaggggctcaggcatgcagccagcctccaggggcaccggggttccatcacttacacctcagtcaggccccttgcctctctgggcctcagtttttctatctgcgaagtggtctaggatggtccctgcccactgtgcggtgcttggccacagtgtgcagaacgatccccacatgctcgtcattatgggaaggaagtggagaggcccctgggtgatgactgcagggagcagtgttgagtgctgagtcatgggagggactcgttcactgcgagtgagggggcaggccttgagcaaggatactgccaaccggcctctgctctccatgctgacccagcatccctcctgatggtcctatgtagaaaaagatacataatgtttgacatatttatggggtccctgtgatgttttattagatgtacagagtatgtaatgatcacggcagagtgtttgtggtgtctgtcactttggtattcctcattttcctgtgttcagaacagttcaggtcctctcttctgactactttgaaatacacaaggctgggcacggtgcctcaggcctataatcccagcactttgggaggctgaggtgggaggatggcctgagttcaggggttcaagaccagtttgagcaacatagcattaccctgtgtctattaaaacccaaaaaaaattagctgggcatggtggtgcatacctgtagtcccagctactcaggaggctgaggtgggagggtcacttgagcccaggagatggaggctgtggtgagctatgatcacaccactgcactccagcctgggccacagagcaagacactgtctcaaaaaaaaaaaaaaagaagaagaagaagaaatagacaatacgttgttgcattgttggctgggcacagtggctcatgcctgtaatcttagcactctgggaggctgaggtgggtggatcacctggggtcaggtattcaagaccagcctggccaaacggtgaagccccttctctactaaaaatgcaaaaattagccaggtgtggtggcgcacgcttgtaatcctagttacttggggggctgaggcaggagaatcaccggaacctgggaggtggaggtggagtttgcagggagccgagatggtgccactgaactccagcctgggcgacagagtgagagactccctctcaaaaataaaaacaggctgggcgcagtggctcacgccattaatcccagcactttgggaggccaaggcagacagatcacttgaggtcgggagttcgagaccagcctgaccaacatggagaaaccccgtctctactaaaaatacaaaattaatctggcgtggtggcgcatacctgtaatcccagctactcaggaggctgaggtgggagaatcgcttgaacctgggaagcagaggttgcggtgagccaaaattgcgccattgcactccagcctgggcaacaagagtgaaagtgtgtctcaaagaaaaaaaaacaccagacaattgttgttaactatagtcttaactgcagtcaccctactcttctgttgaacaatagaagttaatgccttttctctaactgtatgtttgtacccattaaccccacctctctttaccccctacttgtccccacctttcccagcctctagtatttatccttctactctccacctctgtgagatccgctcttctaccttttatttttttagctcccacgtatgagtgacaacatgcaagatctgtctttttgtgcctggcttatttcacttaacataatgacctccagttccattcatgttgctgcaaatgacaggatctcattcttttctatggccctgatcaacccgtttcttgcttaattctcttgacgtaaccatggcttagtggcctggaagggaagccacttctgtgtgatagcttgttgctactctgatgcggtccaggttggctttcaagagtccctggcaaagagagctgtgtttttctcattgtcctggttgctctgggagaagactgcaggctgtcctgtgagccatggctgtgttatgtgggcaatggatttgcgtctgtaacagaggcccaaaatgaaggctcttaaagagatgaagtctgtttcttgctcacgtctcagtgagcttggtgaccctgtgctgcaaggctgtccagggcctggctccgcgtctcctgttgccaccttaacacagggctcccttcatagtttaaaatggctgccccatacccatcaccatgtagcctctagcagcccaagaagggaaagaagggcctctgtgtgtgggaactgtgagtccagctaacagttctagcactttctaagaaggaagtggatattggttgtttctgagcgtgacagctggggcttgacacccggaagtcaccaggatattggttgggtggtgtcaacccttcgtgtctcgtctccccacctataaagtcaggactctggcctgtcccctctggactgcgggaaccagtgggggaattctggtacttgagcccaggactgtgcctggctcactgcatgtgtcccaggttttgtcctggtaactaccagcatcaagtcctcccagctcctctctgtaggagggaacctacccacctacccccagtgcacagaggaggagctggaggctgtgtcaggtgcagggccagctggccagtccccatggtccctgggatggcacagccaccaactcagtccaggcaacctcagtggagaggctggggttgcctgaggcccctggagccgccctgcctggctctcttccccttgggtttgggggaatgctctgtaggagtgccccccactggggacttgctggcacccaacccagccccaggataggcaggactgggcttggaagtcccagacttagagagaaggcaggctggggggccccggctggccccagggagaagcaaagagaggcgggcctcttggctatggacccctgctctgtgctgggctcattggctaagagagcccactgaggccacacctgaggagaaccctactccccgtgaggaaaccctcacgcttgctattcgggtggctctgtggtcacccccatctaaggctctgagcggtgacttgccccacatcatggagcgggggagggtccccctggggtggaggcttccccagtgcacgtctgcgggcccatgctccctgacctgagggacaccccagcccgacatccgaacacctccgctgcagcccaggcctgatgtccccttgactgaggacattgggggtgaaaggatcatcccgctccacatgaggccagacgctcatctctggaatgttcctgaaacctcaggagccctgaggcttctgcgggactctggggcgctgtttctaaacccagggtggtggagtctgctgagccaccatacaagcatttctggggtccctgtggaagcttccagaacctcagatccagcgaacctcatggggttgggatgtgggaggagtgtggagccaggcgtggtctgcagccttctccccgcctcaggcacctctaggaactcacgtgtccagatcggatggctcctcaaaatggctggggtggggtagggtgccctttctctttttctcccctctttccgccttgcagtgagaaaccagcctgcgctgtggtgtgtgggctgtcaggccggctgagagctggtgccctgcctttcagttcagggctgtggggaccttccagggtcccctgggtgggaatgccaggcctggggcagcgagccttggaggagcctctgggcctgaacctcagcctggcagctctctgcctggcagcattgcaagtctagttttcagatctcctcttccttcacgtgaggggcccttcgtgtttttctcatctgagagttgaaagccagagcccccgaccctcccgtggagccccacactggagtctggagcagcagtgggagaagggccgggcgccggccgtaatgagaaacagccgacctgtgaaaggggccctgtgtgagccccagacacaaagcaggctccattcaggagggggcagccatggaacctgacccccgccaccacccaagttaggatcccagcagggacccttggagtcacacacgtggcagccacccctgaggaggaggccaccctcttagatgcctcagtgagacacaagacatcaatatctctttatttaaaaaataaacaagacatttacagccatggggtggggatggcagactgatagggccagggcctccaacccctcggccggcctcggggctccctctgcctttccccagtgcctcttctcccacccaggccctcgaatcttctatgcgaggctctgccacagtgggaaacggggtggtggaaaatgacactcacctgccggcgagtttggggggcctgtctcgacgagccgctcacccaagcccagcctaaccaatgtgcagactactgtacacattgagagcctcctgaacaggtagtctgaacactgggttggcggggccggctatccatcctgcagaaccccccaggcagacgctggggccaccaggccaggccgtgcctcagcacctctgagcagccaaggaaaccaccactcttcccgagacgatccgctctgtcccttctgacgtggcaaggctggggccggctcgcatctggagaaagttctgggttttcaggaaatcctaaagagtgggggaggcggagcaggaggcagggtttgggatcgtggcttctgggctcaggaggaatgtctgactctttgggggtcgggggtggggaggaggggcgcacacacacgtgtgtgtgtgtgtgtgcgcgcgcgcgcacgcgtgcgtgccggcagcaccaggaaggcggccactgatttctcggcggaatcgcactgtaaacagttccagatgtggcattagctggaatggcctgtgactcagttacttggccctgctggctggaagcttccggccgcgtgatatgatagggtcagggcagcaaaggcccttgggcaaacgtccgagccgggggcagggcttctgcagagccccctcccctagccccttctaaagcccccaaaactcttccccgaaaggtgggagggacccaggccctgtgttacccagccttgcctgggatgacgggtgcaggctttcttcatcaccttccctcccttgggtccgcagcggcatccctccctccatggccaccgggcccctctcctatgctctgctccctccatggccaccgggcccctctcctatgctctgctccctccatggccaccgggcccctcttcctatgctctgccctacttctttgcctagagcctggcaggctaatcctggagccgctcacaagagcaaccaaagaaaatcccgggtgctcatgggcaccagctctgcagtgggcaccaagctcctccatcctccttggatagatgaggaaactgagatgaaatgggaggtggcggggaagtggcttgcccgagggcacacggccaggaaagggcagggctggcatcacctcaaccatgctgagctcctaacgccctgaggctgagcccatgtgccaagcccactgcttcatcctggctccccttgcaaagtcctgacagtcccagctggcccccacttgccagggagcccccgctgccttctccacagtcactgtggctgctcctgaacttggaggcggcagccaggttaggctttgtgctggggcagcgcagtgaggggacatgagaggagtttccagagacggcccagggagaagaagggccaggggcactgtggggaggactgggctttgggtcacagagacctggcctctgaagtcctgctgtggcttgcgctgcctgccgtgtggccttcggcagccagcttccctctctgagctaggagggatccgtgaactgagaccaagcagtgcatggcatgggtccccaagagctgctgctgtggcgggtgggcacacacatcactgggtgagtgtgggactccagggtgccacccccagctccgtgactcgccagccccttgcccctggccgaggggcccacctctgagctgcctccctagcagtctggacagccgtggctggcacttggtgcttcctgaacagggccaaccttagaaagcaagtgatagggcaggtgcggtggtgcacacctgtaatcccagcactctgggaggctcgcttgaacccaggagtttaagaccagcctgggcaacatagcgagaccccatctctattaaaataatgataatgataataataaagaaagggagtaaggcttctgcagcacctggcccaggacctatccagccccaagatgtcctaaagcggccaaggttgaaatcccagccctgctcctctctgcctcagtcttcccctctgtaaaatggcatcacagaggtaactcactcctaggctcgtttcaaagatggagcccagataaaagttccattcacttcgtgcaaggcgaggggcagttgtgttgtgcgtgccgtcagccacatgtcagcagtgaactcaacaggagtccctgccctggagaaacttgagtcagtccagtggcagtcagccacctaggtcaataagcacaggcagtcaggcacctaggtcaacaagcgcaggatacgtgacgtgttgtgtgagggaaaaggaggatggaggtggggagggtgcgggtagagttagggcaggagggagccatgcaagtgtcaggatcaggcagtagcccggtcgtccgaaggccctggggtaggaacccaggtgggatactcagggagcatcatggagggcagcgtggctgggacagagtgacggacggggaagggccggcagatgggctcatatacagcagcgaccagcattgagaagcccccggggctggtggtggcgcatgctacacgctctggcctggggcatcctgagttgtcacgtggaccgctcagggtgactcttttccctccaccctcaggagaaagagaagaagtacatgctgcctctggacaacctcaagatccgtgatgtggagaagggcttcatgtccaacaagcacgtcttcgccatcttcaacacggagcagaggtgaggggcccaggggcctggggatggctcggggtgaagaccaatggcctcattcacactccacaaccttcactgagcactgagcacctggctgtcagcagtccctgcccttgggacccagcttttagaaaggggagtcacgtgagaaatagcaaatgccagggatgcttcccgtgctgggtcagagatgacctctctgggcagagatgaggatgaaggcaggctccgagtcagtgggagccatggagagttctgagcacagggtgaccaggacctggctcaggtgcttgcaggagccctctggtggctgagagggaaacagtatgagagggtgagagatgggggacgagggcaaaggccgctgccttgtccaagtgggcgatgatggggccagaacccatagggaaggagggtgcagattctgggtagaagagtcaggcggagccctggtgggcatggatatgagagagaaaggcaccaattgtgaccctgagtacgtgggcctgagctcctgcactgcccagctgctgccattggccgaggtggggaaggcagcggcaggtaggcctggagacagccaagagctccatttaggccatgccaagggagagggtgcatcagggaggcacctgggtagatcgaggagtgtgatgtccaggaacgagctccagtctgggatgtgaactgggcagtcaccattgcgtggatggtatttcaaggaacgaaaccagatgagctcccaggagagtgaagctggagaatgggaggccccaggaagctcacagtacatctgtcccatgaggcgtagctggagactttagcagagacactgctctcaggaagaaacccagctggcaggagggctcttcccatgctcacacaatcacgctcatccaggaagcagggcccacctgagtcagggattagctgtcagtaaaggcccggtggtaccctgagacctgtaggcaggcactgacgtcctccctgctggccccagaacctccttgcctactgcttggctacacccaccaactccagctgagtctcctggttccctcctgctttgctctggctggcctaaagctcgagacccatttgtccaccagctggccgtgaaaaccttcatagctcttctaggcttgcccctggccatatgacacctggcagctgtcccaggtccctgagccgtgtgcctcctgtacagggagggtgacaatattatctgatatatcttttaagagcaggttcaggaaacccagagtagtagctgcaaaaacaagataagatggttgatagttttttgtgtaaattaagtccagactttagtatcccgggcaaagtggagcagctccacaggcatcagggtccaggccctgcatgttcctcaggattccacctgatatgcagaagccgagctctgcggtgggacaggcctgccatgaaatcctgactttttttttaaacggagttccgctgttgttgcccaggctagagtgcaatggtgcgatctcagctcaccgcaacctctgcctcctgggttcaagcgattctcctgcctcagcctcccaagtagctggaattacaggcatgcaccaccacgcctggctaattttttatttttagtagagacggggtttctccatattggtcaggctgggctcgaactcccaacctcaggtgatccacccacctcggcctcccaaagtgctgggattacaggtgtgagctactgcacctggcccaaaaccccgacttctacttctttgtccaaaatggctgcccagactccagccattgtgatgatgtcccaggcagcagcaggaaggagaggaggagctacaagggcatgcctctccccacacaacctcatccagaggtcgttcggggcagccacttgctgaccacaaacccaactctcacttaaaggctttgtgggcagcttggctgtcttaaccacacctggatgtgggacaggaaaatgtgcgtggcatgtggcacggggcctggcctgtagaccaccatctgcaagcactgtttagcatccattccatttatctcccagctttgagaccctggttcttttttctttttctttttcttttttttttttttttgagatggagtcttcctctgtcacccacccaggctggagtgcagtggcatgatctcagctcattgtagcctccacctcccatgctcaagtgatcctcccgcctcggcctcccgagtagctgggactacaggcgcacaccaccatgcccagctaatttttgtattttctgtagagatgggggtgttgctgtgttgctcaggctggtctccaactcctgagctcaagcaatccccctgtctcagcctcccaaagtgcaggaattacaggtatgagccaccatgcctaaactttacaaaaatttttttgttttgttttgatacatagtctcactctgtcgcccaggctggagacagtggcacaatcttggctcactgcaacttccacctcccaggtttaagcgattctcctgcctcagcctcccgagtagctgggattacaggcatgcagtaccactcccagctaattttttgtattttagtattgacggggtttcaccatgttggccaggctggtctcaaactcctgacctcagttgatcctcctgcctcagcttcccaaagtgttgggattacaggcgtgagccactgtgcccagccaaaactttttttataaaaaacacacaggccgggcacgggggctcacgcctgtaatcccagcactttgggaggccgaggcaggtaggtcacgaggtcagaagatcgagatcatcctggcgaacacggtgaaaccccgtctctactaaaaatgcaaaaaattagctggggtggtggcaggtgcctgtagtcccagctactcgggaggctgaggcaggagaatggtgtgaacccgggaggcggagcttgcagtgagccaagatcgcgccactgcactccagcctgggcgacagagcaagactctgtctcaaaaacaaaacaaaacacattcgggcacagtggctcacacctgtaatctcagaactttgggaagccgaggtgggcggatcagctgaggtcaggagttcgagaccagcctgaccaacatggagaaaccccatctctactaaaaatactaaaattagccaggtgtggtggcgcatgcctgtaatcccagctactcgggaggctgaggcaggagaatcgcttgaacccgaaaggtggaggttgcggtgagccgagattgcgccattgcactccagcctggacaacaaaagcgaaactccgtctcaaaaaaaaaaaataaataataataataataataaagttctggtggacagtgctgctctgggctttcctgaaaatgccccagtgggagcttcccagccacagttggtgtcgagggtcacatgcccacctctgggggcccaggaaaagagaagagtcagctgatccaacagaaacaaagaaactcagacacttgccgagcttgtgcacagcgctcttctgtgtaggcgtcactcacggtgacccctcagcatgaccaggtgaagcctgggttgggtttgggttcctgatcagtcagaaagacccctagagcccattcctctcggcagtctgccagacccatggcagggtcaagcttgtgcccctccttccccacccccccgcagaaacgtctacaaggacctgcggcagatcgagctggcctgtgactcccaggaagacgtggacagctggaaggcctcgttcctccgagctggcgtctaccccgagaaggaccaggtgaggagccgtcctgcgcagccaggcccagagcccccacctgggagaggaagcagggctggctttccccaggacaggtcattttcaggccatgttagccaggagtctctgaaatcatgtagcagatgcccacttgagcaagcaaaggagaaattgggggtactttgtcatcagggcccagaaagttccctcacggaagccagtgaccggggcacacaggggatggggtcccacttgctttgttctcttctcttttccccttccatcctgaggtagagtgaacatggccacccttggccccaatattaaaatgccttgccgggcacggtgggtggttcgcccctgtaatcccagcactttgggaggctgaggtgggcagatcatttgagctcaggggttcgaaaccagcctggccaacatggtgaaaccccgtctctactaaaactacaaaaattagccaggcatggtggtacgtgcctgtaatcccagttactcaggaggcttaggcaggagatcgcttaaacccgggaggtagaggttgcagtgagctgagatcacgccattgcactccagcctgggcgacagagcaagactccatctcaaaaataaaataaaatgtcccaaggttgggtgtggtggcttacacctgcaatcccaacactttgggaggcaatgtgggcagatcctttgggcccaggagttcgaaaacagcctgggcaatgttgcaaaacccttctctccaaaaaatacaaacatacccaggcatggtggcgcacccctgtaatcccatctactccagggcgctgaggtgggaggatcacttgagctctccctgggaggttgaggctgcggtgaactgtgtttgtgccactgcactgcagcctgggtgacatagcaagactgtgtcaaaaaaaaacaaaacaaaaaaacaacgttccaatgcccaggtgaggggatccaccccagcatcagccagggtcaccccattgtttgggcagctctggcccagggcaagcaggcctatctggtgccagtggggctgtcaggggccagcctgaggtcagttattggtgggacaatagggcagatggtttccagagaaccaggacttggcccaggccacagtcacccctcagcacctcccctcccgcttgcaggcagaaaacgaggatggggcccaggagaacaccttctccatggacccccaactggagcggcaggtggagaccattcgcaacctggtggactcatacgtggccatcatcaacaagtccatccgcgacctcatgccaaagaccatcatgcacctcatgatcaacaatgtgagtggagaactaaaaatgagaaggaggtagctgggtgcggtggctcacgcctgtaatcccagcactttgggaggccaaggcgggcggatcacttgaggtcaggagttcaagaccagcctggccaaaacggtgaaaccccatctctactaaaaatacaaaaattaggctgggcgcggtggctcacacctgtaatcccagcactttgcgaggccaaggcgggcggatcacgagctaaggagttcgagactagactgaccaacatggtgaaaccccatctctactaaatatacaaaaattagccgggcacggtagctcacgcctgtaatcccagctactcaggaggctgaggcaggggaatcgcttgaacccaagaggcagaggttgtggtaagcctagagtgcaccactgcactccagcctgggcgacagagtgagactccgtctcaagaaaagagagagagagagagagaaaaatacaaaaagtagccgggcatggtggcgggtgcctgtaatccagctacccgggaagctgaggcaggacaattacttgaacctgggagatggagatggcagtgagccaagatcgtgccactgcactccagcctggttgacagagcgagactccatctcaaaaaaaaaaaaaaaaaaaaatgagaaggaggccaggcaccctaggccatacctgtttgtagtcttagcactttgggaggctgaggcaggaggatcacttgagcccaggaggttgaggctgcagtgagctatgatcatgccactgcactccagcctgggcgacagagcaagaccttgtgtccaacaacagcaacaacaaatttgaatgaatcaccaccctttgaacaccagaatctgcacggccatcctctttgggaaaccctagggtttccgagccacactgggtccatagtcccatcaagtccactaactggagtgaacactgcaggtgtgcgccttctctgaattaacttaggctggcatcagaataactgcaggagggagaacggccatcttccccatttcacagacagaaaacaaggccagagagatcaagtaacctgccccaagttccttaggaaagtgggaagtgggattcaaacccacgtttaccctggttgcaaccatacccttgggttgtgttgggcagccgctgtgtcctaatgatctggggcccagcctcttcctcatgggcgtcacccgcctggccccgggttccctggagactctcagggctctgggctcctcttcagtgaaatgcagctgtactgatagtatctccagctcaggctgctagagggctcagggcacttgtgtatcaggcctttggcatggcactagccactcaggaagctttataaaccagctttggggccggagcagtggctcatgcctgtaatcccagcactttgggaggctgaggagggaggatcacttgagcccaggagctgaagaccagcctgggcaacatagccataccccagtctctacaaaaaatttaaaaattagctgggcgtggtggcaaatgcctgtagtcccagctactcagaagaccgaggtaagagcatcacttgagcccaggaggttgaggctgcagtgagccatgattacgccactgctctccagcctgggtgatggagcaggaacctctttcaaaaaaaaagtgtcttgggttttgtatatgaatgtcaaccacagaaacctgcggatctaagtaaaactcccacacagggtgtggctgggcatggtggctcacatctgtactcccagcactttgggaggcttggcaggaggatcactcgatcccaggagttcaagaccagcctggacaacatagtgagaccccatccctatttaaaacacacacacacctcccacgtgccatgccctcccaccctgttgctcccattctcagtagtgatcagtgttcacagtttcatggtgtcctggtatgtttcctcatataccgataggatcggagacatatacggttcttctgctatgaaatttaaaatgcatatatcctttgaccctgcaagtttacttttaggaacttctctaagagagacaattgcccacgtgcaaagtgagcttatacatgcttattgttttccatgatgttttatagcagccaaagatgggacataattatccatttttaatagactcttataaaataaaaatattttattatttaagaaaataataaatctgtcggcccagctactcgggaagctgaggcaggaagatcacttgagcccaggagatcgaggctgcggtgagcaaagatcgctccactgcattccagcctgagtgataggagtgagaccctatctaaaaaaaaaaaaagttgtgacggccaggtgtggtggctcatgcctgtaatcccagcactttgggaggctgaggcgggcacatcacgaggtcaagagactgagaccatcctggccaacatgctgaaacccccctctactaaaaatacaaaaattagctgggcgtggtggcacgcgtctgtagtcccagctactctggaggctgaggcaggagaatcacttgaacctaggaggtggagtttgcaatgagcggagatcatgccactgtactccagcctggtgacagagggagactctgtctcaaaaaaaaagaaaaaaaaaagtaactgaaaaacttctgtatccagtaggaggttccagaaaggacaatgtataaaattcatgaacagaaactagtagtgtttgaacagaagccaggtggaagatgtaacaggattagccgggcgcagtggctcactcacgcctgtaatcccagcactttgggaggccaaggcgggtggatcacctgaggtcaggagttaaagaccagcctggccaatatggtgaaaccccatctctgctaaaaatacaaaaattagccgggggttggggggcacgcctgtagtcccagctacttgggaggttgaggcacaagaattgcttggacccaggagacgcaggttgcagtgagccaagattgcactgcagcctgggtgacagagtgagactctgtcacaaaaaaataaagatataacaggattggctgggcgcggtggctcacgcctgtaatcccagcactttgggaggctgaggcaggcggatcataaggtcaggagatcgagaccatcctggctaacagggtgaaaccctgtctctactaaaaatacaaaaaataagctgggcgtggtggcaggcgcctgtagtcccagctacttgggagactgaggcaggagaatggcataaacccgggaggcggaggttgcagtgagctgagattgcaccactgcactccaacctgggcgacagtgagactgtctcaaaaaaaaaaaagcaaaaacaaaaaagatataacaggattattctgccaaggttaaggaaataaataaataagctaaaacaggagaaaagacatcaatggaagaggcaagatactagaaataagttgaataagaatctcataaccagcctgggccacatggtggaaccctatctctaaaaaaattacaaaacttagccaagcatggtgtcaacgtgcctgtcgtcctagctacttgggaggctgaggcaggataattacttgaacccgggaggcggaggttgcagtgagctgaaattgagccactgtactccagcctgggtgacagagcaagactctttttcaaaaaagtctgggggtggccccgccctgtgagagatgtttttccagcagtcactgtgggttctgggttggggtgatacacaagcctgaccctccccaacccctgcccgcagacgaaggccttcatccaccacgagctgctggcctacctatactcctcggcagaccagagcagcctcatggaggagtcggctgaccaggcacagcggcgggacgacatgctgcgcatgtaccatgccctcaaggaggcgctcaacatcatcggtgacatcagcaccagcactgtgtccacgcctgtacccccgcctgtcgatgacacctggctccagagcgccagcagccacaggtccggaagcctggttcccctaccctcaagcattcggcctgcaggttcctgccctccctgtgtgtcctgcagggtcctggcaggaaacaggacacagcccaagggtggcacccagggctgggcactgtgggagctgctgccctgctgaggccggaggagggagagaaggggtatgggggcgagccagccctacagctctagggcaggaccctgtgaataaataccccgcctgccctctgctggtgccttccattggcacagcccaaatggaagctggggtaagaggctggaggggcagcagccacaggagagagatgagcctcctggagcacagagaagggcagatgggaggctctggaggggcaaacgcaaggcgtggccagagctgctgccgcccctgagttgtccattgaggccgtcgggcagggaacctcagagggggctgccttgcagagccctgggggagccatggagttccttaaggggaggatatcgcacccaggcctgcaggtggcagggactgaggcccaggagggaatctggatgtctggacagggcttgcaggttccacggcccctagagatattagggcttgatctggaggactctggaagtgtctttggctgtgagggtggatcccaggcccaaggcctgagggggccctgtgagtgggaagtgcctgagggggccgagggcaagggaaggtgggactggcgctcaggttggggtgggaggatcccactgcgcctgcgctgtccccatagccagcccccacctcaggttctggcagccacagtggcatggcgggggctcctactccatctgtatctgtagctcacaccctctccttcctcacagccccactccacagcgccgaccggtgtccagcatacacccccctggccggcccccagcagtgaggggccccactccagggccccccctgattcctgttcccgtgggggcagcagcctccttctcggcgcccccaatcccatcccggcctggaccccagagcgtgtttgccaacagtgacctcttcccagccccgcctcagatcccatctcggccagttcggatccccccagggattcccccaggagtgcccaggtaaggccaaccccctgccctccaccccaactgcctgcaccctggggtctctcctcctgtctcacttcctcccagtgagctctcactacgtgcccagctgctggagtggaggaatcgtcctcatccctatttggcttgcgaggaaacaggcccagagaggccaagaggcttgttcagtgtcacagagtagcggagccctggtgactccggggctcccagcttgccctctgcctactggggtgtgccaccaggcagctggggaaccctcacactgggcacctcctcccactgtttaccttcttctccttcctgctcctgcctgcctcaacctaccgtgggccaggctttattctccccacttctccggtggggaagctgaggcccagggagggcagggggctcactgagggtcaaacagcaggcgagttgatgcctaggtttggcactcctgcccgacaccctggtggcttgcggaggtcagcctgggaacaccctggggtggtgtgtgggtgggggctgggtcctcaacccaggcctgcctcttgctcccggcctcactgccgtctccccctccccacctgtctttattctctttgcagcagaagaccccctgctgcgcccagccggcccaccattatccgcccagccgagccatccctgctcgactaggcctcgaggggggcgtgctctcgggggggcctcacgcacccgcggcgcaggagcttcagtggtctggggccctccgccgcccctatgctgggaccaggctcccagtgggcagccctggcctcttccttaacgctggccccggtccagggccggcccctgtgcctggctggacaccgcactgcgcaaaggggccctggagctccaggcagggggcgctggggtgttgcactttgggggatggagtctcagggtggcagaggggggaccagaacccttgacaccatcctgaatgaggggtccagcctgggggggactctaccaaggtcttcttgggctgggaaagcccatgtagggcaggccttctataagtgcgggcaccaagggcgcctacatccccaggccttgctggggtgcaggggtatatcaacttcccattagcaggagctccccagcggcaagcctggcccagtgggctcggtagtgcccagctggcaggcctgaggtgtacatagtccttcccggccatattaaccacacagcctgagcctggcccagcctcggctgccagaggtgcctttgctaggcccggagccgttggcccgggccggccttgccctattcctctcctcctcctcctcctgggtcccccagggtggctgggcttgggctatgtgggtggtggtggcggggggtcttgggggcctctcagctcccgcccatgcctccctgatgggtgggcccagggcggcctctctctgaggagacctcacccactcctcgctcagtttgaccactgtaagtgcctgcactctgtattctattaataaactaaaataaagggaagacgctgctggtggctgctgtgtgggcctcttgtgttagtgttcaggctggggacatgggtgccacctccatcaggcctcccataaggatgcccaagtccctgcactcataagtgcctcccatctccctgagggctctgctttcgggggtgtcacctttcagaggaagccactcgatacaggggagagcttttactttccttagcatgtgaggagtgggagcagatattctctgaccccctgcacacccccacgtgcacaggcctggctgctgcctggtgaagcggggaccccagcgctccacccccttcctaccctcaggccctgcttctctcacctcgtggggaagcccaagcctcgtggcccaactggggctcagttaaactttgctttctgatttttctcttgtgccaggcgaccacctccatcggctcccgcacgacctttcttctgagcttcgtgggaggcccctcccacctgtctggctgccccctcgggggccggtctgtcctggctggtgtccctgagccccaatcagcaggctcttgtgattttctgaccataatttattgactccaatgcccaggccacaccaccctttgttataggaggcttctgcctagactttggccgggccatccctcatgcctgtgtggggcccctgcaggagaggggccggggcaggtggtcttccaggcccccttcctggcattctgttaccagacctcaacctggcttggagggcccaggtttccttgttaggccctgccccgcaccaggcaacgctaacacaggatgggaggcttaggctaaggcacatttacagtagaggggccaggaaatccgaggctcacgttccaacgctgcagtgcccaccatgtgagatttccaggaccgtcggtgcagccactgagccgtcccttctacaagccagaggtgttccctgcccgctgaggacggaaggagactcatggggccagaccgcaggccctgactgcacactcccgttttggcaggaaactaaaattggggagggacccccaagtctcatatgcacacaccctgctgcccctcctttgtcccgttcttccttccatggcaggggctacgtgggcaccgggcgcttgtcctggaagaagcgcttgagcgtgcagacctgcagcacagccaccagcagcagcaccgccacgttgacagctgaccagaagttgacccgctccaagttgccctcttgcaggttgcggtcacgtgcctcgaaggcccgcagtagcgtgagcatctggatgctgcgctccagccgggtccgcatggtctcaatggactcctacagggcagcgggaggggaagggtcaggcctccctccacccatcagggagcagagaccaaaaaaaccgggggatacggagggaggctgtattaaccctgggaggtacagctgcaaacacagacttgttcaggctaagttcaaatcctcaccctgccactcactggctgtgaccatgagcaacttaattaacctatctgagcctgtttcctcttctataagcttccaaattgctgtgaacatttaatgcctaaataaatgtacaaggatgagcatggtggctcatgcctataatcctagcactttggaaggctgaggtgggaggatcgcttgagcccaggagtttgagaccagcctgggctacatggcaaaaccccatctctacaaaaaattagccaggggtggtgatgtgcaactgcaatcccagctactcaggaggctgaagcaagattacacctgtaatccaaacacaggaggatcacttaaacccaggagttcaagaccaccctagccaacatggtgaaacctcgtctctacagaaaacaaaaaattaggcatggtggtgcacacccgtagtcccactgaggtggcaggattgcttgagcccaggagtttgaggctgcaatgggctatgatcacaccactgcactccagcctgagtgacacagcaagaccttgcctcgccgtagctcacacctgtaatcccagagctttgggaagccaaggcagacagatcccctgaggtcaggagttcgagaccagcctggccaacatggtgaaaccctgtctctactaaaaatacaaaaattagtcagtcaggcgtggtggcacagctattcaggaggctgaggcaggagaattggctgaacctgggaggcagaggttgcagtgagctgagatcgtgccactgcaatccagcctgggtgaccaagagagatctgttagaaaataaataaataagtagttaattaaaatactaataaatgtacagaacatatttgcttgtggttaagagcatagttgctgaaaccagcatgggttcaataccaactctgctagttggtctgtgtggccgtgagttgctcagccatcttgtatctcactttctccacctgtaaaatggggatgacttgagcacagggtctgcttcacaaggtggtttggagatttacggtatgagttatttatgatatgagttccttaaacctttacaccagggtttatacctagaaatgaactacttttttttttttttttttttttgagacggagttttgctcttattgcccaggctggagtgcaatggtgcgatctcggctcactgcaacctctgcctcccaggttcaacttccacctcctgggttcaagtcattctctggcctcagcctcctgagtagctgggattacagacgcccgccaccacacccggctaatttttgtatttttagtagagacggggtttcaccatgttggccaggctggtctcaaaactcctgacctcaggtgatccacccgcctcagcctcccaaagtgctgggattacaggcgtgagccaccgtgcccggcctgaaatgaactacttattttaagagctgctactcttactataattcagttggagggcacaactacggaggggaggctgggtcagcccaaggggggcaccccaggtgaatcctagagatctggaaggagtggccccagcgcagcctggacacaccttgatgtcctccattttaacatccagcatctcctcgggctccacagcctctgcccatccttcgacc

SEQ ID NO: 11 - RNA, 3672 nt, Homo sapiens
  source 1..3672: mol_type = mRNA
gaggtcgctcgggtcgggtgtcgcctgagaaccggatgaggcggcgaccgtgaggccgagccgggagcgggcgtcttgccgaggcccgggcgggcggggagcaacggctacagacgccgcggggccaggtcgttgagggtcggcggcgggcgaggagcgcagggcgctcgggccgggggccgccggcgccatgggcaaccgcgggatggaagagctgatcccgctggtcaacaaactgcaggacgccttcagctccatcggccagagctgccacctggacctgccgcagatcgctgtagtgggcggccagagcgccggcaagagctcggtgctggagaacttcgtgggccgggacttccttccccgcggttcaggaatcgtcacccggcggcctctcattctgcagctcatcttctcaaaaacagaacatgccgagtttttgcactgcaagtccaaaaagtttacagactttgatgaagtccggcaggagattgaagcagagaccgacagggtcacggggaccaacaaaggcatctccccagtgcccatcaaccttcgagtctactcgccacacgtgttgaacttgaccctcatcgacctcccgggtatcaccaaggtgcctgtgggcgaccagcctccagacatcgagtaccagatcaaggacatgatcctgcagttcatcagccgggagagcagcctcattctggctgtcacgcccgccaacatggacctggccaactccgacgccctcaagctggccaaggaagtcgatccccaaggcctacggaccatcggtgtcatcaccaagcttgacctgatggacgagggcaccgacgccagggacgtcttggagaacaagttgctcccgttgagaagaggctacattggcgtggtgaaccgcagccagaaggatattgagggcaagaaggacatccgtgcagcactggcagctgagaggaagttcttcctctcccacccggcctaccggcacatggccgaccgcatgggcacgccacatctgcagaagacgctgaatcagcaactgaccaaccacatccgggagtcgctgccggccctacgtagcaaactacagagccagctgctgtccctggagaaggaggtggaggagtacaagaactttcggcccgacgaccccacccgcaaaaccaaagccctgctgcagatggtccagcagtttggggtggattttgagaagaggatcgagggctcaggagatcaggtggacactctggagctctccgggggcgcccgaatcaatcgcatcttccacgagcggttcccatttgagctggtgaagatggagtttgacgagaaggacttacgacgggagatcagctatgccattaagaacatccatggagtcaggaccgggcttttcaccccggacttggcattcgaggccattgtgaaaaagcaggtcgtcaagctgaaagagccctgtctgaaatgtgtcgacctggttatccaggagctaatcaatacagttaggcagtgtaccagtaagctcagttcctacccccggttgcgagaggagacagagcgaatcgtcaccacttacatccgggaacgggaggggagaacgaaggaccagattcttctgctgatcgacattgagcagtcctacatcaacacgaaccatgaggacttcatcgggtttgccaatgcccagcagaggagcacgcagctgaacaagaagagagccatccccaatcaggtgatccgcaggggctggctgaccatcaacaacatcagcctgatgaaaggcggctccaaggagtactggtttgtgctgactgccgagtcactgtcctggtacaaggatgaggaggagaaagagaagaagtacatgctgcctctggacaacctcaagatccgtgatgtggagaagggcttcatgtccaacaagcacgtcttcgccatcttcaacacggagcagagaaacgtctacaaggacctgcggcagatcgagctggcctgtgactcccaggaagacgtggacagctggaaggcctcgttcctccgagctggcgtctaccccgagaaggaccaggcagaaaacgaggatggggcccaggagaacaccttctccatggacccccaactggagcggcaggtggagaccattcgcaacctggtggactcatacgtggccatcatcaacaagtccatccgcgacctcatgccaaagaccatcatgcacctcatgatcaacaatacgaaggccttcatccaccacgagctgctggcctacctatactcctcggcagaccagagcagcctcatggaggagtcggctgaccaggcacagcggcgggacgacatgctgcgcatgtaccatgccctcaaggaggcgctcaacatcatcggtgacatcagcaccagcactgtgtccacgcctgtacccccgcctgtcgatgacacctggctccagagcgccagcagccacagccccactccacagcgccgaccggtgtccagcatacacccccctggccggcccccagcagtgaggggccccactccagggccccccctgattcctgttcccgtgggggcagcagcctccttctcggcgcccccaatcccatcccggcctggaccccagagcgtgtttgccaacagtgacctcttcccagccccgcctcagatcccatctcggccagttcggatccccccagggattcccccaggagtgcccagcagaagaccccctgctgcgcccagccggcccaccattatccgcccagccgagccatccctgctcgactaggcctcgaggggggcgtgctctcgggggggcctcacgcacccgcggcgcaggagcttcagtggtctggggccctccgccgcccctatgctgggaccaggctcccagtgggcagccctggcctcttccttaacgctggccccggtccagggccggcccctgtgcctggctggacaccgcactgcgcaaaggggccctggagctccaggcagggggcgctggggtgttgcactttgggggatggagtctcagggtggcagaggggggaccagaacccttgacaccatcctgaatgaggggtccagcctgggggggactctaccaaggtcttcttgggctgggaaagcccatgtagggcaggccttctataagtgcgggcaccaagggcgcctacatccccaggccttgctggggtgcaggggtatatcaacttcccattagcaggagctccccagcggcaagcctggcccagtgggctcggtagtgcccagctggcaggcctgaggtgtacatagtccttcccggccatattaaccacacagcctgagcctggcccagcctcggctgccagaggtgcctttgctaggcccggagccgttggcccgggccggccttgccctattcctctcctcctcctcctcctgggtcccccagggtggctgggcttgggctatgtgggtggtggtggcggggggtcttgggggcctctcagctcccgcccatgcctccctgatgggtgggcccagggcggcctctctctgaggagacctcacccactcctcgctcagtttgaccactgtaagtgcctgcactctgtattctattaataaactaaaataaagggaagacgctgctggtggctgctgaaaaaaaaaaaaaaaaaa

SEQ ID NO: 12 - DNA, 16000 bp, Homo sapiens
  source 1..16000: mol_type = genomic DNA
nnnnnnnnnnnnnnnnnnnnnnnnnnnnnnnnnnnnnnnnnnnnnnnnnnnnnnnnnnnnnnnnnnnnnnnnnnnnnnnnnnnnnnnnnnnnnnnnnnnnnnnnnnnnnnnnnnnnnnnnnnnnnnnnnnnnnnnnnnnnnnnnnnnnnnnnnnnnnnnnnnnnnnnnnnnnnnnnnnnnnnnnnnnnnnnnnnnnnnnnnnnnnnnnnnnnnnnnnnnnnnnnnnnnnnnnnnnnnnnnnnnnnnnnnnnnnnnnnnnnnnnnnnnnnnnnnnnnnnnnnnnnnnnnnnnnnnnnnnnnnnnnnnnnnnnnnnnnnnnnnnnnnnnnnnnnnnnnnnnnnnnnnnnnnnnnnnnnnnnnnnnnnnnnnnnnnnnnnnnnnnnnnnnnnnnnnnnnnnnnnnnnnnnnnnnnnnnnnnnnnnnnnnnnnnnnnnnnnnnnnnnnnnnnnnnnnnnnnnnnnnnnnnnnnnnnnnnnnnnnnnnnnnnnnnnnnnnnnnnnnnnnnnnnnnnnnnnnnnnnnnnnnnnnnnnnnnnnnnnnnnnnnnnnnnnnnnnnnnnnnnnnnnnnnnnnnnnnnnnnnnnnnnnnnnnnnnnnnnnnnnnnnnnnnnnnnnnnnnnnnnnnnnnnnnnnnnnnnnnnnnnnnnnnnnnnnnnnnnnnnnnnnnnnnnnnnnnnnnnnnnnnnnnnnnnnnnnnnnnnnnnnnnnnnnnnnnnnnnnnnnnnnnnnnnnnnnnnnnnnnnnnnnnnnnnnnnnnnnnnnnnnnnnnnnnnnnnnnnnnnnnnnnnnnnnnnnnnnnnnnnnnnnnnnnnnnnnnnnnnnnnnnnnnnnnnnnnnnnnnnnnnnnnnnnnnnnnnnnnnnnnnnnnnnnnnnnnnnnnnnnnnnnnnnnnnnnnnnnnnnnnnnnnnnnnnnnnnnnnnnnnnnnnnnnnnnnnnnnnnnnnnnnnnnnnnnnnnnnnnnnnnnnnnnnnnnnnnnnnnnnnnnnnnnnnnnnnnnnnnnnnnnnnnnnnnnnnnnnnnnnnnnnnnnnnnnnnnnnnnnnnnnnnnnnnnnnnnnnnnnnnnnnnnnnnnnnnnnnnnnnnnnnnnnnnnnnnnnnnnnnnnnnnnnnnnnnnnnnnnnnnnnnnnnnnnnnnnnnnnnnnnnnnnnnnnnnnnnnnnnnnnnnnnnnnnnnnnnnnnnnnnnnnnnnnnnnnnnnnnnnnnnnnnnnnnnnnnnnnnnnnnnnnnnnnnnnnnnnnnnnnnnnnnnnnnnnnnnnnnnnnnnnnnnnnnnnnnnnnnnnnnnnnnnnnnnnnnnnnnnnnnnnnnnnnnnnnnnnnnnnnnnnnnnnnnnnnnnnnnnnnnnnnnnnnnnnnnnnnnnnnnnnnnnnnnnnnnnnnnnnnnnnnnnnnnnnnnnnnnnnnnnnnnnnnnnnnnnnnnnnnnnnnnnnnnnnnnnnnnnnnnnnnnnnnnnnnnnnnnnnnnnnnnnnnnnnnnnnnnnnnnnnnnnnnnnnnnnnnnnnnnnnnnnnnnnnnnnnnnnnnnnnnnnnnnnnnnnnnnnnnnnnnnnnnnnnnnnnnnnnnnnnnnnnnnnnnnnnnnnnnnnnnnnnnnnnnnnnnnnnnnnnnnnnnnnnnnnnnnnnnnnnnnnnnnnnnnnnnnnnnnnnnnnnnnnnnnnnnnnnnnnnnnnnnnnnnnnnnnnnnnnnnnnnnnnnnnnnnnnnnnnnnnnnnnnnnnnnnnnnnnnnnnnnnnnnnnnnnnnnnnnnnnnnnnnnnnnnnnnnnnnnnnnnnnnnnnnnnnnnnnnnnnnnnnnnnnnnnnnnnnnnnnnnnnnnnnnnnnnnnnnnnnnnnnnnnnnnnnnnnnnnnnnnnnnnnnnnnnnnnnnnnnnnnnnnnnnnnnnnnnnnnnnnnnnnnnnnnnnnnnnnnnnnnnnnnnnnnnnnnnnnnnnnnnnnnnnnnnnnnnnnnnnnnnnnnnnnnnnnnnnnnnnnnnnnnnnnnnnnnnnnnnnnnnnnnnnnnnnnnnnnnnnnnnnnnnnnnnnnnnnnnnnnnnnnnnnnnnnnnnnnnnnnnnnnnnnnnnnnnnnnnnnnnnnnnnnnnnnnnnnnnnnnnnnnnnnnnnnnnnnnnnnnnnnnnnnnnnntctggtcttctacgtggaaatgaacgagagccacacgcctgcgtgtgcgagaccgtcccggcaacggcgacgcccacaggcattgcctccttcacggagagagggcctggcacactcaagactcccacggaggttcagttccacactcccctccaccctcccaggctggtttctccctgctgccgacgcgtgggagcccagagagcggcttcccgttcccgcgggatccctggagaggtccggagagccggcccccgaaacgcgcccccctcccccctcccccctctcccccttcctcttcgtctctccggccccaccaccaccaccgccaccacgccctcccccaccacccccccccccaccaccaccaccaccaccaccaccccgccggccggccccaggcctcgacgccctgggtcccttccggggtggggcgggctgtcccaggggggctcaccgccattcatgaaggggtggagcctgcctgcctgtgggcctttacaagggcggctggctggctggctggctggctgtccgggcaggcctcctggctgcacctgccgcagtgcacagtccggctgaggtgcacgggagcccgccggcctctctctgcccgcgtccgtccgtgaaattccggccggggctcaccgcgatggccctcccgacaccctcggacagcaccctccccgcggaagcccggggacgaggacggcgacggagactcgtttggaccccgagccaaagcgaggccctgcgagcctgctttgagcggaacccgtacccgggcatcgccaccagagaacggctggcccaggccatcggcattccggagcccagggtccagatttggtttcagaatgagaggtcacgccagctgaggcagcaccggcgggaatctcggccctggcccgggagacgcggcccgccagaaggccggcgaaagcggaccgccgtcaccggatcccagaccgccctgctcctccgagcctttgagaaggatcgctttccaggcatcgccgcccgggaggagctggccagagagacgggcctcccggagtccaggattcagatctggtttcagaatcgaagggccaggcacccgggacagggtggcagggcgcccgcgcaggcaggcggcctgtgcagcgcggcccccggcgggggtcaccctgctccctcgtgggtcgccttcgcccacaccggcgcgtggggaacggggcttcccgcaccccacgtgccctgcgcgcctggggctctcccacagggggctttcgtgagccaggcagcgagggccgcccccgcgctgcagcccagccaggccgcgccggcagaggggatctcccaacctgccccggcgcgcggggatttcgcctacgccgccccggctcctccggacggggcgctctcccaccctcaggctcctcggtggcctccgcacccgggcaaaagccgggaggaccgggacccgcagcgcgacggcctgccgggcccctgcgcggtggcacagcctgggcccgctcaagcggggccgcagggccaaggggtgcttgcgccacccacgtcccaggggagtccgtggtggggctggggccggggtccccaggtcgccggggcggcgtgggaaccccaagccggggcagctccacctccccagcccgcgcccccggacgcctccgcctccgcgcggcaggggcagatgcaaggcatcccggcgccctcccaggcgctccaggagccggcgccctggtctgcactcccctgcggcctgctgctggatgagctcctggcgagcccggagtttctgcagcaggcgcaacctctcctagaaacggaggccccgggggagctggaggcctcggaagaggccgcctcgctggaagcacccctcagcgaggaagaataccgggctctgctggaggagctttaggacgcggggttgggacggggtcgggtggttcggggcagggcggtggcctctctttcgcggggaacacctggctggctacggaggggcgtgtctccgccccgccccctccaccgggctgaccggcctgggattcctgccttctaggtctaggcccggtgagagactccactccgcggagaactgcctttctttcctgggcatcccggggatcccagagccggcccaggtaccagcaggtgggccgcctactgcgcacgcgcgggtttgcgggcagccgcctgggctgtgggagcagcccgggcagagctctcctgcctctccaccagcccaccccgccgcctgaccgccccctccccacccccaccccccacccccggaaaacgcgtcgtcccctgggctgggtggagacccccgtcccgcgaaacaccgggccccgcgcagcgtccgggcctgacaccgctccggcggctcgcctcctctgcgcccccgcgccaccgtcgcccgcccgcccgggcccctgcagcctcccagctgccagcacggagcgcctggcggtcaaaagcatacctctgtctgtctttgcccgcttcctggctagacctgcgcgcagtgcgcaccccggctgacgtgcaagggagctcgctggcctctctgtgcccttgttcttccgtgaaattctggctgaatgtctccccccaccttccgacgctgtctaggcaaacctggattagagttacatctcctggatgattagttcagagatatattaaaatgccccctccctgtggatcctatagaagatttgcatcttttgtgtgatgagtgcagagatatgtcacaatatcccctgtagaaaaagcctgaaattgatttacagaacttcggtgatcagtgcagatgtgtttcagaactccatagtagactgaacctagagaatggttacatcacttaggtgatcagtgtagagatatgttaaaattctcgtgtagacagagcctagacaattgttacatcacctagtgatcagtgcagggataagtcataaagcctcctgtaggcagagtgtaggcaagtgttccctccctgggctgatcagtgcagagatatctcacaaagcccctataagccaaaccttgacaagggttacatcacctgtttgagcagtggaaatatatatcacaaagccccctgtagacaaagcccagacaatttttacatctcctgagtgagcattggagagatctgtcacaatgcccctgtaggcagagcttagacaagtgttacatcacctgggtgatcagtgcagagatgtgtcaaaacgctcctgtagtctgaacctagacaggagttacatcaccttggggatcagtgcagagatacgtgagaattcccttgtaggcagggcctagacaagtgttacatcacctaggttatcagtgcagagatatgtgagaattcccgtgtaggcagagcctagacaagtgttacatcacctagtttatcagtgtaattattagtcataaagcctcctgtaggcagaacgtagacaagagttccctcctcagggtgatcagtgcagagatgtgtcacaaagcccctgtaggcagagcctagacaagagtttcatcacttggttgatcagttcagagatgtgtcagaatgcccatgtaggcagatctaagacaagcgtccatcacctgggtgatcagtgcagagatatgtaccagtgtcccctgtaggcagtgcctagacaagagttgaatcacctcagagatcagtgcatagatatgtcacaaagccttctgtaggcaaagcccatacaaggtttagatcacctaggtgatcagtgcagtgatatgtcacaaaaatccctgtagacagagcctagacaagagttacttcacctgggtgatcagtgcagatatttgacacaatgcccccatagacagagcctaggcaagacttccatcacctgggtgatcagtgcagagatatgtcacaaatccccctctaggcagagtatagagaagagtcccatcacctgggtgatcagtgcagagatatttcacaatgtcccctgtaggcagagagtggacaagagttacatcacctagatgatctgtgcagagctatgtcaaaacgcccctgtaggcagagcctagatgagtgttacatcacctgggtgatcattgcagagatacgtcacaataccccctgtaggtggggcctagacaagagttacatcacctgggtgatcagtacagaagtatgtcacaaagcccctgtaggcagagcctagacaagagttacatcacctgggttatcagtgcagaaatatgtcacaaagcccctgtaggtcgagtctagacaagagttacatctcctgggtgatcagtgcaaagatatgtcacaaagccccctgtagacaaatcccagaaaattgttacatcacctgggtgatcagtggagatatgtgtcacaattcccctttaggcacagcttagacaagcgttacatcacatgagtgatcattgcagagttatgtcactatgcccccataggcagatccaagacaagagtccatcacctgggtgatcagtgcagaaatatgccacaatgccgccagtaggcagatatagacaagagttacatcacctgcgtgatcactgcagagatatatcacaatgcccctgtaggcagagcctagacaagagtcccatcacctgggtgatcagtgcagagttatgtcacaatgcccccttttggcagagcctagacaagggttacatcacctgggtgatcagtgcagagatatgtcacaatgtccctgtagccatatccttgacaaaagtgacatcacctgggtgatcagtgtggagatatgtcacaatgtctccagtaggcagagcctagacaagagttacatcacctgggtgatcagggcagagatatgtcacaatgccccctgtaagcagatcccagacaagagttgcatcacctcggtgatcagtgcagagatacgtcacaatgcccctgtaggcagagcctagacaagagttacataacccaggtgatccgtacagagtgatgtcacaacgccctctgtaggcagagactagaaaagagttacattacctgggtgatcagtgcagagatatgtcacaatgccccctgtaggcagagcatagagaagagttgcatcacctgggtgatcagtgtagagatatgtcacaatgtcccctgtaggcagagcacagagaagagttgcaccacctgggtgatcagtgcagagatatgtcacaatgtcccctgtaggcaaagcctaggcaagagttacatcacctttgtcatcagttcagggatatgtgaaaacgcccctgtaggcagagcttagacaagagttacatcacctagttgatcagtgcagagatatttcacaataccccctgtaggcagatcctagacaagagttgcatcacctgggtgatcagtgcagagatatttcacaacgccccctgtaggcagagggtagacaagagttacatcacttaggtgatcagtgcagagatttgtcgaaattccctgtaggcagtgcttataaaagtgttacatcacctaagtgatcagtgcagagatatgtcacaaagctcctgtaggcagagcttagatgagttacatcacctgggtgatcagagcaaaggtatgtcacaaagccccctgtaggccaaagcctagacaatagttacatcacttgggtgatcagtggcgagatctctcacaattcccctgtaggcagagcttatacaacagttacatcacctgggtgatcagtgcagatctatgtcacaatgcccccataggcagatccaagacaagagtccgtctcctgggtgatcagtgcagaaatacgtcacaatgcccccttaggcagagcctagacaaaagccccatcacctggatgattagtgcagagttatgtcacaaagtccctttaggcagatcctagaaaagagtcccattacttgggtgatcagtgcagagatatgtcacaatgccactgtaggcagagcctagacaagagttatatgacctaggtgatcagtgcagagatacattgcaatgcccctgtaggcagagccctgacaagtggtacatcacctgggtgatcattgcagggatatgtcacaaagcaccctgtaggcagatcctagacaagagttacatgacctgggtgatcagtgcagagatatgtcacaatgccactgtaggcagagcctagacaagagttacatgacctaggtgatcagtgcagagatacatcgcaatgcccctgtaggcagagccttgacaagtggtacatcacctgggtgatcattgcagggatatgtcacaaagcaccctgtaagcagatcctagagaagagttatatcacctgggtgatcagtgcagagatatgtcacaagccccctgtaggcagagcctagacaagagttatatcacctgggtgatcagtgcagtgatatgtcacaatgctgtgtagccagagcctagacaaaagttacagcacctgggagatcagtgcagagatatgtcacaatgtccccagtaggcagagaccaggcaagagttggatcacctcgggatcagtgcagagatatgtctcaatccccctgtgggcacagcctagacaagagttacatcacctcggttaacagtgcagagatatgtcaaaatgcccctgtaggcaagcctacacaagtattacatcacttaggtgatcagtgcagagatatgtcacaataccccctgtaagcagagcctagacaagagttacatcacctgggtgatcagtgcagagatatgtgacaaggcccctttaagcagagcctagacaatagttacatcacctgagtgatcagtgcagagatctgtcacaatgcccctttaggcagagcttaaactagagttacatcacctgtgtgatcagtgcagagatatgtcacattgcccccataggcgaatccaagacaagagtcagtcacctgggtgatcagtgcagaaatatgtgacaatgccgccagtaggcagagcctagagaagagtcccatcacctgggtgatcagtgcagagttatgccacaatgccctctgtaggcagagcctagacaagagttacatcatctgggtgatcagtaaagagatatttcacaatgcccctgcaggcagagcgtaagcaaaaggagtatgtgatcaaacaaatttagacccactcgattaaacgtgtgtcctttctgcagagtttcttagaacttctcatacactggtgggcattgtggctgtctaagtcagacgggtggcctgcaggtttcacaaagatcttggaccactgaattctgttattgcttgagaatattttaaaactgttttgcaaaggagtacaccttggaaaacatgagataacagttctatacctctgtcattttcattattaaagtattttttggcatgaaaaacttctttttaaagaaaacatgtggtttgatgtttcatcatcttggaaccttctgtcactttccacatccaccaccttgtgctaaactgtccacctgttcactgcaaaactcctcacctttttgccatttgttcactctgcccagtatttttactttcaaagttttacctcctttcacaagaggttatgtcaggaaatatacaatcgaagtgagaaggagaaagaaattcattacataagtcttaaaggaaaaaacagaaaatccaaagcatattgaaagaaagccttgcaagagaggaggctcaagagctttatgtcatagcaggacaccaagaaagttctaagaaggccatatcagaatgccctctgccgactttcaaccccaggatcaacacttcacatgcattagcagagagagataaatcaaaagtgatcagtgcagagatatgtcacaataccccctgtaagcagagcctagacaagagttacatcacctgggtgatcagtgcagagatatgtgacaaggcccctttaagcagagcctagacaatagttacatcacctgagtgatcagtgcagagatctgtcacaatgcccctttaggcagagcttagactagagttacatcacctgggtgatcagtgcagagatatgtcacattgcccccataggcaaatccaagacaagagtctgtcacctgggtgatcagtgcagaaatatgtgacaatgccgccagtaggcagagcctaaagaagagtcccatcccctgggtgatctctgcaaagatatgccacaatgccctctgtaggcagagcctaaacaagagttacatcatctggttgatcagtaagagatatttcacaatgcccctgcaggcagagcgtaagcaagagttacatcacctagatgatcagtgcagagatacgtcacaaggccccctataggcagagcctggacaagagttacatcacctcggtgatcaatgcagcgatatgtcactatgccccgtaggcagagcctagtcaagcgttacatcacctgggtgatcagtgcagagatatgtcagaaagccccctgtaggcagagcctagacaagagtcccatcacctgggtgatcagtgcagaaatatgtcacaatgcccccataggcagatccaacacaagagttacatcacctgggtgatcagtgcagagatatgtaacaatgcccccagtaggcagagcctagaggagagttacatcatctgggtgatctttgcagagatatgtcacaatcccccaagtaagcagagcctagacaaaagttacatcatctgggcgatcagtgcagagagaagtcacaaaacccacataggaaaagactagacaagagttacatcatctgggtcatcagtgcagacatatgtcaaagctgccgtagacagagtgtagacaattattacatcacttgggtgatcagtgcagagatctatcacagtgcccccataggcagagcctagacaagagttccatcacctgtgtgatcagtgtagagatatgtcacaatgcctcctgtaggcagaggctaaacaagagttacatcacctggattttgtttcctgcaatatgtcacaatggcgagggtgagggttagggtgagggtgagggttagggtgagggtcagggtgagggtgagggttagggttagggtgagcattaggtttagggttagggttagggttaggggttaggcttaggcttagggttaggcttaggcttagggtaaggcttagggttcaggttcaagtttggattcgggttcaggttaagagttagggttagggttactggttagggttaggggttagggttaggggttagggctgggttaggtttagggttagggttagggttatgggttacagttggggttagggttaggttttagggttaaggttagggttaggattggggttaggtttagggttagggtagtgtacctggtttcacattattactaataataaattattatttatacctaactgtaacccataaccctaaccctaacgggaacctaacccagccctaacccctaaccctatttgtttccctaaccagtaaccctaaccctaactcttaacctgaacctagaccagagttccatcacgtgtgtgatcagtgtagagatatgtcactagtgcctcccgtaggcagaggctaaacagagttacatcaccgggattttgtttcctgcaatatgtcacaatagcgaggatgagggttagggtgaggatgagggttagggtgagggtcacggtgagggtgagggttagggttagggtgagcattaggtttaggattagggttagggttaggggttaggcttaggcttagggttaggcttaggcttagggtaaggcttagggttcaggttcaagtttggattcgggttcaggttaagagttagggttagggttactggttagggttaggggttagggttaggggttagggctgggttaggtttagggttagggttagggttatgggttacagttagggttagggttaggttttagggttaaggttagggttaggattggggttaggtttagggttagggtagtgtaaataatttcacattattactaataataaattattatttatattacactattacttaatatataggctattaagacatgtttgtcttcaaagaatggccttggtttctgtggacagtttctcctcatggaaaggtagtgtgttcctgctaaatcatggacaaaacgggtccccaggagctacaggctgcagaagcagcttctcctctatgttcttcactgcctcatactgttgttgaccttgaaaccttcttttggtctagttttatcaacagagctagtatttacatgaggttctactacataccaggttccagaaagctaaatgctttttgtttgtttttattcactaaatacaaatcacaactctcttctcattacacacacaacaaaatttagctgagggagattgagtgactttcccagggtcacacagctactaatagcagagtagtgtttagattcatatgggaatactgaacacagaaatgaaccaatggaaacatcctacgttccaaaagcctactcaagccatttgttcttattttaaggaaaatatgctaattttaaactccaaatacttatgaatggcagagatctacagatttgattctgatgtaagaaatgatgctcaccagctggttactgctaccaccccacaacccgcagcatactggacaaatgtctaagcctcgtggttagtggggacattgctggtggagtctgaaattgtcatgcagtgactcactcaagcttaggcagatttggtgatatatgacacagagatgcaaagaaatgttgtagctgacacacacaggctggctctgggagatgcagaaggagcacgtcccccaaaatgaagccagacagacatccttaaggaaggagcaaaggggcttcatcttaaagaatgaagaagggatttgtcatgagagatgtggcaggaatttcttgagaggcagagggagagcatgagaatgttaggaaggcaggagagactctcacacatctgggaagctgacaatccatcagcatgtccaggaggaaaataaggaggaggagcagaaatagatgaggctggatatagaagcagggctgaagctgtgttgtttgtggtaaagagttgtgattctatccagaaggcaataggtagcattctaaacagagatcctttttttttttgagatggagtcttgctctgttgcccgggctggaatgcagtgacacgatcccgggtcactgcaagctcctcctcccaggttcacaccattctcctgcctcagcctctggagtagctgggactacagtcgcccgccaccacacccggctaatttttttgtatttttagtagagacgaggtttcactgggttagccaggatggtcttgatctcctggcctcgtgatccgctagcctcggcgtcccaaagtgctgggattacagacgtgagccaccacgcctggccacagagatcttttaaaacaagagtcagcaaatattttctgcaaagggctaaatgttaaatattttaaattttccaagccatatggtctctctctcaatgactcagctcttccattataccatgaaagtagccagagacgttatataacacatgtacgtggctgtgtcccattacaactttacttacaaacgcagactgtgtcagacatagtccatgtatggtagtttgccacaccttgttttagaaagctcaggtttatgatgtgatggagaattcctacaagagttcttgttttaaatggtagagtgaacatacactggaattctatactgcttgacccaagcttttgatagcaaaaggtagaaaagacagatagtaaacagatagatagatgataggaaggtagatagatagatgatagataaagaaagtacatagctgttccagaaaacagaaactgaaaatttcatgaaccaaaagcagagtaatatactttagaaaggaagcaggctggaaaacccacagttgcaaagcaaatggaatttccaactgcctcttgtagccccttccttgaagtagtcatagctcagggtgtttgacttcttcctctgttttttgtttgtttgttgtttgcttttctgtggggtttttgttgttgttgtttgctttttttaaaaaaaattccctttcactgcttttttgtcacagcagcctttgtcgcttcaaacaccgcaagtgttcttttaaaagaattatatcaacctttcaagtgaaatgcaacatgtctgaaacgtggtatctggagaggtgagatggacaaaggagcccttgttactgcacgttttcattctccaaacttcaccttgcacacagtaacagacaatgcacaaatccacttccttatggacggaaattctgaaatccttttatgcctggcctttccatccttcaacttcccctttcccatgctgtgaatgattgtattggacatttttgttttaatctcagtgacaggggaacacaggtagctctaatatagctgtgactgagatgcttctgtttctagcgtgtatttattttgcagcaaacatttacatccatgattttcactgtcttttgaaaataattaagcaatatctcatctgaggtagaatgtttctagtggttgtgttctgagggagaaaaactaatcttttctctttccactgcattctaggaacagtaagaggaccttgtgagtgaataatttgtttccacattacagagtgggtaataagcagattagtaaaaacaattctgcttcacttcaataacagcctcctccaactcattttttctcaacaaacttatttttccagcagaagaatcccagacttcttagagaacccagtgactttttgcaccttaaatctgtgaaatcctcatgttttcttctgctgtatctatagttcaaacaaagatgaggcaaaactagacgcattcctgaaggaacccaagaaattcctctttctgtctcggaatgaaatgaattctccagaccactagttctaaccttcaaaaaccaaacctgtttgtgagatctccttcaaatactactgtagaccctagtatttattcattaaatttttaaaatatttgttttatttggaatcaaagtatttgtaattttagtatttgtattaatataagggagaaatgtttaaatctgcctatgccatatgtgcctctggcttattgcccaattaattgtagtctcaggctaaactttcgtttctgtcttcaatttttgtcagaagaaatataactgatctcaaaacatctgcttttatgtagggacttgtgctgccatctccattcctctctctctttttgcaatctgggtggaagttctttaatatgaacatttcaaccagcttcattctaccacatccactatgagcacattcaaacgtatccagccaagactgtcatcttaggccagggatcttttaggaatctattttgctgtgatgtggctggcacccctttgattcactgtatcaccccagggttcttttcattttataagcccaagagggcagaaaatgaagtagatgagcaattaaacactgtgagtcaggagcgtctccccttgtgttaggcaatgttgtagaacatcgtatttagtaagctcctagcagatgagccatgtggcttctgagcacacatgcttgcttgctgctgtgaggtcagacaccatcatgtcttttccatctctggagggaattgtaagggccacttaataacctgtaaatcagagagataaaggtgcttccccaaaacactgatgacagaatgaaaggtgaggagtgttagccacaggtcaaaa

SEQ ID NO: 13 - RNA, 1710 nt, Homo sapiens
  source 1..1710: mol_type = mRNA
atggccctcccgacaccctcggacagcaccctccccgcggaagcccggggacgaggacggcgacggagactcgtttggaccccgagccaaagcgaggccctgcgagcctgctttgagcggaacccgtacccgggcatcgccaccagagaacggctggcccaggccatcggcattccggagcccagggtccagatttggtttcagaatgagaggtcacgccagctgaggcagcaccggcgggaatctcggccctggcccgggagacgcggcccgccagaaggccggcgaaagcggaccgccgtcaccggatcccagaccgccctgctcctccgagcctttgagaaggatcgctttccaggcatcgccgcccgggaggagctggccagagagacgggcctcccggagtccaggattcagatctggtttcagaatcgaagggccaggcacccgggacagggtggcagggcgcccgcgcaggcaggcggcctgtgcagcgcggcccccggcgggggtcaccctgctccctcgtgggtcgccttcgcccacaccggcgcgtggggaacggggcttcccgcaccccacgtgccctgcgcgcctggggctctcccacagggggctttcgtgagccaggcagcgagggccgcccccgcgctgcagcccagccaggccgcgccggcagaggggatctcccaacctgccccggcgcgcggggatttcgcctacgccgccccggctcctccggacggggcgctctcccaccctcaggctcctcgctggcctccgcacccgggcaaaagccgggaggaccgggacccgcagcgcgacggcctgccgggcccctgcgcggtggcacagcctgggcccgctcaagcggggccgcagggccaaggggtgcttgcgccacccacgtcccaggggagtccgtggtggggctggggccggggtccccaggtcgccggggcggcgtgggaaccccaagccggggcagctccacctccccagcccgcgcccccggacgcctccgcctccgcgcggcaggggcagatgcaaggcatcccggcgccctcccaggcgctccaggagccggcgccctggtctgcactcccctgcggcctgctgctggatgagctcctggcgagcccggagtttctgcagcaggcgcaacctctcctagaaacggaggccccgggggagctggaggcctcggaagaggccgcctcgctggaagcacccctcagcgaggaagaataccgggctctgctggaggagctttaggacgcggggttgggacggggtcgggtggttcggggcagggcggtggcctctctttcgcggggaacacctggctggctacggaggggcgtgtctccgccccgccccctccaccgggctgaccggcctgggattcctgccttctaggtctaggcccggtgagagactccacaccgcggagaactgccattctttcctgggcatcccggggatcccagagccggcccaggtaccagcagacctgcgcgcagtgcgcaccccggctgacgtgcaagggagctcgctggcctctctgtgcccttgttcttccgtgaaattctggctgaatgtctccccccaccttccgacgctgtctaggcaaacctggattagagttacatctcctggatgattagttcagagatatattaaaatgccccctccctgtggatcctatag

SEQ ID NO: 14 - DNA, 41000 bp, Homo sapiens
  source 1..41000: mol_type = genomic DNA
acaaataggacattaaatgatagtgtctatggaagcatgatgagaagatatgctaggaacgtgctgggcacaattaggggcacggtagaatgtgagatagtccaggctgtgagtacgggatctgtagccagaatgcctggttggaatccagcctctgtcatttctttgcagtgtgtcttgagaaagtgactgaacatctcgctgtgcctcagtttctccctcttctaaaagaggatgatggggtgcctatttcatacggttgtgaggattaagtgatttgatgcatataaaatattcaagatggtgcctggcatatgctaaacacgaagtaaatataacctattatcatcattatcaaggacttgcggataactgatgctactgagccgatggagcgtggtgtagcagaacagctcaggtgctagaaatagccagtctcattgactcaactgtgtttcctcagagaatcccgattctcatttttcctatctgtaaatggaagggaggatagcaaataataataaatgttatttggtgactattctatgtgtttattttgcaagaggctcagtgggatatagcctacagctttgcagagacattgctcaacacagatgcatgggataggggtcccatttggctgagaaaaggttattggaaatgggagacgaggaaggagttttcctcacctgactctgggaagggaagagagtctggcccagatgggtaaagacaagtgtgttggcatctggtagacagggccagtggcacacaacagtgaacagctctactgctgacagccaacagggacttcggggtttggctgctggagatggaggacctgggcaaaagagacgtgaggccaagagagcaggtctcagaatgtggagctcatggaaggagagagggagggctaatcagactgctcctatctggccagaagccatgccccacactcaccaggccctaccccttttcctctgaatctttagctcttagatcagaaataatcttacgtgtcttcaggcttgatcctggcctgacggacagcagcctctgtcgtgtagcctttggagctgatcatggcagtacccaggaaaagactgtctggagaggctgcaaaaaccatgctcactgttcccagtccccgtacagaccatgtcagaggaggactgagggaggctcctctctctctctctctgtcacacacacgcacacgcgcacacacacacacacagatacacgcgcacacacacacaccgttttgcctggcagaacagacttataacttgcataatactgcagcagcccacactgtacctcatctccatttgggttccacaacagaagggagctggaaggaaatcagcgacaatctaactccacatgacaacctggctggacaacgaaacatccagcggggagaaagacactggaaattacccatacctgagccccatcccaaaacacctgagtcagcttctctgaccatggcccaggctaggtcatttgcaaagctcttgagtgattctaaagaaccactgctgtgaaaaataaaaatgatttcagcaaagagagaaaggtgaaactattttattggcactggctgtgatgctggctgtgagcagatgctggctgtgggcagaacaggggagagggccattgagaggcccttgtgactggagagtccaatcaaacgtaaagtgtgtgacagggagggactcctccaaattctgcaggtctctccagactggggatccctaacacaagaggaagtcttatgccccaagtgccagaattccaggaaactcatgcaatgaaaccagtcctcttgtgtcagagtttgcagctagaagcggttcaagggatggaggactctctgggagctggagtggtacgctgcaaagaacctaaatatgccataacttcctttacttccctctccaagaatttccaattgctcttccagcctattctgcctgacaggttagaaagttttcaatagttttcaatagaggttcgtttacttgcattgaattatctcatgaaggtcagcttgattcgggcacattaaagacagagtcggaagaacacatttccctaagttttattctaatgtacaacacatgtgatcatttgcgatggggtctaggcagacaaggcaggtaacagggagtccttccaaccaggggttggaacaaaggaggcttgatttggtgactcttgagacatttggctcactgctgtgatgctgtgagagattagctgtgcaatgtttgggctccttaaaaggaagtttatttaaaataaaacttacctgcacgtatgtaacactgtagacacagatccttcccacagtatatttaatctctgcagaattcactgggaggggaggggagccagtgggacctcttggctattacacaggttggcacttccagagagaacagtcttggcatcacaggcttcaggcatactcaaagctcttctcccttctgattccagtttctccatgccctgcagggcctcttgggattattgtattctggaaagcaaacaaagttggacactgtctctttaaataatagaggctgagaacctctcaggccaccatgacatatcccagcattggaccagcccctgaataaactggaaagacgcctggtctggcttcagttacagggagcaccaccagggaacatctcggggagcctggttggaagctgcaggcttagtctgtcggctgcgggtctctgactgccctgtggggagggtcttgccttaacatcccttgcatttggctgcaaagaaatctgcttggaagaaggggttacgctgtttggccgggtgagttttattggcaaactgtgcctctgggtgatgtgtgcctatgctttacaagaattgcctaatttcccaccccctgcaagccgcaaatgaaaaggattgcaggagagatggtgcatttgtgttggaattgactggagattcagagggctttttatatccttggttaaaaggtggatatatactctggctggggaggtggggggccatctgagagcatctagaaaccctaatgcatccagattgaaaggaagaaaggaatctagatgctttttcccccatggaaaatagctgtgcacacacagctggcaggtggccttggtaagcaggttagggagaagctgccacctgtggcagagccttggccagccgggctctgggtgtggcaagcctggtcagcaggcactgagtagcacttcctctgccaccattgagaaccaggcaggaggccagaggcagtgagggacagatgggttgggtttacctgtctggcagtatatggtgtggctgtgacctgggtggttattgattaaactattgggttcaaaagaaaggaagaagcgagctgtagcacccaatatatgcacttttctgtatgtgtattagactttattaaaaagtttatttgaaaatcacaaaggaagggaaagaaaaccctgagttagatatgctcatatttctaaagtgcttacttagaacagtcctgagtatgttgtgatcacataagtgttggttaaataaataaatgtccaaatggcataaaacaaagtaataatttctagagcaaatctaacttataaaatgacctgtggaggaaagaaaacactgccatgtctttagacttttttttctacttgcatatgcactttcatttataaatctttatctatctatctatatctatctatctatctatctatctacctacctacctacctacctatcagagttacaagctactttagtgcagaggtggtcaggtcttccctgaaaggttgatgtgagagttaaatgtgatataataatagtggtggcaatttgggcactgggcccttattatgttgcagacacgatgttaactgctttgtacatattgtctccttcaatcaccaccataaacctttaaagcaggcattactatttccttttgcacctgagaaaactgaagctcagtgaacttgagaaattgcccaaattcacaacaaaagtaagcagggtgattaggtttgttggagcccagagccagagtgcctaaccactgcaccatactgcctctcacagaccatgcatataaagtccaggcaaagtgcttggcatataacgggcactgtaaatgcagtgtttacaagtacacttcattttaatctgataacacgatagttttaaaaagatcattgtttgaagatctttttcaaatttatttttacttaccgtaagaatatacaattagctaaaatagcagctcctttcaaatcgtaaaataatatagaattatttgaatcattgagagtgatgagcttctatgacacagtacactagaggtagggaagtgtgtgtgtgtgtgtgtgtgcgcgcgcgtgcgtgaactgctgcattttcaggcagaaacctttaacatccacattcctgctccctgtcccgtgcctcaaggctggcctgcgcacgggagtctcagttgggcgcgcctctgccaagccgagactgaagggggctagcctctctccctgtaacgctgggcgggccacgttaggaggctatgaatcagctgatttccttggctgctccaaccccacctcaaatggccacctcgcacccgcccgccaaaccccatggccaggactccagccaaggctgacagccaagcccgactgctgcaggaacactttgcctagagcttattcggtggtagtctggttttgcctaggctaggaggagcccaatcccagaccatgctatccagtagtcggccggacttttcttcccctaattcgcacccaagaggagcccgctagatcaatccccgccaatcctaggaagctggcatgcttcgtaggtgcagacagtaatagcggggaccggcgcggggcaggtgtgtccggctaagacgccaggacagggcaggggctccaggacccgagaggagagggacttcttccagcgctcaagcgcccgctgccctctattagtgggaaaggaatccagcctcagccccgcgcgggcgcggtcggcgtcggcgggcccagaagcccagccctgggcatccgctgagctacatttggctgggtcttcccagagtgggctgaggagccagtttctcggtcaacactaggtctccacggggccaggggagaagggaggtgggaggtgagaaagctcagccgcctctggtttcgagtaaaagtcgccgcggttttgcagggaccgactttttcttgaggcgcatttaaggccaagtgactgtctcctgccctccctctctcctgccccctctcctccctgagtcccgccctcccgcacacgctgacccagggacacaccctactgcagcgacgcaaacagggcgttgttcccgttaaaggggaacgccaggagcctcccactgcccccttgcttcgcgcgcgcgcagccccgcagcgcagctttggcggcgccagcagcggagccaacgcacccgagtttgtgtttgaggccaccctgaggatcgggacagctgttcctttgggctgtaagtgatttggtggggagagtgaaggagatggaggagaaatgtgggcatcttccagtgagggtgccagaaagcgcagcgcaggcgcggggctttggccagctccctggggcttctgtttaggggcacagggtcccctgtgtgtcctgtttccctccaatgggtcttggagtaatacaacgaggagagcctttatggtctataagaccttacagggcaagggtgatggtgctggtgtctggatagcggataagggcggcccagttctcgccttgctgaagaggcgttgactctgggacacactggcaaaacagtccctgtggcggacatcccgagagtgttggactcctgtggttccccagttcccagcctcctgccatcggcttaattcaaaccctctgggagtcatcagaaatccttgtttatttcttccagtgcattccagagtttctttgaatgtgatgcttgtggagaggaacagaggggcctgggattgggtactttccaaactgggttattgaaacgttgtctccctggcccaagactctgcctaaaatggtccccagagtctcagccagatctttcacagccatgcatgtcctctaacaggtcatcccagccttcagttcccccaaagtttaaaatgaggggcgaggaccgcattacttgggataaatgtcctgccggctctgaccggctgaaattctcggactcagccttttaccctctgtctctctctcccgtccgctggacatctactcccttcggtccaggctcctgggctcctgtcccaccgcacccagaccggagctcaggcttgttggggttcgtgtcctggctttgagtgcctggggtgcagactggacccctaggcgagcacgtgggtctagcgcaagagcagaatgccccctgaccccaggggctgcctggggaagcgcgcggtggacgggaagcgcagggtccgggcaaccctctcgagccattcttttctttccacactactctggctctgcaccacctctccggagccgccagagtctgcgcgaggctgagctggggccaggaccgttcctctacgctggcagagttgggtggaaacttggagacaaacggaatgcggagagcactggggtctgggaaaccagcctcctcgccgctgtctcccccaccgcatgccacggctgtctccaggtctcagacggaaatctgggcacctactcccctcacccctacctccaccccataggggaattcaccatctgaaccggggtctcggagaacgtgacctctcaccttccagggaggtcgccgggaggtgcttggggtgggtggaagcgtgcagtggcctctgctcatattttctggaaacccctccgttccctgggtggttttagacgtgcgaaccgcttgttttgtttccaaaagcaaaagatgttccgttgcaggcgggcccggctgggcgctgggcactgggcgctggtcctgcaggcggctgctgccccctctcggcggcaggcggcgcgaaggctcctgacccgcgcgggcggtcgggctgcgggcgctgggccaggccgggccttccgctagtgcgcgggaccctccctctgcgcgcgcctccgtcgctcggcccagtgcgttcggcctcacgcccagcgctctcctcgcaggcagaaactccgctgagcagaacttgccgccagaatgctcctcctgttgctgagtatcatcgtcctccacgtcgcggtgctggtgctgctgttcgtctccacgatcgtcagcgtgagtgcctggcggggaggctccctgcgcggcccgcccttccccatctgggttcccagcccgtgctcctgctggttcaggactgtgttatttgcagacagttggaagtctcagacgtcccagggaagtttctggcaatctgcccccttccagttgctttgagaaaacgagagcagattcagtgataggaaccaagcgagcgctgggctgggttagctgcgcaggtctctatttaagccaagtaacttcagagccgatctagggtccccgaccttcatttgacaagattgtttaacttttttttttcttgatgcagcctcgttgaagaagaggagtatttatgatttttttttctccaaaccatagtcagatgggtgaattaatttataaaacacccttttaggacttgaaattggaaagttaaaatgggcttttctggaaaagagttcacaggtcccatgtcggctttatggcatgaacacaacacattgttagtaaagcttccactggtaggaacaggccatcagagtaacttctgttacaaaactgtccagcccattagatcttaaagttattttcttggcgatgaagatgagcagacattcaggcagttttccagtggtggctttcacttcttaatttaaggcacattgtaagcatgattttctttttcgttttcttttcttttcttttctttttttttttttttttgagatggagtctccagcctgtcacccgggctggagtgcagtgccatgatcttggcttactgcaacctctgccttccgggttcaagccattctcctgcctcagcctgggattacaggtgcccgccaccacgcctggctaattttttttttttttgtatttttagtagagacggggtttcactatgttggccaggcttgtctcaaactcctgacctcatgatccgcccacctctgcctcccaaagtgctgggattacaggtgtgagccaccgtgcccggcctgtaagcatgattttctagtctctgtgagaaataattatgttggggatttgtgacttagtttaacatttacaagcatcttcacagtatctccattgtgcctggtgatgatgatatcagactgataggagctataaacaaggaaatagactgagagaggcgggcttggggaatgatcccgagatgctgggaggagagaaggcttgaatgcaggtgtctaaggttgagttcatggctccttctactatagtaaacatctctgcacataatcgtttctgtgtgcatgtggaacttctccatttacaaggtgcttttaagtcataaaacgttggctcttaccatgcaggggtgggcggtgtggctaggtggatgcgggtgcttttcgccatccctgggcctttctccttccccttttccttcactcctccctccctccctgactcaggatatctatctgattctctctagcaatggatcgtgggcaatggacacgcaactgatctctggcagaactgtagcacctcttcctcaggaaatgtccaccactgtttctcatcatcaccaaacggtgaggctggttttgtgctccatgagcttgtcctcagacgcctgtaacacgtttctcagcccagagctggaaacgcttattggaagacacaagccagaatgtcgttgctggggtggggtgggatgtgacagggagccatgagtccagggaaaatgggaggggtggtgatctcgctggggaagctgagatcctgggcatcattgtgattcactctacctagagacatgcccttagtgccctcctgatcacttaggataatgctttttgtgattgaaaaaaatatcgacctgggagctgtgaaggtggtatgatagctaagcctttggcagacccccttgggacattggatcaaacgtgtatctttggtttggtggctgtctctattcagaaatgtcctgcccctttctgctgcagtgacagtggggctagctcactgcaccgtcagttacatggacacaagactggctgcctttccaggtcttgggcctcagtgatgccacctagcatcaaaacctttgaatgtttccttgttgcaagatggggacttgaagctatttgcaaaaccctaagctaagccttggggtccttaatccagaagatcgtatttctcctctgtcctcagcatctttgcttgtgagatatggaagccaggcttcatgagggtcaaattaagggataattggcagcagaagcaccaactaggtacccaaggcacccagagggaaaggaacacccagccaggagccctgtgtgtttggatgcagacaggtggaggtaaacaggatgagctgttttggtggctgggtaggccatagcgattgatgttaagagcccgtggacctggatccacatgatcttttgttccagaagatgtgtcctcaggctggaaggacctagagatacagcagagctttcctaacatcctgggtttaaaaggccacggaaatacagctttaaatgttgctggagctactcatagatccagtatatatgttcaagatgctacaccagacgagagaaaccagtttagatccagttcagtaaaacaggcagtgaagtggcctttggtcctggctttgcataatccagttgctttgctggactttccctcttacagctcagtacccagtaatacccaagcatgtccccagctgaagcattataaaccaaattccttgaaccacagtacaaatagaaactgctaaaataataatttggtaatttacatggagaagatacgcaaggagtagaaaaccctgctttatgtttttaccttctgggttggggagggagcagagaaaaggtcccagtcctattggagtgagaacagtgcttaatcttgtctctgagtgtgtgaaaggcattgaattaaagccatcccagaaattacgtggtgggtttgcatggtgagttggcaactgagtaaatgaaatactcatgagtgcctgagaatgtgaccgtagcactgcttgtccccaaagccacagcatccggtttctccccctttagggtctggctgaagttcccggagcactccggatgggagtctccgtactcgctactgacacctggtggttacaagtagtgactcagcccgaaaagggcaggctttggtgctcacaggcgccatccccaagtggcatctggccacgcggcttggcacagaatcctggactcttgggcccggaagggggcagttttggcaggcgtgttaaaacccggcgaagtttcagcagaaacgaggcggcagaggagttgctaagttgtgcttaaaccatctgcaggaaagaaagcaatattgacctgtagcatgttacagattgacatttggtgtcttctgccgttggaaatagctgtcagttggtgctagaagcagatctcaaagaggcactagggttattttaatcaggaaacttcttatctctcaacttgttccttctgtgccaagctcatgttcttgagttcatttacaatgcctccttagtgtgggtttcaaatctgcctcgttgctttccgtgaggaccccagagtgtctgttttccacatctcccttctcagctctcacaatcagggcattttgaaaacatctggacactgcacctgaacatgctgggtttgttttcacgccactcaggcttaatctaaatttgaaatttccatttacacttccccagtagtggttatctctgccgctatcttccccaacgtggcagcacttgctacgacttcagccttaagtggcgaatcctccagggcctctttgattgagtttaacaattgtggctgcagacaataagctgaaaaaaatgtgtactttttaaaacattatactgtctttacaaatgaactatgctcattgcgaaccatttaacttgtctgtatttgctcttagaaagtatatttgaaaaaaaatacttgttaagtaatcaaaagtaatttgttattgacatcgatttgtgaagaatatgttgcaagtgtgaaaaaataaatagtggtgcaatctcggctgactacaacctccacctcctgggttcaagcgattttcctgcctcagcctcccgagtagctgggattataggcgcccaacaccacgcctggctaatttttgtatttttagtagagaggggtttcatcatgttgggcaggctggtctcgaactcctgacctcaggagatccacccacctcacctcccaaagtgctgggattagaggtgtgagccactgcgccatgtgacttggtatttttttctgaaaggactcatttttctggtgcatgaccatgacacttcacctctctctgggggttgccactcatgttgttttctacatgaatggggcctcctggcatcgtgccatgaggcagtctaacatctaggttgtgtagtttgaaagagacacaccagatcttgcccccaggctacatcttaatattagaaatagttttagatttttaactaactgactttgactccgcctgccttctcgtttttctaaatgtgtttgtatactttctggcaccccctccttatctgcctcgtgtgggcagaggtaagagaggcttagtgtggggatattcgttatgatattgtatccagtgcctctccggcccagggaatacaaggatctggaatgcatgggccttgccttgatggtcccgagcctggtcgaagagtcaggagatagatatggaagggtgaatcactcccttggaaggcagagcaggccaggtgcccaaagggaggcaggcagacagcgtctgagttcagggaggaagcggatgggaaatctctggtgggaggtagaatctgatccatcctccaaaggatgggcaggatttaagtcaatacaggcaacggggaggagaatattccctgtgacctaaggtaagggtagaacaaggcaggggatggggtagactggttggctagtgttctggttaggattaggattgattgtgtataagagaacatcttcaaatgataggggcttaagtaagatcatttatttttctctcttttcaaagaagtctggaagtaggtagcctgagagaggtatggaggttccatgaaattgtcagagatgcagacactttctagctcatttctttgccatctcttgggtttggctgtcatcttcaggaaacaaaaggctgctagagctccagccatctcatccatgattcaagcagtagggtggagaaaggaggtggggaagaatgaatctccttttcttttaatgaaatgtgacatggtcacacctacacctatttacaagagaggctgagaaatatagtcattcggccttgggggaagcatggcttttcaaatcatagaaacctggcagcaaatacctctctgtaagcctggtgtggaatactttccttgagggtttgaccatcccctcccatacccaatcatactcttttgcaatagctcagttgggccctatgcagttccataagtcccagttatttcagcattcttcaaagagtccatctctgctgcatcctgggctctgtcagccaccccaccattctcacatgggctcttctcagaaactttaggacctgttgaggcttctctctctctatttctaccacctctccaggtataagtaagtcttattattattattgagacagagtttcactcttgttgcccaggctggagttcagtggcgccatcttggctcactgcaacctccgcttcccgggttcaagcaattctcctgcctcagcctcccgggtagctgggattacaggcatgcgccaccacgcttggctaattttttgtatttttagtagagacgggctttctccatgttggtcaggctggtctcgaactcccgacctcaggtgatccacctgcctcagcctcccaaagtgctgagattacaagcgtgagccaccatgcctggccatcttattattatttaatgagtccagacctctcttctgaatcccagacctgtttatccagctgtctcctggccacttcccttgggatatctaagagaggcccccaagtcactaggccagagacagtccttatcttcctctgccaattcaacccctctgtcactttctagtattttagtgaatgctgcttcaccagccagcaagccaaacatctagagtctgccttgacttgacgcgtttccttctttctcttctcagcattgtcacgggtccctcaggccaccccattgttccaatgcctgttgcccacctgtggtcacgctgcttcctcgtttgtcagaggcgccagggcagcctcctaactagtttgcctgaaccctttcttgctcctctgtgactcatttttcatatggaatccaggctgatatttaaaaaagcacaaacctaattatatcactcctcattttgaaacctttcagaggccgttcattggtcttaatcttcagatgaaaatctttaacaaggcccatcggaatctacctgaatgatccactcctgcttctgttaagtctcacctcccatctctcttcccctcatcttggaatttcagcgttttctcacgtcctgaaatgtgaacttcccacttcgggagtctctccatttctcttctgatctttcatgcaggactatttcttgaacaactctcgtgtaccagagactattgcaggtgctaaggttacaagagtgaacaagagcttatgttttactggacaaaccagtcagtaaacatggagaatttgggggcaatggtaagaactatataagacagggtaatgggataaagagggattgcagtggtgaaggaaggtctccttgaggagtggccaggagccagccatatgaacatctcggggaggttccatacagaaggaccgtcaagtgcaagatcgctggggagggaaggagcttggcgtagttgagggacagagggcagggcagactagtgggaacagagagtgaggggtaagtagaatcacagaccatctcaaaggtaccccccacccccactaggaaggagttgggtgcacatggatgcatttctaatctttgtgatttccttagacctgctgtcttccacgggtttctcagtggtccatttgattccaagttggagtgacagtccagaagcctctataaggcagaatatatcagaaattgtacaaggtagaaatgcatcggtatattttcagtgattattttgggtgacgggattcttatcactttggctgttttctttcttttgctgccttacctgttttcctcattgagatcttttattttcacaatcagaaaataactgtgaacattttatgttagaaaattggttttgagtagtaagtaggttccctctgccttgattaagagagtggagccctggggcatggcacgcagggtccatggcgtcgctttgaatgaggccagttcctggagctttagtttgcaaactcatacaatctggaaggctctggtgagggggaggggtgtgccaagcctcctccccaagaccctatgggtgagtttaaaatctactgacccaaaggattcaggcaaaacatttgccctgctattgaatgaaccagtgctttttgttttgaagtctccaagatccaaatatcaagtccaagttctcacaagcattcccctgctttttgtttaatttgtgtggacctgacgtgtagcagaatgggtcagaatactggaattaagccacaggcggcttgggagcccaagagctagaagggcacagtcctggcttgccctggcccctggctggtcttcatcagcttcagtgatgaggcaggacccaggcagtttgtcttcagtaaaatctgtctctcagggcctgtccctgctcacaaagtcctctcttgtctcagaagaaaaggtagttgataaactttttcatgctgaggtgttaggcacaaaaaatgtgcccctttttgaatcacttttgtttttaaaaaggaggccagtgctcaacaccaaagcatgaagggaattgttgagctttcctgtaatctgtccccaaacgtccttggccacctccattgtctaagggcagtacctgcagcccctcatttcccagtgacaacaggtgggtctgctctgccacagtgtgtgggcgggaccagcaccagacgctgagaagatgaccacttactactcttcttttccatttaaacagcagcagcagcagcagcagcagcagcagcagcagcaacagcaaactcatgactatcaataggttgtgtgaggaattagatcaatgctttgggttgaaaattagagaaactaaatcttgccagtctcagcagcccccaacctgagcccttggtggtctcctatcatcgctgtcttcaaaacgatcccagacttgtttatcaatttggtgacactgtcattttggcaaggacaccagacaatttccttgtctgtggctcagcttttggccagattttagaaaacacgggagaccttctgcatttatgggttcatgttttacattttaaaatcttcgtggctccctcagccaacccataatctctacccaaggaatggctctggattttacaggctcttatgagatgctgagaccctggtggtacaagggaggtacagaggacggaatgtgttgtcaacatgccaggatttcaacccttagggtttctctgatgccaatacccaggaattagtatgaaatgtttgtttgaacctgtgtctgaactgtatgacctggaatctatagtctttgctttaaaaaaacttcaattgtatccccaagatttcaccagcaccaagaaaacatcccttgcatttcaggagcagggactggccatggtgcagcctgaggttgtggatgttgatctttggtgcccgagagaaggctgtctgggatgaagccttctgactgtggtcaggtccctgccagtgctgggggccacatgagtgtgcagtcatccacacacaagtggcccccaacactggcagggacccggagtcatctggcccatccctccttcctatcccatcgagccacagacccctctgcaatatgcctaccacatgttcatcctaccactgatggggaacttattaccttcaagagagcctcttttgtttttgaagagctaatagtgagatccattcatgtgttcttcaactctattgagcctgtcctatgtactgggcactgttctagaaatggggtgcacagagatgaacaagaaagagcaggtccctgccattgtgcagctcacaaggagttggaggaaacaggcaatacacaatacatgcatcactatgggtagtggaacatgctctgcaggaaacaaatagggtgatccaatggaaagtcatcactggaggaatgagctgctcagggaaggcctcttccttccatagtgatgtggtctgagatttagaagacagggaaggaccagttataggaagaaccatgggaagaaaattctaggaggtaaagggaagaaccaaggccctgagttagctgaagaaaggagggtggggaatgcgggagagagggatgggagcaggatcgctggtgcctcacaggctgtggtactgagaaggacagttgggacatcattgaagggttttaagcagaagagtgtcatgatttgattcatgttttgtaagctcattctggctgttgagaatgaattctggggagaggcaagagtggaaactggggaccagtgaggagtttgtggtcatagtccagactggacatgatgatgacactgagatgacaatgatgacaatgacaatgatgttaagaatacaaacagctcacgtaagtgccaggcattctttgaaaagcaatgcatttaatcctcacaagaactctaggaggtagctggtggcttagctagggaggggaagtagagaagaaaacaggtctcatgacagggtttgctgatgggttagatgtagggagttagggaagaatgattctagatgactctacgttttgggcttgagcaactggtgtgtaactgaatcttggactgagatggggagactggaggaggaacagaagatttgcgggaaggtgtagaaatcaggatttatattttgaccatcagagaggtcagcaaatcacttcaatttagaagtctttggcttaggggagaggtctgggctggaaattcaaagtcaagagtcattcctctataccgaagggtattcaatgttgtggtgctgaatacagttacttggggaggagttgagagcagaaggcagaaaaggggaacagggttcagagctaagtcttgggcatgccaggggttaacgagggtacaggaaggagaggagactggggatgaacagccagtgatgagggaggaatgccaggagatattgtcacttaagaaattacctcggctgggcgcggtggctcacgcctataatcccagcactttgggaggctgaggcgggcggattacaaggtcaggagattgagaccatcctggctaacacggtgaaaccctgtctctactaaaaatacaaaacaaaattagccgggcgtggtggccggtgcctgtagtcccagctactcgggaggctgaggcaggagaatggcgtgaacccgggaggcggagcttgcagtgagccgagatcgcaccactgcacgccagcctgagcgacagagtgagactccgtctcaaaaaaagaaattaccttgttaaacccaacactgcccctcttttgtccattcacttctagttgccttcattcatgcctgatgtgctggacttgggttttatcaagttgcttggcacgtccttaaagaatttaaatctccacagtgcctcctggacaatgactgcagggtgacccccgtctctcctctacacgatgactcttcaaacagttgacgattgcagtttttctttccttccttctttcagtggcttctctggtgctggtcccagctgcataagcagggcctcttcttgcccttctgaagtttggtcagtggtttggcttggcaggctgatgagcagagaataagggaagccgctctctctttgccacaccattctccttccaccctctctagtttttgtggattctaagtctgaagaatggtggtagaataatttaattcattagattgcaagcatatcattgacttctctgcacccccagtgtgttgtagtggaaaaactagtagtctgggcatcagggaatccttgtttttctgcaccgggtctgcctgtaacaaattaggtaacctggggcaggtaccctggtttcctaaaagcagagcaggcattgaggtaggacctgaagttgaggtaggacctgcacattgcatgggtcccggagcctctgttcatgttcaggatgtaattgtggcatcgagggatcctaaaaggaggtggcctctgagctgggccttggcaatggggtagaattgcagtaggcagagggagcagagatgggttttgtgcttgtaaacgggcattggtttactgtcactggtgggggtagcagctcttttgttctagctcttcatttccataatgcgtgttcttttttcatactttaggggaaagaaggaggagaactctattatttctatggggagaattcctcctaaacctgaagatcttaaaactaagcgaattattccctgttcattctccactgatgcagttcatgactgcaattgcaactgcctttcccgtcattttctatggccaaactcagtgtttttaagtgagctcttcttttaaaaaacaaaaacaaaaacaagtctcctgataaatccgtttgaaagacactaagttttgaaagttaagcaggctttgatcattcatggtacattgtgaattaccaaggagggagattgatatccttcatcgtacaatgcactcccctcctttttcttttgtatctggtggagtaagtcttccaagagcaattcttagagaaacaaagcctactctgtttccctgtttctagagttttccaacaagggtataaaaaagcctcagacagcttactattatccagtaacctcaggtacctcagtggctgcgtgttattccctttagaagtccaaaaactcactagcagagcaagaatatggatgtcaaagtgcagaactagaccctgacaaactagctctgtgcctgccacaaagcctcttaattaggaatgcagttcattgaataactgtatcaaagttagctggaataccttgacatgaagattccttccacttactgagcagtttgtgcccactagtggccagacacaggctttgctctagctaaaatacccccaggattacctgttgagagagccgcccacgtcaccttcatcgcctttgtgagctccatgctggcacatagttgtctccatctgttttgctttccgcatgaatcataggcaaagttagcctgaccagcaagcccatttcaaagccaccagctgggggagaagttgaagcccagggggcaagacccacgctgggctttgggcatgtttgagctggtgggcgaagcatatgggcaaaggccacattgtttaggatggaggcctttcagagactcagctatttctggaatgacattcatactgagaaataaggaaaatggcgatctgtgtgatggttgtgggttgggaggtttgggcgtgggagtcctggtcttggggtcatgtgttttgaaaacagtctagcactatgcaaatgggaggtgttaataactctttgcctctgtgatttaccctctcatggctttttctctcttggcctctccaaggtctcttctgactcttgcaactgtccttcctttcactttcaacaaaacctgttctcttgagtcagaacagttttatgaattgcccagagtgggacttgatatggggcagggttggttccatgctggtaatgaaagatgcacataaactgttacattgaaaagtgcttcatactttctgagcccttaactcactaggttgtaggccctgggctaagaatatagctgagggggctgatgtatttccttcattgctcagctgctcctacagcaggaatctgaccttgaaatgagctttgatctttgtgcaactcgagcttcccactatctgctgggggagctaggtctgggtgctgccacggcccatgtcagaaagctgtcagcagctcttataccggacactctcagaacaggaggcctgcaaagagctttagctttagttttgttgttgttgttgtttttgagacagtctcgctctgtcgcccaggctggagtgcagtggcgccatctcggctcactgcaagctccacctcccgggttcacaccattctcctgcctcagcctcccaagtagttgggactacaggtgcccgccaccacgcccagctaattttttgtatttttagtagagacgaggtttcaccgtgttagccaggatggtctcaatctcctgacctcgtgatccacccgccttggcctcccaaagtgctgggattacaggtgtgagccacggcgcccggccttttttttttttttttttttgagacgagtcttgctctgtttccaggctggagtgcagtggtgtgatctcggctcactgcagtctccgccttccgggttcaagtgattctcctgctccagcctcccaaatagctgggattacaggcacatgccaccacacccagctaatttttgtatttttagtagagacggggtttcaccatgttggccagtatgatctcgatctcctgaccttgtgatccacccgctttggcctcccaaagtgctgggattacaggcatgagccaccacgcccggccagagctttagtttttaattccagtgctcagcaccaaggttggatattggcttaaaacttccactggaaactccacaaatgtttagcaggcctccactttgcaccaggaactgagtgtggcctggaggacagcaggtactcaacataagttctactatttattgcatacttgcaaattgggtggggcgtggggaagagtatcgccacactggggcttgtgttaatctatagtttagccacttgggatgttggtgtcacactaggtttgatctaaatagaacaggtttgtaattgacagcattttcacttgcattatatttctctgaactcgaatcattattttctgtacagctgacttgttttgctgtagcagagtttggcagataatagcttgcatgtcgaatccaacctgcttttgtaaataagattttattggataaatggctattgaaggaatgggtcacacccactcatttacatcttgtccatggctatggctgattttgtgatacaaaggcagaattgagtagttgttaagaagaccgtatgacctgcaaagcctaaagtatttgctctctgattctttatagatagtttgctatctgtgcagatatttgcactctgactctgtagcacccttatgctggagaggagatatgaattgataccaaagttgtatcaaaacacttttggagttctggccaatgtgctaataacctggcttgtgtgaacattgtggctctcattttcttttttcttttttttttttttgagacgagtcttgctctgtcgcccaggctggagtgcagtggcgcagtggcgcgatctcggctcactgcaagctccgcctccagggttcacgccattctcctgcctcagcctccagagtagctgggactacaggcgcccgccaccacgcccggctaatttttttttttttgtatttttagtagagacgggttttcactgtgttagccagcatggtctcgatctcctgacctcgtgatctgccctcctgggcctcccaagtgctgggattacaggcgtgacccactgcgcccggcctgtggctcccattttcatactgcttggtgtgacccagatggaaatgctccagaacctggcccctcaataacagcctgtaaatgcttgtttaccctgttttctcacatcagccttttaggtggggttatttgcactatcctttaacagcgcttcaataacaactcttttgtttgatcattatgacaacccaataaaatatattagtgcctcaagtacgtaaagcagaattcaaggccaaaaaaatgtatgtggcaagttaggtgggcggtcagaagaacttggcaacagagcccagccctgcctgggctgtcctaaccagagcacataaatgctggagagagtcaggctttgcacgtgctcacacgggacccttaccttggacaggatcaaagccctgtcatttctggagtgtgtgatatctgctgtctcttactgcgctggttgttacctgtctattccagttctgatgaatggctctgattggggagcagcatcatctgagcttagaaatgtcctcagggccctgtggggttccctttgagcaacaacgagagctcttgaatcttgcaccagccttttggagctggaatggagtttgctttctcctgggctgggctctgttttttttcctctcgctgtccttgtgtagcttttgatcaatggcactggaggaaaggaaaatcccttgttgttttcctgggcatgtggaagcccagtcctgcccagaattccactagccctttgagttttggaatcctgactcttagtaagtcaatagagtgctgcatctgtttttacctttgtaatcttttaaattggttttaattatttaagtaatacaagtattataatacatgaaaatatcctcaactgaaaggcttcttgaccaaactcttcttcgttgcaacagtagttcctgggggaacccactgacatcaatttgacacaactttggctctttctctacgaatatttgcatgcctgtggatgtctatacgcaattacatagttttttggtgtttgttttcataatgatgacatgttgtgtgtgcaccttactcttttcattgtcttggagacctttcaaagactcttcattttctaactcatgatttttttaactgctgcaaaatatttcattgtgaggatataccataatttattttccctcatagaaatgctacaatcaatgtccttatttattttcctctgagtatatgttcactgtttttccaggatatagtagataagcacttgaacacatatagtgtcattacgctagaggtgttacaatttttaaactacttttaatggcaaaaattacaattacttttgtatcaacctaatatattctgccacaaaatggctggtcacaaaaggattataataataatattattattattcctgtgaatggtgtctgcaggtagctatcacttatttgttctgctgatattatccattttttttgaattttgcctattggctggatgaaaattggtgtcaccctcctcatgggtttctcttgcatttccttggttgctagtgaggttgggcaccttttacgatgtttattggctgttcatatttctcctttgctaatcacatggcttttcaattttatacttagctgttttctctttgttctgtctgtaatttaattttgttaatgatgcgaactagagatttaattttatgttttaccaaatgaatagccaacactatgtattgtctgttgtatttttccccactggtttatatgatgttgtgtattatctaccaaatttacatgtatgcttccaaagtcttattccatcccattcttttatttttctttcatgattaacaccatatttttgaattgctaaaactttataatataaatataagctttgtatgtctataaataaaatacattttattaattataattatatgttatataattataatataagcacttgaacatatatacttctataattatatattatataattatatatcatacttctatgatatgttctataattatatattgtatatatcatagttctatgatatgttctataattatatattataaagttacaattaattgtatatttaatttataccatatactgtaataagcaaaatatagaaatatgttttaaatctggtaggtggtatcttgactcattggttttatatgtttttctgattttctttttgttcatttgttcgttttggtttttagttgctgttgtgtttacttcaaattttttcttatctgtcattgctcattgttttttagatgaatttttaattgatttttttccagttccagttgcaatatggattaggacagcattgaatttgtagattattttggatgaaattggcatctttataactttgagtgtttctatccaggaacttagtatgtttctttagtacttcttttatgtacttgaataaaatttgtctaacttgttgatgtatccccaaagaaccagacatttttattaaatgtattttaatatttttttctgtctcattagtctgtgcttttatccatattaagtcaattaatttttggacttatttcattgttttttttctggcttcttgagttgaaagtgtagttcactctttttaaggatttttctagcaaatgcttagaagtgtatacattgtcctctgagaactgctttggttacaacccacaggtgtgccatgtggctctctatataattccttgctgaagaagtttttacttttcatcttgttttttttaatccgaggaattatctggaacactgtttttaaatttccaaatttattttggctagtttgtttttaatgtctaatttctgtttgcctttaggtatatgttgagcctacatcatttctgcttctatatttattgagatattctttgttgcccttatagtcagtttgaaaagctgtcccatgtgtgtttgaaaataactttgctatatagacacaagttttctatacatctattaggacagatttgttaatcctcttatgtaatctatattctttcttctttttggtctacctgacatctattttgaggaaggaagctaaagtcttctactgttattgtgattttaacaatttcttctcatattttgattactttttgattttaactttttcaggccatgttattatatgcataatgatttattttcttcagtcatagatcatgtaaaccagaagtaaagatcaaataaaccaaatctttcctctatgaaacaaccaaacaactctctggccacttttatcctttcaacataagttctattttttattattaatttatcttctttcttttttgttaacatttgcctgaagcttcttttcagaatcttttttgtttttgactgttgcttgttttaggtgtatctattatattagaatatagctacaatgtctctcttttttttttttttttttttttttgagacagagtctctctctgtgcccaggctggagtgcagtggtgtgatcttggctcactacaacctccacctcctgagttcaagcgattctctgcctcaacctcccaagtagctgggactataggtgtccaccagcacacctggccaatttttttgtatttttcgtagagatggggttttggcatgttggccaggctggtcttgaactcctggcctcaagtgatctacctgcctcagcctcccaaaatgtcttaatcaaagataaaattccatatcttatgagtgccttgaacccattcacatataatgtggttgatgatagacttactatcttaatgcatgtgttttatttattgtgcttatggttgaaaaccatcttcttcatctctggatcatcagagtcaaccagagggcttggctcaaagcagtaggtattcaacaaatgctcattgaataaaaatgtccttgatcctctaattctgatttgattcgagaaataacttatggcaaagagctcaattgtaatggggttgggactaaaattcaagttaatgttgaaagatgtttcaagaagtatttaggttatattattaaatattagacactttctgtttatatagatttaacatataaagattttaagttttctgtgtatgtgaggtctcgtagtagtttctgctgaaaatgacaggggcgcggggttaagggtgaagacagtatctcaggattggagaaggaaatctaagatattgtctccaccagccatactcctcatgaacatgcacatggaaggacatttcccagccaaagtgaatccctttatttgttttagtttcagatttgagtctcagatttctttgtaattccagctgcatctaccaaagtgctagataatttttttattttaagcaaacaatattatgagaacattatctttattgcaaagtgctcctccagaagaacctctatgctggataaagacaaacatttgattaaggttatgtaagagtgaaatcaggatggctcacaacccattagccgtcattttcttactttaattgacaaagaaattgaaaaaatgaaagaagcatatgttgtgcttgaatgtgaagagtgctagactagaatcaaaggcctcttagatttggctgtgtcatttgggctcatgaaaacacctctggaaatctctttcagtgcaaaggagctggactagttgatctctcaggtttcttccaactctaaaatatctccagtctgtgccttggaaacatcttaggtgaaaatctaggaacagttaacctaatttgcacccttaaaattctgccatgagctgcttacaactcaaaacaagtttatcttactcagttactaattataaaccatccagatttcagagctgtgagtactgggtgaagcattgaaggtatgcttttgaagccattacatatggcagttactgagctgaaaggattaaatgctgcagcttccccagttgcccttcctccatgagagcagtgcctgcccccagcattctgtggcacttggaagacaagacagaggccaaatgcagatttttaccctgggcttccctctacagtgtggaactcaggttgtttcttctttcctccctgaaatgacatgagtttgcagcggatggtgaactgaagaaaccataggaggctctgtcttcttgcctgaatttcagttggaagcttggagatttggggttcaacagagataaggaagtgtaagccttcatcccgtctggtggttggcgatcacacaccgctctgtgctgaggctaatggccatgatcagagttgaccaaaaaaaaaaaaaaaaaaaaatacgggttgtccaagcaaattgatttccatacctatagagagcatacctttcttcatcagtattttcttccattcttccaaaaaattactttgggctctaacagccattcccgtgatctttacctctccttggggaatgcagataatttgaatagtggttttaagctatttttcttggaatacagaagttctgataagcccttcaaagacccctgagggcaagaagagggaaggtagtaggcagggctcaggccctctttaacacagacacatgtacataagtaacacatttgcaccaacactggaaggaaattcaatatattttaaaatgactttaactcctagtgatggaactatagatatttttttacagcccttccctgaatgttcacatgtgttttttatatatatgtgtgtgtcacgtatttgtatatgtgtatatacacatatatatagaaacacgtacatatttgtatgcatatttgtacatataggtatatatgtatgtaatgtgtacatattggcacatgtgtgtgtttgtatatgtatatatcagtacatatagatgtatgtatatatgtatatattttttcctccaaaataaacaataaagaatgtcttcttagattgcaaaagtgaattgtctgagttctgctaaggaaaaaggacttctgcttctgctgcctgtgaggactgtgctgtcagcagtcatggcccttcaggccctgcacctcgaggcagagccctcccccggccatggccagctctcctaaccaagtgtctctttcccccagaatggctgcagtctgtccaggccaccatgatcctgtcgatcatcttcagcattctgtctctgttcctgttcttctgccaactcttcaccctcaccaaggggggcaggttttacatcactggaatcttccaaattcttgctggtaagttgtggatggtaaagtccatgtggaagcggggtgcatccaagtctgcggaatgattagtttagtagaaggatgtggcctcagaatgactgatgttcatgagtctccccactggatgctttccataaagtgagggtgggtgcttgtatgtgtgggtgtgtacctgtatgtgtcttagaacttgggacttagaactctccccttctccctggaatgagatgcatatgaaagagaacttagaggatctggaaggaaggtccccacccaagccaggcgtatcaacaggaatgaaactgcaatctggacacataatcagaggtgaatactgaggctatctgtagagcaaaggtcaggcttgagagctgtttctgtagattacattatgcctccagaaaatggccctgatgtgctaagaactagcaaagtagttatcaggtatgtgtcttccaccaataggtagtgatgaagccacactgacaaattctcaccttccttgcttccagttcctagattctactgggctttgattgactgttgtcatcctctggtgtcttcattttgacactcttgtgtcacatattgtcatttccaaacatggggctatgacaacacatgaaaacacatgagaggtctccttaatctcctgcctaaactgtcttcaagttccctctttaaatacgttattaatatgcatagtgtgcagagtcctagaaacttctgttacacagggtgacatcttccaactttgtctctggattctgcctagcatcttacatgcttacatcttacatcttacatcttacatcttgcattctgcctagcatcttacattagctcttacatgtctgtctgttgacttactgttgactgaaccagcagggcattggagagaagtaagagctagatgtagtggtggattctgtggtccaaattcatagatcacaaacttcatatgtaccagagtatgtctaggtactgggagatgttctcaattctgaccctctgagagggcaaaggatgtagcatctcttctctgagttggttgtcagaatgcccatggtaccatttcaccactctgtccccaggagcagtcattggaaggttgacgtaaatagggttgtatgggaagacacagcccaaggttagatgttggtgaccttgtctagaagacagagagttcccctttcctgaaaaaaggaagtaaatgattaaccacttctcattaaacactcaaatacaacatttcaatactcatggttttgagatttcaaaaccagacagtgctttgctacttacacatgtcttatgacaccaagccaagctcctggatggttgctggctctgttaaatgactaattatgcaaggagatatcatttctaggtacgttaaagtgaagagttacccttactcaattttcagttggaataaaaacaactgtaacatattctggggtttctttttttttttctcactcgttttagtttgatatcaaatcaaataatgatcatatccattgcatcagtggatatgccctcaagataatatggatttagaaccagaactttcataatgtatttctattgaaatgttagtttcataagcgatgattgggttttcatgcccatgtgtgagatgtgcctcgctcaaaccttgttatgatttggcacgttacccatctgatgtgaaaaaaattacattttatttgtacaggctcgttattttactgatgaataatttgagcccaccagaggataaatgaatgaccaaggtcacccagctcatgacagggacggttgagtgttacactgaatatagtgaggtacttcttatattttaaagacagaatgcaccaaaaaatttaaagaacacaaaatccaaggcagaagctctgccttttatattatcttttattggaactgatttacaatggaaggtaaatgcaaatttgcaccatgtattattctgaagttccaaacatctgtgatgaatacaagcctgtactataagacccagtcacattgaaaatatggagctgagaagaggtaagctgctgttgaatgggctccttgggatagccagtaccttcatcttcattcatcctgctgagctgtttcggctttaagttctttaacaatgtctttttagcaacatcattacatcattttaggccaaaactcaaagtccagagataagaacccttaagtcactcatgtaactgcactgtgtgttaaaagtatttcagttcagccaaacactcttctcctaggtattgcgatttaagtatatttactaatccactcttgcttcactattttcattctcctccaaagtcaatacaagatgtttagaactgtgctggaagtgcagaattccgaatgtaaaagcgcatgactttgtcctctttatcccctttacatctagctgcttacgtctcatgaaactgaattttcagttatctgttggtccacatttgaataagaaattatcttgaatttgaaatgctgagctgtaatagcagttgtaatttgtaagtcctgagagtgtcctgtcctccgttgttaatcccagtcaagatcatctgagagttggtctccagggaacctcagatctctaggatgttgcactggaaatggctgcaggatctttccactaattctgagaactgaaagagttaggaactctatttggagagttcctggttcccttatcgtgtgacagttctaagtcaattttgtcatgtggttttctgactcacagactagtaagaagttagtaattagagagctaagtagattagggttgttggagatgagaaacccacgttttgggaaaacctggcaagtgacaacttaacatcaaggaagtagtcagaaaagctaaaactgacaaacagaaggtagaagaaagtagctccacactcatgggatgtgaaatctacaagcgtgcatgcccggcaaatgcctctccaatgcactggagcgttttaagtggaaaccactagaatctctgtgtagtctccggaagtggctgtgagggctgcattatctctgcacagcttcctcttggtgggcccagctgtgatctttatggatggcacacatcagctttcaggaaaagcacatgaaaggtgctagggctcttggagctgactgtaggtttgggagttgtctgtctccttgctctagattacagctctgtgtgttgtgtggggtctccatggtttgccaaattatctcttcctcacttagccacaaggctgacagttaggaactatctcttcttgattgcattaggttggctgcttcctgaatgcatatcaaaaggctccttcctttagttcagtgctttcaacctgagctgtgcatcagaatcacctgaggtcctttaaaaaaaaaaaaaagacagtgggcggggcgcagtggctcacgcctgtaatcccagcactttgggaggctgaggtgggcagatcacttgaggtcaggagttcaagaccagcccggccaacatggtgaaaccctgtctctactaaaaataaaaataaaaaaatagccaggcgtggtggtgcgtgcctgtagtcccagctacttgggaaactgaggcagagaagaatcacttgaacctaggaggtggaggttgcagtgagccaagatcatgccactgcactccagcctgggggtgacagagtaagactgtctcaaaaaaaaagaaaaaagaaaagaaaaaagacagtattcaggtctcatccctggagactctcatttaatagttgtgggatggatccactgcctaggtgactctgatgtgcatttagggttgggaaccactgacatagccattaaactgtccctaatcccactgtaaggttttctaggatattttcccagaaataactaaaccaccttcttagagaaggaacatcctgatcctgcgtctggactttggagtcattcttattttcagaacctatagccatctattccttgacaagatctgttgggttgggttgcactagactggaaaacatcaagaaattaatctagacacagacctaaaaggaagatttgcacgttttgatttattttactgcttacacccagcatcaagctccatgtggggcacatagaggagcctgaataaaactattattggttggatgattagataattgtgtttcctcggcagaatcaaactcaagtcaaatgtgtggttaccgggattaagaacagaaagaatagaggggactcctgagtgagtttcactttctctctctttttgttattgttgttcatttgttttgttaatagaaagatcaatatagctatagagcatttaaaataaaaggatttgggccaggtgtggtggcgaatgcctgtaatcccaacactttgaaagactgaggtgagaggattgcttaaagccaggagttcaagaccagcctgggcaacaaagcgagatgccatctctacaaaaaatgatttaaaaattagtggggtgccttggagcacgcctgtggtcccagctattcaggaggctgaggcaggaggattgcttgaggctgagaggtcaagactacagtgaactatgatcaggcccctgcacttgctccagcctggtgacagagtgagaccctgcctctctaggaaaaaaaaaaaaagaatttggtggggggggattaataaaagttcagtgccatcctgttcagagtgattcaaaggtggcttaagtcaaataccacatttagaaatttttgttagggacggatgattatggatgtctcactggccatgcccaaatcagagtcaatgctatgggtggctttctaggcagcaatggtcatttggatactgaaaatgtaaaaggagtgggcttcaatcacagaaacacagagaagtctcttgctttcagaggaacaggcctcacagccccttcctgccctcccttgttgccctgaggatgaagtgggagggagaaaaaggcacccactcatcaacccaacatcatagctgcaccttccagtgaccaccctggtggtctcactgacatccctttccagccaacttctctctgacttctgccccaggctctcaaatgaaagtgcttttgcgaggttaccaaagtacactttgaagtctttaatttgttggatcactctgctcctttcaatactgttagctacttactctttgaagctctattcccctggcttctgagacatcgctgtgttcccacttgcctgagtgaacacaccaggcggtcatgctggcctctcctctctccctcaccccacagccagccttctactgaatcctgcatttgggtagcatcctccgtaggcattacgcccatttctttgtcttgactcactaaccccagtgcagctatgcaaaggcctcctcatgcaccttccagctacctgccttgtccctgcccctgaatccattttctgcaccatggccagagtgatcattctaaaacgtgcgtctgatcatgtttctcctctgctgaagtttcctcagaggcttctcatcacagcttccttaacatgtcatgtaaggccctctctttcctgacccttagtgagctaatcagcctattatatgagagtccgtgtggcttctccagttctccagtttggactcagcgcccgtctatgctcttggggcatctggtgcatttccttccctctctcgaaattccatcgaactatattgaaattatatgcaaatgtctgtcttctagacacacagtccttaaggtaggagccatgtctcacttatcttggtacatctagagcagcagctagaacagggcccgcatgcaataggcactcattaaatgttcactgaaccaaagggaatggagatgataaggatgtactgggaattccctcagctacttcctttgaccttggccccttgggtgcttccttccagaggctctgggctctaatcactctcatggggttgcagtcactgttaaaggagcttaagactttctcttcaaaagggctttaggcagaacttgcaggaagttgttgcagacctacccatcctgagacagggagaaactcttgtaagttgaatgctcagcacatttgtattgtctggacagggtcagtgtccttctgcttaaagatgacctatgctcccagactcaggcccctaccagggagtcccggtcattgccaaagagcagaacatctgcctgtgcctcagggcctcacttacccttgccacagggacctggtgatacatctccacctactggttgctgagaaagtgagtcacagtccacttactaggggtatttggcttttggagatgactactggatgacattaactgtcttgggttgcagacagagggaacccagccaaagaatcatccttttctctatttcagggtacatctattgctttacatgcagacaatcttgtaataatatattccctaaaacatcagtctcatgacaacaatcatataaagtgtgtatcctctctttggctttgtagatatctaagtttactgcttatcacggttaagcttagagtcattcacttctgagattctactaagatgaaagtcatacacattaagctgtgtagttagtcgctgcacttctctatactgcctctttctatccctcttgttcaaggatggaatctggtatctcctcttagtcagtgaaatcggggagtagctggtccactcagctcctgaggcatttctcatgccagatctggttagacagcccatttgggagccctgcctgcatgatgataagtgttgtcctgccctgctagcactctgttaacacctttctctctgccaaggtcatgtttccttttttatagccctgccttcattagataagtcagacagagcccaagagacaacttcagtatttcttaaagacaagagttagcactttggagatgcaagccgtggaagagtggggcaagataattaaggatcctggacctcaaggcaaataaagtgtgtccccagcagatcaaaactgctgttttctgcaatcaacaattaacccgcaatgatttcgctcctgacatggccatctttgctgtcttctgaacttcctgtaggtggcaggtcctggatgctgtcccattttggttccaagactattgtgtggctctcttgacaggggccagtcaagtggcagttttctcctctgagttgcaggaggacaggcttaacagggtggttcatgtggcgtattcccacttctgcactgtcttcaaacaaagttgcagtgtccagtaaaacagcagcccaaatagcagtgaggttagatgtaggtggccgggcggtgggggggcgcgggtgcattgggaactctggaactgcatgaatcccacacggcatactggatttataatagagtcactcagagcttctcaaagaccctgttttcagggaggaaacagaccaggctttgtgcagctccaggctggggtgctgacatcactggacccctccttgtggggggacgctgtctgtcacgtgagctggggccatcagtttgagcgtggctgctccacagggcccaagatggaggcttttcttctctttccaacaccgaagggctgcattggtgggccagggagggtggcctgacccacctgcatatccagtgccctttagccttctttgggcttcaaatgcaaccttggggcacccagggaaatggagcttgcctttgatcatcttccccctctgcagcgtggcttcccagtcatactgtcggctgcatccttattcctcactttctttttccctctccacacatttctttgtctgtttggcagtgcccataggcattgcttgcttcacctggtatgtggcaactctgttagggggaccataggcccctgtggtctgcatggagcttaatccttttaccatggcgtgactccaataatggtaaaatgtcacttcacttccattggctttaggtaatgccaccactcacttgtagagtggcatatagatttccaggggtttccatacccaaccacccttggaaagagacaggtaggtttttcttgcagcctgaatgcctgctggccatgtagtgtggcctgggaattggtgacagtgaaagaaagagaaatagggcagaaaatgtaaagaaaaccctcaggtattaaggcctaggtggccaagattggaaatagagagcaagttgttttccttgttcccatatttttgtgctacctcctttcaattctggacctggaagcagatttccttccagaggtagaaatgttcttcctacccagcaattgtcagcatccggggtggcggagagggggccgctctgccatggactctccgtcacccagcttgtccctctccttccccaggtctgtgcgtgatgagtgctgcggccatctacacggtgaggcacccggagtggcatctcaactcggattactcctacggtttcgcctacatcctggcctgggtggccttccccctggcccttctcagcggtgtcatctatgtgatcttgcggaaacgcgaatgaggcgcccagacggtctgtctgaggctctgagcgtacatagggaagggaggaagggaaaacagaaagcagacaaagaaaaaagagctagcccaaaatcccaaactcaaaccaaaccaaacagaaagcagtggaggtgggggttgctgttgattgaagatgtatataatatctccggtttataaaacctatttataacactttttacatatatgtacatagtattgtttgctttttatgttgaccatcagcctcgtgttgagccttaaagaagtagctaaggaactttacatcctaacagtataatccagctcagtatttttgttttgttttttgtttgtttgttttgttttacccagaaataagataactccatctcgccccttccctttcatctgaaagaagatacctccctcccagtccacctcatttagaaaaccaaagtgtgggtagaaaccccaaatgtccaaaagcccttttctggtgggtgacccagtgcatccaacagaaacagccgctgcccgaacctctgtgtgaagctttacgcgcacacggacaaaatgcccaaactggagcccttgcaaaaacacggcttgtggcattggcatacttgcccttacaggtggagtatcttcgtcacacatctaaatgagaaatcagtgacaacaagtctttgaaatggtgctatggatttaccattccttattatcactaatcatctaaacaactcactggaaatccaattaacaattttacaacataagatagaatggagacctgaataattctgtgtaatataaatggtttataactgcttttgtacctagctaggctgctattattactataatgagtaaatcataaagccttcatcactcccacatttttcttacggtcggagcatcagaacaagcgtctagactccttgggaccgtgagttcctagagcttggctgggtctaggctgttctgtgcctccaaggactgtctggcaatgacttgtattggccaccaactgtagatgtatatatggtgcccttctgatgctaagactccagaccttttgtttttgctttgcattttctgattttataccaactgtgtggactaagatgcattaaaataaacatcagagtaactcactggtctctcttgagtttttgtgggaacttgggtgtgggtacaaggtgcctgttggagcaggatgaagagcttcagtggaaagcaaagttgagctggagatttgggttacaagatggtgctaaggcaccaaaatcatagctgttttacaagctacagggagcacatgatgccttcatgatgtctgtgcaaaggtttgctaattggagacagttgggaattgcagctgaaatggaggctgtaaatggactggaaggcacttgagtattcatttagttcaaccctctctggtgctctgttgtttgatgacccacatggaaaacatggaggcatgtcatgagctgccctgatatactgggaatgttggcagaagcatctcagatccctcaccctgaggtatgatatggtgaaaggtctgaatgatggtgacttgaggccacacttgcagataaaacattggttggcaccaactaagctcctaatgccatcctgaaggagagaaaaggccaccattgtcacccagctcagggtttctgagttgtgtctcatgcgtccatatttttacccgtcgaccttttgttgtgtgtctgcaaaataacaagcaaatgatgtggttgatagtccttaatatttattgtgcaactattttgaattgggtaccaaagataaagaagtaatgacatatatcttaacatcgaaaggtcacattttagtgagaggtacaagtaaacaagtgactatattataataaggttaagagcatagaaatgagagcctgggtttgagcctgtcctttgctgcttaccagccataggggcctgaaaaggttacgtaaacactaagattcagttttctcatctataaaatggggatgccaataacaagggtatagggctgaggggatttcaaggaagttatatggataaagtgttcagcatagtgactagtacctagaaagactctatagattagagtggttatcacatatgttacaacagaggtatatttgaaagagcatgtaggagagacattgactgttatgcaggattctcagtatcagtctgcacactggaatctcccatgcaggaattcccattagagatttggattccctgtttccatgatgggacccacccatcatggtttaaagaacacttctggtgattacagcatgcaactggggatgacacctctgagctagtgcaggaggtctcatacttcaacatgctagtgaatcacctgggaatctgatagcatgcagattctgaaactttaggcccaggtggggattgagattctgcatttccaattagtgcctgggtgaggtggatgctgcttgtccaccgaccacactttgagtagcaagggcctagcataaagccaccttcaggtaccttgtgctcttctgtccttgggtgtctgtgacggaaggacttctcttttctgaggttttcagtagtgactgctactctgcttttgactcagatagttttaaggtggcacaggtggccatgagatgcatgtgagattaagaaaactaggaattttatttcacgagctggtactttgaaaacatacacttttatttcataaacttttctaacatttcattaaaaattaatagggataagaataaagaagaaaagcaaaaacggcccctaaatctccctacccaggtaacactcttggcatttaaaaaaaaaccatatatctaggattataacatcctatcttgtatctagagggaaaaatacaatctgaaagcctctttcccacctacccatagtcttttgccaaaggtaaccgtaagacatagtttcttatgacttcttccaggaaagaaaattgcccacatatgtacatccatctatgtattttttaaacgtacacaaaagtgatcatactactcacttctgcaccttttcatttaatgataaaaatttgagatcattctataccattctataccagcatatacctcatgctttttagtgaacactattttattctttcaaaattctgcatagtattttattgtattgttgtacaaacctttatttaccagccctccattgatagatattttggttgtgtctactttttattattaatcaaaatatttctgtggacatccttgtacatgaatattggtgacttttaaaaagtatatccaaatcttaaatttctggtaaggatgttgccaaaacagagggtgtgtatattttgaagaatctaataggtattttcagcttagtctccaggaaaattacaccaactcagttgacagtggagccttacattctacatggaactcatggagtccccccaaacagagaagggttagaataaaacacttgagtaaaaacaacttatctgctatcagttccttgggtcatgattgttattgatctctcatctatggggacagcttcgcttccttgggaacttgtctgccttgaggatctgtaatgatagaagggacattatactgaccctacacaaacaacaacaaaaaattacaaagaaatgctatgaacaattgtatacaacaaattaggcaccttagatgaaatggacaaattccccagacacaattactgaaactgactcaatatgaaatagataataagaataggcctataatgagtgaagagattgatctattaatactactactaataaattattcacaaacaaaaaagcccaggcccaaatggcttcactactgagttctaccaaatatttaaagaagaattaataccaattcttaacaaactcct

SEQ ID NO: 15 - RNA, 1861 nt, Homo sapiens
  source 1..1861: mol_type = mRNA
aataaactggaaagacgcctggtctggcttcagttacagggagcaccaccagggaacatctcggggagcctggttggaagctgcaggcttagtctgtcggctgcgggtctctgactgccctgtggggagggtcttgccttaacatcccttgcatttggctgcaaagaaatctgcttggaagaaggggttacgctgtttggccgggcagaaactccgctgagcagaacttgccgccagaatgctcctcctgttgctgagtatcatcgtcctccacgtcgcggtgctggtgctgctgttcgtctccacgatcgtcagccaatggatcgtgggcaatggacacgcaactgatctctggcagaactgtagcacctcttcctcaggaaatgtccaccactgtttctcatcatcaccaaacgaatggctgcagtctgtccaggccaccatgatcctgtcgatcatcttcagcattctgtctctgttcctgttcttctgccaactcttcaccctcaccaaggggggcaggttttacatcactggaatcttccaaattcttgctggtctgtgcgtgatgagtgctgcggccatctacacggtgaggcacccggagtggcatctcaactcggattactcctacggtttcgcctacatcctggcctgggtggccttccccctggcccttctcagcggtgtcatctatgtgatcttgcggaaacgcgaatgaggcgcccagacggtctgtctgaggctctgagcgtacatagggaagggaggaagggaaaacagaaagcagacaaagaaaaaagagctagcccaaaatcccaaactcaaaccaaaccaaacagaaagcagtggaggtgggggttgctgttgattgaagatgtatataatatctccggtttataaaacctatttataacactttttacatatatgtacatagtattgtttgctttttatgttgaccatcagcctcgtgttgagccttaaagaagtagctaaggaactttacatcctaacagtataatccagctcagtatttttgttttgttttttgtttgtttgttttgttttacccagaaataagataactccatctcgccccttccctttcatctgaaagaagatacctccctcccagtccacctcatttagaaaaccaaagtgtgggtagaaaccccaaatgtccaaaagcccttttctggtgggtgacccagtgcatccaacagaaacagccgctgcccgaacctctgtgtgaagctttacgcgcacacggacaaaatgcccaaactggagcccttgcaaaaacacggcttgtggcattggcatacttgcccttacaggtggagtatcttcgtcacacatctaaatgagaaatcagtgacaacaagtctttgaaatggtgctatggatttaccattccttattatcactaatcatctaaacaactcactggaaatccaattaacaattttacaacataagatagaatggagacctgaataattctgtgtaatataaatggtttataactgcttttgtacctagctaggctgctattattactataatgagtaaatcataaagccttcatcactcccacatttttcttacggtcggagcatcagaacaagcgtctagactccttgggaccgtgagttcctagagcttggctgggtctaggctgttctgtgcctccaaggactgtctggcaatgacttgtattggccaccaactgtagatgtatatatggtgcccttctgatgctaagactccagaccttttgtttttgctttgcattttctgattttataccaactgtgtggactaagatgcattaaaataaacatcagagtaactcact

SEQ ID NO: 16 - DNA, 25 bp, synthetic construct
  source 1..25: mol_type = other DNA
gacatatgccaagattgtgcactac

SEQ ID NO: 17 - DNA, 21 bp, synthetic construct
  source 1..21: mol_type = other DNA
cacgaatgaggtcctgagctt

SEQ ID NO: 18 - DNA, 22 bp, synthetic construct
  source 1..22: mol_type = other DNA
aacacttgtcgctgccgctggc

SEQ ID NO: 19 - DNA, 20 bp, synthetic construct
  source 1..20: mol_type = other DNA
ctcctcagaccgctttttgc

SEQ ID NO: 20 - DNA, 24 bp, synthetic construct
  source 1..24: mol_type = other DNA
taacctggttcatcatcgctaatc

SEQ ID NO: 21 - DNA, 20 bp, synthetic construct
  source 1..20: mol_type = other DNA
ccgtcatgccgacccgcagt

SEQ ID NO: 22-25 - skipped (4 entries)

SEQ ID NO: 26 - protein, 13 aa, synthetic construct
CSPDAHLGCISYC

SEQ ID NO: 27 - protein, 13 aa, synthetic construct
CSPDAYLGCISYC

SEQ ID NO: 28-34 - skipped (7 entries)

SEQ ID NO: 35 - protein, 13 aa, synthetic construct
CXXDXXXGCISYC

SEQ ID NO: 36 - protein, 15 aa, synthetic construct
ACSADDWLGCISWCA

SEQ ID NO: 37 - protein, 22 aa, synthetic construct
  SITE 16..21: note = MeGly
  SITE 22: note = 6-fluorescein lysine
ACSADDWLGCISWCAXXXXXXX

SEQ ID NO: 38 - protein, 15 aa, synthetic construct
ACSSDAYLGCISWCA

SEQ ID NO: 39 - protein, 22 aa, synthetic construct
  SITE 16..21: note = MeGly
  SITE 22: note = 6-fluorescein lysine
ACSSDAYLGCISWCAXXXXXXX

SEQ ID NO: 40 - protein, 15 aa, synthetic construct
ACPPDAHLGCISWCA

SEQ ID NO: 41 - protein, 13 aa, synthetic construct
CPPDAHLGCISWC

SEQ ID NO: 42 - protein, 15 aa, synthetic construct
ACPQDAYLGCISWCA

SEQ ID NO: 43 - protein, 13 aa, synthetic construct
CPQDAYLGCISWC

SEQ ID NO: 44 - protein, 15 aa, synthetic construct
ACPPDSWQGCISYCA

SEQ ID NO: 45 - protein, 22 aa, synthetic construct
  SITE 16..21: note = MeGly
  SITE 22: note = 6-fluorescein lysine
ACPPDSWQGCISYCAXXXXXXX

SEQ ID NO: 46 - protein, 15 aa, synthetic construct
ACSPDAHLGCISYCA

SEQ ID NO: 47 - protein, 20 aa, synthetic construct
  SITE 14..19: note = MeGly
  SITE 20: note = 6-fluorescein lysine
CSPDAHLGCISYCXXXXXXX

SEQ ID NO: 48 - protein, 21 aa, synthetic construct
  SITE 15..20: note = MeGly
  SITE 21: note = 6-fluorescein lysine
CSPDAHLGCISYCAXXXXXXX

SEQ ID NO: 49 - protein, 21 aa, synthetic construct
  SITE 1: note = N-Fluorescein glycine
  SITE 2..6: note = MeGly
GXXXXXACSPDAHLGCISYCA

SEQ ID NO: 50 - protein, 16 aa, synthetic construct
  SITE 2: note = 1-Naphthylalanine
NXNCSPDAHLGCISYC

SEQ ID NO: 51 - protein, 16 aa, synthetic construct
  SITE 15: note = Pipecolic Acid
CSPDAHLGCISYCEXW

SEQ ID NO: 52 - protein, 16 aa, synthetic construct
CSPDAHLGCISYCEPW

SEQ ID NO: 53 - protein, 16 aa, synthetic construct
NWNCSPDAHLGCISYC

SEQ ID NO: 54 - protein, 17 aa, synthetic construct
NWNCSPDAHLGCISYCA

SEQ ID NO: 55 - protein, 16 aa, synthetic construct
  SITE 15: note = azetidine
CSPDAHLGCISYCEXW

SEQ ID NO: 56 - protein, 16 aa, synthetic construct
  SITE 15: note = azetidine
CSPDAHLGCISYCEXW

SEQ ID NO: 57 - skipped

SEQ ID NO: 58 - protein, 16 aa, synthetic construct
  SITE 2: note = D-tryptophan
NXNCSPDAHLGCISYC

SEQ ID NO: 59 - protein, 17 aa, synthetic construct
HWMCSPDAHLGCISYCA

SEQ ID NO: 60 - protein, 17 aa, synthetic construct
ACSPDAHLGCISYCPHP

SEQ ID NO: 61 - protein, 17 aa, synthetic construct
ACSPDAHLGCISYCEPW

SEQ ID NO: 62 - protein, 17 aa, synthetic construct
NEVCSPDAHLGCISYCA

SEQ ID NO: 63 - protein, 18 aa, synthetic construct
ACSPDAHLGCISYCPIVH

SEQ ID NO: 64 - protein, 17 aa, synthetic construct
HTSCSPDAHLGCISYCA

SEQ ID NO: 65 - protein, 16 aa, synthetic construct
  SITE 2: note = N-methyl tryptophan
NXNCSPDAHLGCISYC

SEQ ID NO: 66 - skipped

SEQ ID NO: 67 - protein, 18 aa, synthetic construct
ACSPDAHLGCISYCEHQE

SEQ ID NO: 68 - protein, 17 aa, synthetic construct
ESFCSPDAHLGCISYCA

SEQ ID NO: 69 - protein, 17 aa, synthetic construct
  SITE 17: note = 6-azido lysine
NWNCSPDAHLGCISYCX

SEQ ID NO: 70 - protein, 17 aa, synthetic construct
  SITE 17: note = 6-azido lysine
CSPDAHLGCISYCEPWX

SEQ ID NO: 71 - protein, 14 aa, synthetic construct
  SITE 14: note = 6-azido lysine
CSPDAHLGCISYCX

SEQ ID NO: 72 - protein, 17 aa, synthetic construct
  SITE 2: note = D-tyrosine
  SITE 17: note = 6-azido lysine
NXNCSPDAHLGCISYCX

SEQ ID NO: 73 - protein, 17 aa, synthetic construct
  SITE 15: note = D-Proline
  SITE 17: note = 6-azido lysine
CSPDAHLGCISYCEXWX

SEQ ID NO: 74 - protein, 17 aa, synthetic construct
  SITE 15: note = azetidine
  SITE 17: note = 6-azido lysine
CSPDAHLGCISYCEXWX

SEQ ID NO: 75 - protein, 17 aa, synthetic construct
  SITE 15: note = Pipecolic Acid
  SITE 17: note = 6-azido lysine
CSPDAHLGCISYCEXWX

SEQ ID NO: 76 - protein, 14 aa, synthetic construct
  SITE 14: note = K(N3)(PYA-Maleimide)
CSPDAHLGCISYCX

SEQ ID NO: 77-78 - skipped (2 entries)

SEQ ID NO: 79 - protein, 23 aa, synthetic construct
  SITE 23: note = 6-azido lysine
CSPDAHLGCISYCEPWGGSGGSX

SEQ ID NO: 80 - protein, 15 aa, synthetic construct
ACPGDAHLGCISYCA

SEQ ID NO: 81 - protein, 13 aa, synthetic construct
CPGDAHLGCISYC

SEQ ID NO: 82 - protein, 15 aa, synthetic construct
ACPPDSHLGCISYCA

SEQ ID NO: 83 - protein, 13 aa, synthetic construct
CPPDSHLGCISYC

SEQ ID NO: 84 - protein, 15 aa, synthetic construct
ACSADDWLGCISYCA

SEQ ID NO: 85 - protein, 13 aa, synthetic construct
CSADDWLGCISYC

SEQ ID NO: 86 - protein, 13 aa, synthetic construct
  SITE 3: note = 4Hyp
  SITE 10: note = t-butyl glycine
CPXDAYLGCXSYC

SEQ ID NO: 87 - protein, 16 aa, synthetic construct
  SITE 3: note = 4Hyp
  SITE 10: note = t-butyl glycine
CPXDAYLGCXSYCEPW

SEQ ID NO: 88 - protein, 15 aa, synthetic construct
  SITE 4: note = 4Hyp
  SITE 11: note = t-butyl glycine
ACPXDAYLGCXSYCA

SEQ ID NO: 89 - skipped

SEQ ID NO: 90 - protein, 14 aa, synthetic construct
  SITE 3: note = 4Hyp
  SITE 10: note = t-butyl glycine
  SITE 14: note = 6-azido lysine
CPXDAYLGCXSYCX

SEQ ID NO: 91 - protein, 17 aa, synthetic construct
  SITE 6: note = 4Hyp
  SITE 13: note = t-butyl glycine
  SITE 17: note = 6-azido lysine
NWNCPXDAYLGCXSYCX

SEQ ID NO: 92 - protein, 17 aa, synthetic construct
  SITE 3: note = 4Hyp
  SITE 10: note = t-butyl glycine
  SITE 17: note = 6-azido lysine
CPXDAYLGCXSYCEPWX

SEQ ID NO: 93 - protein, 13 aa, synthetic construct
  SITE 3: note = 4Hyp
CPXDAYLGCISYC

SEQ ID NO: 94 - protein, 14 aa, synthetic construct
  SITE 3: note = 4Hyp
  SITE 14: note = 6-azido lysine
CPXDAYLGCISYCX

SEQ ID NO: 95 - protein, 13 aa, synthetic construct
  SITE 3: note = 4Hyp
CSXDAHLGCISYC

SEQ ID NO: 96 - protein, 15 aa, synthetic construct
  SITE 4: note = 4Hyp
ACSXDAHLGCISYCA

SEQ ID NO: 97 - protein, 14 aa, synthetic construct
  SITE 3: note = 4Hyp
  SITE 14: note = 6-azido lysine
CSXDAHLGCISYCX

SEQ ID NO: 98 - protein, 15 aa, synthetic construct
  SITE 4: note = Aib
  SITE 11: note = t-butyl glycine
ACPXDAHLGCXSYCA

SEQ ID NO: 99 - protein, 18 aa, synthetic construct
TYMNCPPDAHLGCISYCA

SEQ ID NO: 100 - protein, 15 aa, synthetic construct
ACPPDAHLGCISYCA

SEQ ID NO: 101 - protein, 15 aa, synthetic construct
  SITE 4: note = Aib
  SITE 11: note = t-butyl glycine
ACPXDAYLGCXSYCA

SEQ ID NO: 102 - protein, 13 aa, synthetic construct
CSADAHLGCISYC

SEQ ID NO: 103 - protein, 15 aa, synthetic construct
  SITE 4: note = Aib
  SITE 11: note = t-butyl glycine
ACSXDAHLGCXSYCA

SEQ ID NO: 104 - protein, 15 aa, synthetic construct
  SITE 11: note = 2-amino-3-ethyl-pentanoic acid
ACSPDAHLGCXSYCA

SEQ ID NO: 105 - protein, 15 aa, synthetic construct
  SITE 11: note = t-butyl glycine
ACPPDAYLGCXSYCA

SEQ ID NO: 106 - protein, 15 aa, synthetic construct
  SITE 4: note = Aib
  SITE 11: note = t-butyl glycine
ACSXDAYLGCXSYCA

SEQ ID NO: 107 - protein, 13 aa, synthetic construct
CAPDAHLGCISYC

SEQ ID NO: 108 - protein, 15 aa, synthetic construct
  SITE 4: note = Aib
ACPXDAHLGCISYCA

SEQ ID NO: 109 - protein, 15 aa, synthetic construct
  SITE 11: note = t-butyl glycine
ACSPDAYLGCXSYCA

SEQ ID NO: 110 - protein, 15 aa, synthetic construct
  SITE 11: note = t-butyl glycine
ACSPDAHLGCXSYCA

SEQ ID NO: 111 - protein, 18 aa, synthetic construct
IDSNCPNDAHLGCISYCA

SEQ ID NO: 112 - protein, 18 aa, synthetic construct
WGKSCPIDAHLGCISYCA

SEQ ID NO: 113 - protein, 15 aa, synthetic construct
ACSPDAYLGCISYCA

SEQ ID NO: 114 - protein, 15 aa, synthetic construct
ACPPDAYLGCISYCA

SEQ ID NO: 115 - protein, 15 aa, synthetic construct
  SITE 4: note = Aib
ACSXDAHLGCISYCA

SEQ ID NO: 116 - protein, 15 aa, synthetic construct
  SITE 11: note = cyclohexyl glycine
ACSPDAHLGCXSYCA

SEQ ID NO: 117 - protein, 22 aa, synthetic construct
  SITE 16..21: note = MeGly
  SITE 22: note = 6-fluorescein lysine
ACAPDAHLGCISYCAXXXXXXX

SEQ ID NO: 118 - protein, 15 aa, synthetic construct
  SITE 8: note = t-butyl alanine
ACYLPDWXCGDEYCA

SEQ ID NO: 119 - protein, 15 aa, synthetic construct
  SITE 13: note = 2-Naphthylalanine
ACSPDAHLGCISXCA

SEQ ID NO: 120 - protein, 15 aa, synthetic construct
  SITE 13: note = 3-t-Butyl-Tyrosine
ACSPDAHLGCISXCA

SEQ ID NO: 121 - protein, 15 aa, synthetic construct
  SITE 6: note = Aib
ACSPDXHLGCISYCA

SEQ ID NO: 122 - protein, 15 aa, synthetic construct
  SITE 13: note = 1-Naphthylalanine
ACSPDAHLGCISXCA

SEQ ID NO: 123 - protein, 15 aa, synthetic construct
  SITE 8: note = t-butyl alanine
ACSPDAHXGCISYCA

SEQ ID NO: 124 - protein, 15 aa, synthetic construct
  SITE 8: note = beta-cyclobutylalanine
ACSPDAHXGCISYCA

SEQ ID NO: 125 - protein, 15 aa, synthetic construct
ACSPDAHLGCISWCA

SEQ ID NO: 126 - protein, 15 aa, synthetic construct
  SITE 6: note = Abu
ACSPDXHLGCISYCA

SEQ ID NO: 127 - protein, 15 aa, synthetic construct
  SITE 4: note = azetidine
ACSXDAHLGCISYCA

SEQ ID NO: 128 - protein, 13 aa, synthetic construct
  SITE 3: note = azetidine
CSXDAHLGCISYC

SEQ ID NO: 129 - protein, 14 aa, synthetic construct
  SITE 3: note = azetidine
  SITE 14: note = 6-azido lysine
CSXDAHLGCISYCX

SEQ ID NO: 130 - protein, 15 aa, synthetic construct
ACSPDDHLGCISYCA

SEQ ID NO: 131 - protein, 15 aa, synthetic construct
ACSPDSHLGCISYCA

SEQ ID NO: 132 - protein, 15 aa, synthetic construct
  SITE 8: note = Abu
ACSPDAHXGCISYCA

SEQ ID NO: 133 - protein, 15 aa, synthetic construct
  SITE 13: note = 4-pyridylalanine
ACSPDAHLGCISXCA

SEQ ID NO: 134 - protein, 15 aa, synthetic construct
  SITE 4: note = D-Alanine
ACPXDAHLGCISYCA

SEQ ID NO: 135 - protein, 15 aa, synthetic construct
  SITE 11: note = t-butyl alanine
ACSPDAYLGCXSYCA

SEQ ID NO: 136 - protein, 15 aa, synthetic construct
  SITE 11: note = cyclopentyl glycine
ACSPDAHLGCXSYCA

SEQ ID NO: 137 - protein, 15 aa, synthetic construct
  SITE 11: note = cyclobutyl glycine
ACSPDAHLGCXSYCA

SEQ ID NO: 138 - protein, 15 aa, synthetic construct
  SITE 9: note = D-alanine
ACSPDAHLXCISYCA

SEQ ID NO: 139 - protein, 15 aa, synthetic construct
  SITE 8: note = Aib
ACSPDAHXGCISYCA

SEQ ID NO: 140 - protein, 15 aa, synthetic construct
  SITE 11: note = cyclopropyl glycine
ACSPDAHLGCXSYCA

SEQ ID NO: 141 - protein, 15 aa, synthetic construct
  SITE 11: note = beta-methyl isoleucine
ACSPDAHLGCXSYCA

SEQ ID NO: 142 - protein, 22 aa, synthetic construct
  SITE 16..21: note = MeGly
  SITE 22: note = 6-fluorescein lysine
ACSADAHLGCISYCAXXXXXXX

SEQ ID NO: 143 - protein, 22 aa, synthetic construct
  SITE 16..21: note = MeGly
  SITE 22: note = 6-fluorescein lysine
ACSPAAHLGCISYCAXXXXXXX

SEQ ID NO: 144 - protein, 22 aa, synthetic construct
  SITE 16..21: note = MeGly
  SITE 22: note = 6-fluorescein lysine
ACSPDAALGCISYCAXXXXXXX

SEQ ID NO: 145 - protein, 22 aa, synthetic construct
  SITE 16..21: note = MeGly
  SITE 22: note = 6-fluorescein lysine
ACSPDAHAGCISYCAXXXXXXX

SEQ ID NO: 146 - protein, 22 aa, synthetic construct
  SITE 16..21: note = MeGly
  SITE 22: note = 6-fluorescein lysine
ACSPDAHLACISYCAXXXXXXX

SEQ ID NO: 147 - protein, 22 aa, synthetic construct
  SITE 16..21: note = MeGly
  SITE 22: note = 6-fluorescein lysine
ACSPDAHLGCASYCAXXXXXXX

SEQ ID NO: 148 - protein, 22 aa, synthetic construct
  SITE 16..21: note = MeGly
  SITE 22: note = 6-fluorescein lysine
ACSPDAHLGCIAYCAXXXXXXX

SEQ ID NO: 149 - protein, 22 aa, synthetic construct
  SITE 16..21: note = MeGly
  SITE 22: note = 6-fluorescein lysine
ACSPDAHLGCISACAXXXXXXX

SEQ ID NO: 150 - protein, 13 aa, synthetic construct
  SITE 2: note = 6-azido lysine
CXPDAHLGCISYC

SEQ ID NO: 151 - protein, 13 aa, synthetic construct
  SITE 3: note = 6-azido lysine
CSXDAHLGCISYC

SEQ ID NO: 152 - protein, 13 aa, synthetic construct
  SITE 5: note = 6-azido lysine
CSPDXHLGCISYC

SEQ ID NO: 153-166 - skipped (14 entries)

SEQ ID NO: 167 - DNA, 16 bp, synthetic construct
  source 1..16: mol_type = other DNA
  modified_base 1: mod_base = OTHER; note = cEt adenosine 3'-phosphorothioate
  modified_base 2: mod_base = OTHER; note = cEt 5-methylcytidine 3'-phosphorothioate
  modified_base 3: mod_base = OTHER; note = cEt adenosine 3'-phosphorothioate
  modified_base 4: mod_base = OTHER; note = 2'-deoxyadenosine 3'-phosphorothioate
  modified_base 5: mod_base = OTHER; note = 2'-deoxythymidine 3'-phosphorothioate
  modified_base 6..8: mod_base = OTHER; note = 2'-deoxyadenosine 3'-phosphorothioate
  modified_base 9: mod_base = OTHER; note = 2'-deoxythymidine 3'-phosphorothioate
  modified_base 10: mod_base = OTHER; note = 2'-deoxyadenosine 3'-phosphorothioate
  modified_base 11..12: mod_base = OTHER; note = 2'-deoxy-5-methylcytidine 3'-phosphorothioate
  modified_base 13: mod_base = OTHER; note = 2'-deoxyguanosine 3'-phosphorothioate
  modified_base 14: mod_base = OTHER; note = cEt adenosine 3'-phosphorothioate
  modified_base 15: mod_base = OTHER; note = cEt guanosine 3'-phosphorothioate
  modified_base 16: mod_base = OTHER; note = cEt guanosine
acaataaataccgagg

SEQ ID NO: 168 - DNA, 19 bp, synthetic construct
  source 1..19: mol_type = other DNA
  modified_base <1: mod_base = OTHER; note = 6-(BCN-carbamate)hexyl phosphodiester
  modified_base 1: mod_base = OTHER; note = 2'-deoxythymidine 3'-phosphodiester
  modified_base 2: mod_base = OTHER; note = 2'-deoxy-5-methylcytidine 3'-phosphodiester
  modified_base 3: mod_base = OTHER; note = 2'-deoxyadenosine 3'-phosphodiester
  modified_base 4: mod_base = OTHER; note = cEt adenosine 3'-phosphorothioate
  modified_base 5: mod_base = OTHER; note = cEt 5-methylcytidine 3'-phosphorothioate
  modified_base 6: mod_base = OTHER; note = cEt adenosine 3'-phosphorothioate
  modified_base 7: mod_base = OTHER; note = 2'-deoxyadenosine 3'-phosphorothioate
  modified_base 8: mod_base = OTHER; note = 2'-deoxythymidine 3'-phosphorothioate
  modified_base 9..11: mod_base = OTHER; note = 2'-deoxyadenosine 3'-phosphorothioate
  modified_base 12: mod_base = OTHER; note = 2'-deoxythymidine 3'-phosphorothioate
  modified_base 13: mod_base = OTHER; note = 2'-deoxyadenosine 3'-phosphorothioate
  modified_base 14..15: mod_base = OTHER; note = 2'-deoxy-5-methylcytidine 3'-phosphorothioate
  modified_base 16: mod_base = OTHER; note = 2'-deoxyguanosine 3'-phosphorothioate
  modified_base 17: mod_base = OTHER; note = cEt adenosine 3'-phosphorothioate
  modified_base 18: mod_base = OTHER; note = cEt guanosine 3'-phosphorothioate
  modified_base 19: mod_base = OTHER; note = cEt guanosine
tcaacaataaataccgagg

SEQ ID NO: 169 - DNA, 16 bp, synthetic construct
  source 1..16: mol_type = other DNA
  modified_base <1: mod_base = OTHER; note = 6-(BCN-carbamate)hexyl phosphodiester
  modified_base 1..2: mod_base = OTHER; note = cEt 5-methylcytidine 3'-phosphodiester
  modified_base 3: mod_base = OTHER; note = cEt thymidine 3'-phosphodiester
  modified_base 4: mod_base = OTHER; note = 2'-deoxy-5-methylcytidine 3'-phosphodiester
  modified_base 5..6: mod_base = OTHER; note = 2'-deoxyguanosine 3'-phosphodiester
  modified_base 7: mod_base = OTHER; note = 2'-deoxythymidine 3'-phosphodiester
  modified_base 8: mod_base = OTHER; note = 2'-deoxyadenosine 3'-phosphodiester
  modified_base 9..11: mod_base = OTHER; note = 2'-deoxythymidine 3'-phosphodiester
  modified_base 12: mod_base = OTHER; note = 2'-deoxyadenosine 3'-phosphodiester
  modified_base 13: mod_base = OTHER; note = 2'-deoxythymidine 3'-phosphodiester
  modified_base 14: mod_base = OTHER; note = cEt thymidine 3'-phosphodiester
  modified_base 15: mod_base = OTHER; note = cEt guanosine 3'-phosphodiester
  modified_base 16: mod_base = OTHER; note = cEt thymidine
cctcggtatttattgt

SEQ ID NO: 170 - DNA, 16 bp, synthetic construct
  source 1..16: mol_type = other DNA
  modified_base <1: mod_base = OTHER; note = 4-(5'-Cy3)-cyclohexyl phosphodiester
  modified_base 1: mod_base = OTHER; note = cEt guanosine 3'-phosphorothioate
  modified_base 2: mod_base = OTHER; note = cEt 5-methylcytidine 3'-phosphorothioate
  modified_base 3: mod_base = OTHER; note = cEt adenosine 3'-phosphorothioate
  modified_base 4..5: mod_base = OTHER; note = 2'-deoxythymidine 3'-phosphorothioate
  modified_base 6: mod_base = OTHER; note = 2'-deoxy-5-methylcytidine 3'-phosphorothioate
  modified_base 7: mod_base = OTHER; note = 2'-deoxythymidine 3'-phosphorothioate
  modified_base 8..9: mod_base = OTHER; note = 2'-deoxyadenosine 3'-phosphorothioate
  modified_base 10: mod_base = OTHER; note = 2'-deoxythymidine 3'-phosphorothioate
  modified_base 11: mod_base = OTHER; note = 2'-deoxyadenosine 3'-phosphorothioate
  modified_base 12: mod_base = OTHER; note = 2'-deoxyguanosine 3'-phosphorothioate
  modified_base 13: mod_base = OTHER; note = 2'-deoxy-5-methylcytidine 3'-phosphorothioate
  modified_base 14: mod_base = OTHER; note = cEt adenosine 3'-phosphorothioate
  modified_base 15: mod_base = OTHER; note = cEt guanosine 3'-phosphorothioate
  modified_base 16: mod_base = OTHER; note = cEt 5-methylcytidine
  modified_base >16: mod_base = OTHER; note = 3nC7-BCN
gcattctaatagcagc

SEQ ID NO: 171 - RNA, 23 nt, synthetic construct
  source 1..23: mol_type = other RNA
  modified_base 1: mod_base = OTHER; note = 2'-OMe adenosine 3'-phosphorothioate
  modified_base 2: mod_base = OTHER; note = 2'-fluoro uridine 3'-phosphorothioate
  modified_base 3..5: mod_base = OTHER; note = 2'-OMe adenosine 3'-phosphodiester
  modified_base 6: mod_base = OTHER; note = 2'-fluoro adenosine 3'-phosphodiester
  modified_base 7: mod_base = OTHER; note = 2'-OMe uridine 3'-phosphodiester
  modified_base 8: mod_base = OTHER; note = 2'-OMe cytidine 3'-phosphodiester
  modified_base 9: mod_base = OTHER; note = 2'-OMe uridine 3'-phosphodiester
  modified_base 10: mod_base = OTHER; note = 2'-OMe adenosine 3'-phosphodiester
  modified_base 11: mod_base = OTHER; note = 2'-OMe cytidine 3'-phosphodiester
  modified_base 12: mod_base = OTHER; note = 2'-OMe adenosine 3'-phosphodiester
  modified_base 13: mod_base = OTHER; note = 2'-OMe guanosine 3'-phosphodiester
  modified_base 14: mod_base = OTHER; note = 2'-fluoro uridine 3'-phosphodiester
  modified_base 15: mod_base = OTHER; note = 2'-OMe cytidine 3'-phosphodiester
  modified_base 16: mod_base = OTHER; note = 2'-fluoro adenosine 3'-phosphodiester
  modified_base 17: mod_base = OTHER; note = 2'-OMe uridine 3'-phosphodiester
  modified_base 18: mod_base = OTHER; note = 2'-OMe adenosine 3'-phosphodiester
  modified_base 19..20: mod_base = OTHER; note = 2'-OMe guanosine 3'-phosphodiester
  modified_base 21..22: mod_base = OTHER; note = 2'-OMe adenosine 3'-phosphorothioate
  modified_base 23: mod_base = OTHER; note = 2'-OMe uridine
ataaaatctacagtcataggaat

SEQ ID NO: 172 - RNA, 21 nt, synthetic construct
  source 1..21: mol_type = other RNA
  modified_base 1: mod_base = OTHER; note = 2'-OMe uridine 3'-phosphorothioate
  modified_base 2: mod_base = OTHER; note = 2'-OMe cytidine 3'-phosphorothioate
  modified_base 3: mod_base = OTHER; note = 2'-OMe cytidine 3'-phosphodiester
  modified_base 4: mod_base = OTHER; note = 2'-OMe uridine 3'-phosphodiester
  modified_base 5: mod_base = OTHER; note = 2'-OMe adenosine 3'-phosphodiester
  modified_base 6: mod_base = OTHER; note = 2'-OMe uridine 3'-phosphodiester
  modified_base 7: mod_base = OTHER; note = 2'-fluoro guanosine 3'-phosphodiester
  modified_base 8: mod_base = OTHER; note = 2'-OMe adenosine 3'-phosphodiester
  modified_base 9: mod_base = OTHER; note = 2'-fluoro cytidine 3'-phosphodiester
  modified_base 10: mod_base = OTHER; note = 2'-fluoro uridine 3'-phosphodiester
  modified_base 11: mod_base = OTHER; note = 2'-fluoro guanosine 3'-phosphodiester
  modified_base 12: mod_base = OTHER; note = 2'-OMe uridine 3'-phosphodiester
  modified_base 13: mod_base = OTHER; note = 2'-OMe adenosine 3'-phosphodiester
  modified_base 14: mod_base = OTHER; note = 2'-OMe guanosine 3'-phosphodiester
  modified_base 15: mod_base = OTHER; note = 2'-OMe adenosine 3'-phosphodiester
  modified_base 16..19: mod_base = OTHER; note = 2'-OMe uridine 3'-phosphodiester
  modified_base 20: mod_base = OTHER; note = 2'-OMe adenosine 3'-phosphodiester
  modified_base 21: mod_base = OTHER; note = 2'-OMe uridine
  modified_base >21: mod_base = OTHER; note = 3nC7-(3-maleimidopropanamide)
tcctatgactgtagattttat

SEQ ID NO: 173 - RNA, 21 nt, synthetic construct
  source 1..21: mol_type = other RNA
  modified_base 1: mod_base = OTHER; note = thymine
  modified_base <1: mod_base = OTHER; note = vinyl phosphonate
  modified_base 1: mod_base = OTHER; note = vinyl phosphonate
  modified_base 2: mod_base = OTHER; note = 2'-fluoro adenosine 3'-phosphorothioate
  modified_base 3: mod_base = OTHER; note = 2'-OMe guanosine 3'-phosphodiester
  modified_base 4: mod_base = OTHER; note = 2'-OMe adenosine 3'-phosphodiester
  modified_base 5: mod_base = OTHER; note = 2'-OMe cytidine 3'-phosphodiester
  modified_base 6: mod_base = OTHER; note = 2'-fluoro adenosine 3'-phosphodiester
  modified_base 7: mod_base = OTHER; note = 2'-OMe adenosine 3'-phosphodiester
  modified_base 8: mod_base = OTHER; note = 2'-OMe uridine 3'-phosphodiester
  modified_base 9: mod_base = OTHER; note = 2'-fluoro adenosine 3'-phosphodiester
  modified_base 10..11: mod_base = OTHER; note = 2'-OMe adenosine 3'-phosphodiester
  modified_base 12: mod_base = OTHER; note = 2'-OMe uridine 3'-phosphodiester
  modified_base 13: mod_base = OTHER; note = 2'-OMe adenosine 3'-phosphodiester
  modified_base 14: mod_base = OTHER; note = 2'-fluoro cytidine 3'-phosphodiester
  modified_base 15: mod_base = OTHER; note = 2'-OMe cytidine 3'-phosphodiester
  modified_base 16: mod_base = OTHER; note = 2'-fluoro guanosine 3'-phosphodiester
  modified_base 17: mod_base = OTHER; note = 2'-OMe adenosine 3'-phosphodiester
  modified_base 18: mod_base = OTHER; note = 2'-OMe guanosine 3'-phosphodiester
  modified_base 19: mod_base = OTHER; note = 2'-OMe guanosine 3'-phosphorothioate
  modified_base 20: mod_base = OTHER; note = 2'-OMe adenosine 3'-phosphorothioate
  modified_base 21: mod_base = OTHER; note = 2'-OMe adenosine
tagacaataaataccgaggaa

SEQ ID NO: 174 - RNA, 19 nt, synthetic construct
  source 1..19: mol_type = other RNA
  modified_base 1..2: mod_base = OTHER; note = 2'-OMe cytidine 3'-phosphorothioate
  modified_base 3: mod_base = OTHER; note = 2'-OMe uridine 3'-phosphodiester
  modified_base 4: mod_base = OTHER; note = 2'-OMe cytidine 3'-phosphodiester
  modified_base 5: mod_base = OTHER; note = 2'-fluoro guanosine 3'-phosphodiester
  modified_base 6: mod_base = OTHER; note = 2'-OMe guanosine 3'-phosphodiester
  modified_base 7: mod_base = OTHER; note = 2'-fluoro uridine 3'-phosphodiester
  modified_base 8: mod_base = OTHER; note = 2'-fluoro adenosine 3'-phosphodiester
  modified_base 9: mod_base = OTHER; note = 2'-fluoro uridine 3'-phosphodiester
  modified_base 10..11: mod_base = OTHER; note = 2'-OMe uridine 3'-phosphodiester
  modified_base 12: mod_base = OTHER; note = 2'-OMe adenosine 3'-phosphodiester
  modified_base 13..14: mod_base = OTHER; note = 2'-OMe uridine 3'-phosphodiester
  modified_base 15: mod_base = OTHER; note = 2'-OMe guanosine 3'-phosphodiester
  modified_base 16: mod_base = OTHER; note = 2'-OMe uridine 3'-phosphodiester
  modified_base 17: mod_base = OTHER; note = 2'-OMe uridine 3'-phosphodiester
  modified_base 19: mod_base = OTHER; note = 2'-OMe adenosine
  modified_base >19: mod_base = OTHER; note = 3nC7-BCN
cctcggtatttattgtcta

SEQ ID NO: 175 - DNA, 16 bp, synthetic construct
  source 1..16: mol_type = other DNA
  modified_base <1: mod_base = OTHER; note = 6-(3-maleimido propionamido)hexyl phosphodiester
  modified_base 1: mod_base = OTHER; note = cEt adenosine 3'-phosphorothioate
  modified_base 2: mod_base = OTHER; note = cEt 5-methylcytidine 3'-phosphorothioate
  modified_base 3: mod_base = OTHER; note = cEt adenosine 3'-phosphorothioate
  modified_base 4: mod_base = OTHER; note = 2'-deoxyadenosine 3'-phosphorothioate
  modified_base 5: mod_base = OTHER; note = 2'-deoxythymidine 3'-phosphorothioate
  modified_base 6..8: mod_base = OTHER; note = 2'-deoxyadenosine 3'-phosphorothioate
  modified_base 9: mod_base = OTHER; note = 2'-deoxythymidine 3'-phosphorothioate
  modified_base 10: mod_base = OTHER; note = 2'-deoxyadenosine 3'-phosphorothioate
  modified_base 11..12: mod_base = OTHER; note = 2'-deoxy-5-methylcytidine 3'-phosphorothioate
  modified_base 13: mod_base = OTHER; note = 2'-deoxyguanosine 3'-phosphorothioate
  modified_base 14: mod_base = OTHER; note = cEt adenosine 3'-phosphorothioate
  modified_base 15: mod_base = OTHER; note = cEt guanosine 3'-phosphorothioate
  modified_base 16: mod_base = OTHER; note = cEt guanosine
acaataaataccgagg

SEQ ID NO: 176 - DNA, 16 bp, synthetic construct
  source 1..16: mol_type = other DNA
  modified_base <1: mod_base = OTHER; note = 6-(BCN-carbamate)hexyl phosphodiester
  modified_base 1: mod_base = OTHER; note = cEt adenosine 3'-phosphorothioate
  modified_base 2: mod_base = OTHER; note = cEt 5-methylcytidine 3'-phosphorothioate
  modified_base 3: mod_base = OTHER; note = cEt adenosine 3'-phosphorothioate
  modified_base 4: mod_base = OTHER; note = 2'-deoxyadenosine 3'-phosphorothioate
  modified_base 5: mod_base = OTHER; note = 2'-deoxythymidine 3'-phosphorothioate
  modified_base 6..8: mod_base = OTHER; note = 2'-deoxyadenosine 3'-phosphorothioate
  modified_base 9: mod_base = OTHER; note = 2'-deoxythymidine 3'-phosphorothioate
  modified_base 10: mod_base = OTHER; note = 2'-deoxyadenosine 3'-phosphorothioate
  modified_base 11..12: mod_base = OTHER; note = 2'-deoxy-5-methylcytidine 3'-phosphorothioate
  modified_base 13: mod_base = OTHER; note = 2'-deoxyguanosine 3'-phosphorothioate
  modified_base 14: mod_base = OTHER; note = cEt adenosine 3'-phosphorothioate
  modified_base 15: mod_base = OTHER; note = cEt guanosine 3'-phosphorothioate
  modified_base 16: mod_base = OTHER; note = cEt guanosine
acaataaataccgagg

SEQ ID NO: 177 - DNA, 16 bp, synthetic construct
  source 1..16: mol_type = other DNA
  modified_base <1: mod_base = OTHER; note = 4-(5'-Cy3)-cyclohexyl phosphodiester
  modified_base 1: mod_base = OTHER; note = 2'-MOE guanosine 3'-phosphorothioate
  modified_base 2: mod_base = OTHER; note = cEt 5-methylcytidine 3'-phosphorothioate
  modified_base 3: mod_base = OTHER; note = 2'-MOE adenosine 3'-phosphodiester
  modified_base 4..5: mod_base = OTHER; note = 2'-MOE thymidine 3'-phosphodiester
  modified_base 6: mod_base = OTHER; note = 2'-MOE 5-methylcytidine 3'-phosphodiester
  modified_base 7: mod_base = OTHER; note = 2'-MOE thymidine 3'-phosphodiester
  modified_base 8..9: mod_base = OTHER; note = 2'-MOE adenosine 3'-phosphodiester
  modified_base 10: mod_base = OTHER; note = 2'-MOE thymidine 3'-phosphodiester
  modified_base 11: mod_base = OTHER; note = 2'-MOE adenosine 3'-phosphodiester
  modified_base 12: mod_base = OTHER; note = 2'-MOE guanosine 3'-phosphodiester
  modified_base 13: mod_base = OTHER; note = 2'-MOE 5-methylcytidine 3'-phosphodiester
  modified_base 14: mod_base = OTHER; note = 2'-MOE adenosine 3'-phosphodiester
  modified_base 15: mod_base = OTHER; note = 2'-MOE guanosine 3'-phosphodiester
  modified_base 16: mod_base = OTHER; note = 2'-MOE 5-methylcytidine
  modified_base >16: mod_base = OTHER; note = 3nC7-BCN
gcattctaatagcagc

SEQ ID NO: 178 - DNA, 16 bp, synthetic construct
  source 1..16: mol_type = other DNA
  modified_base <1: mod_base = OTHER; note = 6-(propargyl propanamido)hexyl phosphodiester
  modified_base 1: mod_base = OTHER; note = cEt adenosine 3'-phosphorothioate
  modified_base 2: mod_base = OTHER; note = cEt 5-methylcytidine 3'-phosphorothioate
  modified_base 3: mod_base = OTHER; note = cEt adenosine 3'-phosphorothioate
  modified_base 4: mod_base = OTHER; note = 2'-deoxyadenosine 3'-phosphorothioate
  modified_base 5: mod_base = OTHER; note = 2'-deoxythymidine 3'-phosphorothioate
  modified_base 6..8: mod_base = OTHER; note = 2'-deoxyadenosine 3'-phosphorothioate
  modified_base 9: mod_base = OTHER; note = 2'-deoxythymidine 3'-phosphorothioate
  modified_base 10: mod_base = OTHER; note = 2'-deoxyadenosine 3'-phosphorothioate
  modified_base 11..12: mod_base = OTHER; note = 2'-deoxy-5-methylcytidine 3'-phosphorothioate
  modified_base 13: mod_base = OTHER; note = 2'-deoxyguanosine 3'-phosphorothioate
  modified_base 14: mod_base = OTHER; note = cEt adenosine 3'-phosphorothioate
  modified_base 15: mod_base = OTHER; note = cEt guanosine 3'-phosphorothioate
  modified_base 16: mod_base = OTHER; note = cEt guanosine
acaataaataccgagg

SEQ ID NO: 179 - DNA, 16 bp, synthetic construct
  source 1..16: mol_type = other DNA
  modified_base <1: mod_base = OTHER; note = 6-mercaptohexyl phosphodiester
  modified_base 1: mod_base = OTHER; note = cEt adenosine 3'-phosphorothioate
  modified_base 2: mod_base = OTHER; note = cEt 5-methylcytidine 3'-phosphorothioate
  modified_base 3: mod_base = OTHER; note = cEt adenosine 3'-phosphorothioate
  modified_base 4: mod_base = OTHER; note = 2'-deoxyadenosine 3'-phosphorothioate
  modified_base 5: mod_base = OTHER; note = 2'-deoxythymidine 3'-phosphorothioate
  modified_base 6..8: mod_base = OTHER; note = 2'-deoxyadenosine 3'-phosphorothioate
  modified_base 9: mod_base = OTHER; note = 2'-deoxythymidine 3'-phosphorothioate
  modified_base 10: mod_base = OTHER; note = 2'-deoxyadenosine 3'-phosphorothioate
  modified_base 11..12: mod_base = OTHER; note = 2'-deoxy-5-methylcytidine 3'-phosphorothioate
  modified_base 13: mod_base = OTHER; note = 2'-deoxyguanosine 3'-phosphorothioate
  modified_base 14: mod_base = OTHER; note = cEt adenosine 3'-phosphorothioate
  modified_base 15: mod_base = OTHER; note = cEt guanosine 3'-phosphorothioate
  modified_base 16: mod_base = OTHER; note = cEt guanosine
acaataaataccgagg

SEQ ID NO: 180 - RNA, 19 nt, synthetic construct
  source 1..19: mol_type = other RNA
  modified_base 1..2: mod_base = OTHER; note = 2'-OMe cytidine 3'-phosphorothioate
  modified_base 3: mod_base = OTHER; note = 2'-OMe uridine 3'-phosphodiester
  modified_base 4: mod_base = OTHER; note = 2'-OMe cytidine 3'-phosphodiester
  modified_base 5: mod_base = OTHER; note = 2'-fluoro guanosine 3'-phosphodiester
  modified_base 6: mod_base = OTHER; note = 2'-OMe guanosine 3'-phosphodiester
  modified_base 7: mod_base = OTHER; note = 2'-fluoro uridine 3'-phosphodiester
  modified_base 8: mod_base = OTHER; note = 2'-fluoro adenosine 3'-phosphodiester
  modified_base 9: mod_base = OTHER; note = 2'-fluoro uridine 3'-phosphodiester
  modified_base 10..11: mod_base = OTHER; note = 2'-OMe uridine 3'-phosphodiester
  modified_base 12: mod_base = OTHER; note = 2'-OMe adenosine 3'-phosphodiester
  modified_base 13..14: mod_base = OTHER; note = 2'-OMe uridine 3'-phosphodiester
  modified_base 15: mod_base = OTHER; note = 2'-OMe guanosine 3'-phosphodiester
  modified_base 16: mod_base = OTHER; note = 2'-OMe uridine 3'-phosphodiester
  modified_base 17: mod_base = OTHER; note = 2'-OMe uridine 3'-phosphodiester
  modified_base 18: mod_base = OTHER; note = 2'-OMe uridine 3'-phosphodiester
  modified_base 19: mod_base = OTHER; note = 2'-OMe adenosine
  modified_base >19: mod_base = OTHER; note = 3nC7-(3-maleimidopropanamide)
cctcggtatttattgtcta

SEQ ID NO: 181 - RNA, 21 nt, synthetic construct
  source 1..21: mol_type = other RNA
  modified_base 1: mod_base = OTHER; note = 2'-OMe uridine 3'-phosphorothioate
  modified_base 2: mod_base = OTHER; note = 2'-OMe cytidine 3'-phosphorothioate
  modified_base 3: mod_base = OTHER; note = 2'-OMe cytidine 3'-phosphodiester
  modified_base 4: mod_base = OTHER; note = 2'-OMe uridine 3'-phosphodiester
  modified_base 5: mod_base = OTHER; note = 2'-OMe adenosine 3'-phosphodiester
  modified_base 6: mod_base = OTHER; note = 2'-OMe uridine 3'-phosphodiester
  modified_base 7: mod_base = OTHER; note = 2'-fluoro guanosine 3'-phosphodiester
  modified_base 8: mod_base = OTHER; note = 2'-OMe adenosine 3'-phosphodiester
  modified_base 9: mod_base = OTHER; note = 2'-fluoro cytidine 3'-phosphodiester
  modified_base 10: mod_base = OTHER; note = 2'-fluoro uridine 3'-phosphodiester
  modified_base 11: mod_base = OTHER; note = 2'-fluoro guanosine 3'-phosphodiester
  modified_base 12: mod_base = OTHER; note = 2'-OMe uridine 3'-phosphodiester
  modified_base 13: mod_base = OTHER; note = 2'-OMe adenosine 3'-phosphodiester
  modified_base 14: mod_base = OTHER; note = 2'-OMe guanosine 3'-phosphodiester
  modified_base 15: mod_base = OTHER; note = 2'-OMe adenosine 3'-phosphodiester
  modified_base 16..19: mod_base = OTHER; note = 2'-OMe uridine 3'-phosphodiester
  modified_base 20: mod_base = OTHER; note = 2'-OMe adenosine 3'-phosphodiester
  modified_base 21: mod_base = OTHER; note = 2'-OMe uridine
  modified_base >21: mod_base = OTHER; note = 3nC7-BCN
tcctatgactgtagattttat

SEQ ID NO: 182 - DNA, 10 bp, synthetic construct
  source 1..10: mol_type = other DNA
  modified_base <1: mod_base = OTHER; note = 6-(BCN-carbamate)hexyl phosphodiester
  modified_base 1: mod_base = OTHER; note = cEt 5-methyl cytidine 3'-phosphorothioate
  modified_base 2: mod_base = OTHER; note = cEt guanosine 3'-phosphorothioate
  modified_base 3: mod_base = OTHER; note = cEt guanosine 3'-phosphodiester
  modified_base 4: mod_base = OTHER; note = cEt thymidine 3'-phosphodiester
  modified_base 5: mod_base = OTHER; note = cEt adenosine 3'-phosphodiester
  modified_base 6..7: mod_base = OTHER; note = cEt thymidine 3'-phosphodiester
  modified_base 8: mod_base = OTHER; note = cEt thymidine 3'-phosphorothioate
  modified_base 9: mod_base = OTHER; note = cEt adenosine 3'-phosphorothioate
  modified_base 10: mod_base = OTHER; note = cEt thymidine
cggtatttat

SEQ ID NO: 183 - DNA, 12 bp, synthetic construct
  source 1..12: mol_type = other DNA
  modified_base 5: mod_base = OTHER; note = uracil
  modified_base 7..9: mod_base = OTHER; note = uracil
  modified_base <1: mod_base = OTHER; note = 6-(BCN-carbamate)hexyl phosphodiester
  modified_base 1: mod_base = OTHER; note = cEt thymidine 3'-phosphorothioate
  modified_base 2: mod_base = OTHER; note = cEt 5-methyl cytidine 3'-phosphorothioate
  modified_base 3..4: mod_base = OTHER; note = 2'-OMe guanosine 3'-phosphodiester
  modified_base 5: mod_base = OTHER; note = 2'-OMe uridine 3'-phosphodiester
  modified_base 6: mod_base = OTHER; note = 2'-OMe adenosine 3'-phosphodiester
  modified_base 7..9: mod_base = OTHER; note = 2'-OMe uridine 3'-phosphodiester
  modified_base 10: mod_base = OTHER; note = 2'-OMe adenosine 3'-phosphorothioate
  modified_base 11: mod_base = OTHER; note = cEt thymidine 3'-phosphorothioate
  modified_base 12: mod_base = OTHER; note = cEt thymidine
tcggtatttatt

SEQ ID NO: 184 - DNA, 16 bp, synthetic construct
  source 1..16: mol_type = other DNA
  modified_base <1: mod_base = OTHER; note = 6-(BCN-carbamate)hexyl phosphodiester
  modified_base 1: mod_base = OTHER; note = cEt adenosine 3'-phosphorothioate
  modified_base 2: mod_base = OTHER; note = cEt guanosine 3'-phosphorothioate
  modified_base 3: mod_base = OTHER; note = cEt thymidine 3'-phosphorothioate
  modified_base 4: mod_base = OTHER; note = 2'-deoxyadenosine 3'-phosphorothioate
  modified_base 5: mod_base = OTHER; note = 5-methyl 2'-deoxycytidine 3'-phosphorothioate
  modified_base 6: mod_base = OTHER; note = 2'-deoxythymidine 3'-phosphorothioate
  modified_base 7: mod_base = OTHER; note = 2'-deoxyadenosine 3'-phosphorothioate
  modified_base 8: mod_base = OTHER; note = 2'-deoxythymidine 3'-phosphorothioate
  modified_base 9: mod_base = OTHER; note = 2'-deoxyadenosine 3'-phosphorothioate
  modified_base 10: mod_base = OTHER; note = 2'-deoxyguanosine 3'-phosphorothioate
  modified_base 11: mod_base = OTHER; note = 5-methyl 2'-deoxycytidine 3'-phosphorothioate
  modified_base 12: mod_base = OTHER; note = 2'-deoxyadenosine 3'-phosphorothioate
  modified_base 13: mod_base = OTHER; note = 2'-deoxythymidine 3'-phosphorothioate
  modified_base 14: mod_base = OTHER; note = cEt 5-methyl cytidine 3'-phosphorothioate
  modified_base 15: mod_base = OTHER; note = cEt thymidine 3'-phosphorothioate
  modified_base 16: mod_base = OTHER; note = cEt guanosine
agtactatagcatctg

SEQ ID NO: 185 - RNA, 16 nt, synthetic construct
  source 1..16: mol_type = other RNA
  modified_base <1: mod_base = OTHER; note = 6-(BCN-carbamate)hexyl phosphodiester
  modified_base 1..2: mod_base = OTHER; note = 2'-OMe cytidine 3'-phosphorothioate
  modified_base 3: mod_base = OTHER; note = 2'-OMe uridine 3'-phosphodiester
  modified_base 4: mod_base = OTHER; note = 2'-OMe cytidine 3'-phosphodiester
  modified_base 5..6: mod_base = OTHER; note = 2'-OMe guanosine 3'-phosphodiester
  modified_base 7: mod_base = OTHER; note = 2'-OMe uridine 3'-phosphodiester
  modified_base 8: mod_base = OTHER; note = 2'-OMe adenosine 3'-phosphodiester
  modified_base 9..11: mod_base = OTHER; note = 2'-OMe uridine 3'-phosphodiester
  modified_base 12: mod_base = OTHER; note = 2'-OMe adenosine 3'-phosphodiester
  modified_base 13: mod_base = OTHER; note = 2'-OMe uridine 3'-phosphodiester
  modified_base 14: mod_base = OTHER; note = 2'-OMe uridine 3'-phosphorothioate
  modified_base 15: mod_base = OTHER; note = 2'-OMe guanosine 3'-phosphorothioate
  modified_base 16: mod_base = OTHER; note = 2'-OMe uridine
cctcggtatttattgt

SEQ ID NO: 186 - DNA, 16 bp, synthetic construct
  source 1..16: mol_type = other DNA
  modified_base <1: mod_base = OTHER; note = 6-(BCN-carbamate)hexyl phosphodiester
  modified_base 1: mod_base = OTHER; note = cEt adenosine 3'-phosphorothioate
  modified_base 2: mod_base = OTHER; note = cEt 5-methyl cytidine 3'-phosphodiester
  modified_base 3: mod_base = OTHER; note = cEt adenosine 3'-phosphodiester
  modified_base 4: mod_base = OTHER; note = 2'-deoxyadenosine 3'-phosphorothioate
  modified_base 5: mod_base = OTHER; note = 2'-deoxythymidine 3'-phosphorothioate
  modified_base 6..8: mod_base = OTHER; note = 2'-deoxyadenosine 3'-phosphorothioate
  modified_base 9: mod_base = OTHER; note = 2'-deoxythymidine 3'-phosphorothioate
  modified_base 10: mod_base = OTHER; note = 2'-deoxyadenosine 3'-phosphorothioate
  modified_base 11..12: mod_base = OTHER; note = 5-methyl 2'-deoxycytidine 3'-phosphorothioate
  modified_base 13: mod_base = OTHER; note = 2'-deoxyguanosine 3'-phosphorothioate
  modified_base 14: mod_base = OTHER; note = cEt adenosine 3'-phosphodiester
  modified_base 15: mod_base = OTHER; note = cEt guanosine 3'-phosphorothioate
  modified_base 16: mod_base = OTHER; note = cEt guanosine
acaataaataccgagg

SEQ ID NO: 187 - DNA, 16 bp, synthetic construct
  source 1..16: mol_type = other DNA
  modified_base <1: mod_base = OTHER; note = 6-(BCN-carbamate)hexyl phosphodiester
  modified_base 1: mod_base = OTHER; note = cEt adenosine 3'-phosphorothioate
  modified_base 2: mod_base = OTHER; note = cEt 5-methyl cytidine 3'-phosphodiester
  modified_base 3: mod_base = OTHER; note = cEt adenosine 3'-phosphodiester
  modified_base 4: mod_base = OTHER; note = 2'-deoxyadenosine 3'-mesyl phosphoramidate
  modified_base 5: mod_base = OTHER; note = 2'-deoxythymidine 3'-mesyl phosphoramidate
  modified_base 6..7: mod_base = OTHER; note = 2'-deoxyadenosine 3'-mesyl phosphoramidate
  modified_base 8: mod_base = OTHER; note = 2'-deoxyadenosine 3'-phosphorothioate
  modified_base 9: mod_base = OTHER; note = 2'-deoxythymidine 3'-phosphorothioate
  modified_base 10: mod_base = OTHER; note = 2'-deoxyadenosine 3'-phosphorothioate
  modified_base 11..12: mod_base = OTHER; note = 5-methyl 2'-deoxycytidine 3'-phosphorothioate
  modified_base 13: mod_base = OTHER; note = 2'-deoxyguanosine 3'-phosphorothioate
  modified_base 14: mod_base = OTHER; note = cEt adenosine 3'-phosphorothioate
  modified_base 15: mod_base = OTHER; note = cEt guanosine 3'-phosphorothioate
  modified_base 16: mod_base = OTHER; note = cEt guanosine
acaataaataccgagg

SEQ ID NO: 188 - DNA, 16 bp, synthetic construct
  source 1..16: mol_type = other DNA
  modified_base <1: mod_base = OTHER; note = 6-(BCN-carbamate)hexyl phosphodiester
  modified_base 1: mod_base = OTHER; note = cEt adenosine 3'-phosphorothioate
  modified_base 2: mod_base = OTHER; note = cEt 5-methyl cytidine 3'-phosphodiester
  modified_base 3: mod_base = OTHER; note = cEt adenosine 3'-phosphodiester
  modified_base 4: mod_base = OTHER; note = 2'-deoxyadenosine 3'-mesyl phosphoramidate
  modified_base 5: mod_base = OTHER; note = 2'-deoxythymidine 3'-mesyl phosphoramidate
  modified_base 6..7: mod_base = OTHER; note = 2'-deoxyadenosine 3'-mesyl phosphoramidate
  modified_base 8: mod_base = OTHER; note = 2'-deoxyadenosine 3'-phosphorothioate
  modified_base 9: mod_base = OTHER; note = 2'-deoxythymidine 3'-phosphorothioate
  modified_base 10: mod_base = OTHER; note = 2'-deoxyadenosine 3'-phosphorothioate
  modified_base 11..12: mod_base = OTHER; note = 5-methyl 2'-deoxycytidine 3'-phosphorothioate
  modified_base 13: mod_base = OTHER; note = 2'-deoxyguanosine 3'-phosphorothioate
  modified_base 14: mod_base = OTHER; note = cEt adenosine 3'-phosphodiester
  modified_base 15: mod_base = OTHER; note = cEt guanosine 3'-phosphorothioate
  modified_base 16: mod_base = OTHER; note = cEt guanosine
acaataaataccgagg

SEQ ID NO: 189 - RNA, 19 nt, synthetic construct
  source 1..19: mol_type = other RNA
  modified_base <1: mod_base = OTHER; note = 6-(BCN-carbamate)hexyl phosphodiester
  modified_base 1..2: mod_base = OTHER; note = 2'-OMe cytidine 3'-phosphorothioate
  modified_base 3: mod_base = OTHER; note = 2'-OMe uridine 3'-phosphodiester
  modified_base 4: mod_base = OTHER; note = 2'-OMe cytidine 3'-phosphodiester
  modified_base 5: mod_base = OTHER; note = 2'-fluoro guanosine 3'-phosphodiester
  modified_base 6: mod_base = OTHER; note = 2'-OMe guanosine 3'-phosphodiester
  modified_base 7: mod_base = OTHER; note = 2'-fluoro uridine 3'-phosphodiester
  modified_base 8: mod_base = OTHER; note = 2'-fluoro adenosine 3'-phosphodiester
  modified_base 9: mod_base = OTHER; note = 2'-fluoro uridine 3'-phosphodiester
  modified_base 10..11: mod_base = OTHER; note = 2'-OMe uridine 3'-phosphodiester
  modified_base 12: mod_base = OTHER; note = 2'-OMe adenosine 3'-phosphodiester
  modified_base 13..14: mod_base = OTHER; note = 2'-OMe uridine 3'-phosphodiester
  modified_base 15: mod_base = OTHER; note = 2'-OMe guanosine 3'-phosphodiester
  modified_base 16: mod_base = OTHER; note = 2'-OMe uridine 3'-phosphodiester
  modified_base 17: mod_base = OTHER; note = 2'-OMe cytidine 3'-phosphorothioate
  modified_base 18: mod_base = OTHER; note = 2'-OMe uridine 3'-phosphorothioate
  modified_base 19: mod_base = OTHER; note = 2'-OMe adenosine
cctcggtatttattgtcta

SEQ ID NO: 190 - RNA, 21 nt, synthetic construct
  source 1..21: mol_type = other RNA
  modified_base 1: mod_base = OTHER; note = 2'-OMe uridine 3'-phosphorothioate
  modified_base 2: mod_base = OTHER; note = 2'-OMe cytidine 3'-phosphorothioate
  modified_base 3: mod_base = OTHER; note = 2'-OMe cytidine 3'-phosphodiester
  modified_base 4: mod_base = OTHER; note = 2'-OMe uridine 3'-phosphodiester
  modified_base 5: mod_base = OTHER; note = 2'-OMe adenosine 3'-phosphodiester
  modified_base 6: mod_base = OTHER; note = 2'-OMe uridine 3'-phosphodiester
  modified_base 7: mod_base = OTHER; note = 2'-fluoro guanosine 3'-phosphodiester
  modified_base 8: mod_base = OTHER; note = 2'-OMe adenosine 3'-phosphodiester
  modified_base 9: mod_base = OTHER; note = 2'-fluoro cytidine 3'-phosphodiester
  modified_base 10: mod_base = OTHER; note = 2'-fluoro uridine 3'-phosphodiester
  modified_base 11: mod_base = OTHER; note = 2'-fluoro guanosine 3'-phosphodiester
  modified_base 12: mod_base = OTHER; note = 2'-OMe uridine 3'-phosphodiester
  modified_base 13: mod_base = OTHER; note = 2'-OMe adenosine 3'-phosphodiester
  modified_base 14: mod_base = OTHER; note = 2'-OMe guanosine 3'-phosphodiester
  modified_base 15: mod_base = OTHER; note = 2'-OMe adenosine 3'-phosphodiester
  modified_base 16..19: mod_base = OTHER; note = 2'-OMe uridine 3'-phosphodiester
  modified_base 20: mod_base = OTHER; note = 2'-OMe adenosine 3'-phosphodiester
  modified_base 21: mod_base = OTHER; note = 2'-OMe adenosine phosphodiester
  modified_base >21: mod_base = OTHER; note = 3nC7-BCN carbamate
tcctatgactgtagattttaa

SEQ ID NO: 191 - RNA, 23 nt, synthetic construct
  source 1..23: mol_type = other RNA
  modified_base 1: mod_base = OTHER; note = thymine
  modified_base <1: mod_base = OTHER; note = vinyl phosphonate
  modified_base 1: mod_base = OTHER; note = 2'-MOE thymidine 3'-phosphorothioate
  modified_base 2: mod_base = OTHER; note = 2'-fluoro uridine 3'-phosphorothioate
  modified_base 3..5: mod_base = OTHER; note = 2'-OMe adenosine 3'-phosphodiester
  modified_base 6: mod_base = OTHER; note = 2'-fluoro adenosine 3'-phosphodiester
  modified_base 7: mod_base = OTHER; note = 2'-OMe uridine 3'-phosphodiester
  modified_base 8: mod_base = OTHER; note = 2'-OMe cytidine 3'-phosphodiester
  modified_base 9: mod_base = OTHER; note = 2'-OMe uridine 3'-phosphodiester
  modified_base 10: mod_base = OTHER; note = 2'-OMe adenosine 3'-phosphodiester
  modified_base 11: mod_base = OTHER; note = 2'-OMe cytidine 3'-phosphodiester
  modified_base 12: mod_base = OTHER; note = 2'-OMe adenosine 3'-phosphodiester
  modified_base 13: mod_base = OTHER; note = 2'-OMe guanosine 3'-phosphodiester
  modified_base 14: mod_base = OTHER; note = 2'-fluoro uridine 3'-phosphodiester
  modified_base 15: mod_base = OTHER; note = 2'-OMe cytidine 3'-phosphodiester
  modified_base 16: mod_base = OTHER; note = 2'-fluoro adenosine 3'-phosphodiester
  modified_base 17: mod_base = OTHER; note = 2'-OMe uridine 3'-phosphodiester
  modified_base 18: mod_base = OTHER; note = 2'-OMe adenosine 3'-phosphodiester
  modified_base 19..20: mod_base = OTHER; note = 2'-OMe guanosine 3'-phosphodiester
  modified_base 21..22: mod_base = OTHER; note = 2'-OMe adenosine 3'-phosphorothioate
  modified_base 23: mod_base = OTHER; note = 2'-OMe uridine
ttaaaatctacagtcataggaat

SEQ ID NO: 192 - protein, 22 aa, synthetic construct
  SITE 16..21: note = MeGly
  SITE 22: note = 6-fluorescein lysine
ACSPDAHLGCISYCAXXXXXXX

SEQ ID NO: 193 - protein, 16 aa, synthetic construct
  SITE 6: note = 4Hyp
  SITE 13: note = t-butyl glycine
NWNCPXDAYLGCXSYC

SEQ ID NO: 194 - protein, 33 aa, synthetic construct
  SITE 17: note = bivalent linker
CSPDAHLGCISYCEPWXCSPDAHLGCISYCEPW

SEQ ID NO: 195 - protein, 16 aa, synthetic construct
  SITE 2..3: note = 4Hyp
  SITE 10: note = t-butyl glycine
CXXDAYLGCXSYCEPW

SEQ ID NO: 196 - protein, 16 aa, synthetic construct
  SITE 2: note = oxazolidine-4-carboxylic acid
  SITE 3: note = 4Hyp
  SITE 10: note = t-butyl glycine
CXXDAYLGCXSYCEPW

SEQ ID NO: 197 - protein, 16 aa, synthetic construct
  SITE 3: note = oxazolidine-4-carboxylic acid
  SITE 10: note = t-butyl glycine
CXXDAYLGCXSYCEPW

SEQ ID NO: 198 - protein, 16 aa, synthetic construct
  SITE 3: note = oxazolidine-4-carboxylic acid
  SITE 10: note = t-butyl glycine
CPXDAYLGCXSYCEPW

SEQ ID NO: 199 - protein, 16 aa, synthetic construct
  SITE 3: note = cis-L-4-hydroxyproline
  SITE 10: note = t-butyl glycine
CPXDAYLGCXSYCEPW

SEQ ID NO: 200 - protein, 16 aa, synthetic construct
  SITE 3: note = 4Hyp
  SITE 6: note = 3,4-dihydroxy-phenylalanine
  SITE 10: note = t-butyl glycine
CPXDAXLGCXSYCEPW

SEQ ID NO: 201 - protein, 16 aa, synthetic construct
  SITE 3: note = 4Hyp
  SITE 6: note = L-4-carbamoylphenylalanine
  SITE 10: note = t-butyl glycine
CPXDAXLGCXSYCEPW

SEQ ID NO: 202 - protein, 16 aa, synthetic construct
  SITE 3: note = 4Hyp
  SITE 6: note = 4-carboxy-L-phenylalanine
  SITE 10: note = t-butyl glycine
CPXDAXLGCXSYCEPW

SEQ ID NO: 203 - protein, 16 aa, synthetic construct
  SITE 3: note = 4Hyp
  SITE 6: note = homo-tyrosine
  SITE 10: note = t-butyl glycine
CPXDAXLGCXSYCEPW

SEQ ID NO: 204 - protein, 16 aa, synthetic construct
  SITE 3: note = 4Hyp
  SITE 8: note = D-Serine
  SITE 10: note = t-butyl glycine
CPXDAYLXCXSYCEPW

SEQ ID NO: 205 - protein, 16 aa, synthetic construct
  SITE 3: note = 4Hyp
  SITE 8: note = D-Threonine
  SITE 10: note = t-butyl glycine
CPXDAYLXCXSYCEPW

SEQ ID NO: 206 - protein, 16 aa, synthetic construct
  SITE 3: note = 4Hyp
  SITE 8: note = D-Aspartic Acid
  SITE 10: note = t-butyl glycine
CPXDAYLXCXSYCEPW

SEQ ID NO: 207 - protein, 16 aa, synthetic construct
  SITE 3: note = 4Hyp
  SITE 8: note = D-glutamic acid
  SITE 10: note = t-butyl glycine
CPXDAYLXCXSYCEPW

SEQ ID NO: 208 - protein, 16 aa, synthetic construct
  SITE 3: note = 4Hyp
  SITE 8: note = D-asparagine
  SITE 10: note = t-butyl glycine
CPXDAYLXCXSYCEPW

SEQ ID NO: 209 - protein, 16 aa, synthetic construct
  SITE 3: note = 4Hyp
  SITE 8: note = D-Glutamine
  SITE 10: note = t-butyl glycine
CPXDAYLXCXSYCEPW

SEQ ID NO: 210 - protein, 16 aa, synthetic construct
  SITE 3: note = 4Hyp
  SITE 8: note = D-Tyrosine
  SITE 10: note = t-butyl glycine
CPXDAYLXCXSYCEPW

SEQ ID NO: 211 - protein, 16 aa, synthetic construct
  SITE 3: note = 4Hyp
  SITE 10: note = t-butyl glycine
CPXDAYLSCXSYCEPW

SEQ ID NO: 212 - protein, 16 aa, synthetic construct
  SITE 3: note = 4Hyp
  SITE 10: note = t-butyl glycine
CPXDAYLDCXSYCEPW

SEQ ID NO: 213 - protein, 16 aa, synthetic construct
  SITE 3: note = 4Hyp
  SITE 10: note = t-butyl glycine
CPXDAYLYCXSYCEPW

SEQ ID NO: 214 - protein, 16 aa, synthetic construct
  SITE 3: note = 4Hyp
  SITE 10: note = t-butyl glycine
CPXDAYLNCXSYCEPW

SEQ ID NO: 215 - protein, 16 aa, synthetic construct
  SITE 3: note = 4Hyp
  SITE 10: note = t-butyl glycine
  SITE 12: note = 3,4-dihydroxy-phenylalanine
CPXDAYLGCXSXCEPW

SEQ ID NO: 216 - protein, 16 aa, synthetic construct
  SITE 3: note = 4Hyp
  SITE 10: note = t-butyl glycine
  SITE 12: note = L-4-carbamoylphenylalanine
CPXDAYLGCXSXCEPW

SEQ ID NO: 217 - protein, 16 aa, synthetic construct
  SITE 3: note = 4Hyp
  SITE 10: note = t-butyl glycine
  SITE 12: note = 4-carboxy-L-phenylalanine
CPXDAYLGCXSXCEPW

SEQ ID NO: 218 - protein, 16 aa, synthetic construct
  SITE 3: note = 4Hyp
  SITE 10: note = t-butyl glycine
  SITE 12: note = homo-tyrosine
CPXDAYLGCXSXCEPW

SEQ ID NO: 219 - protein, 16 aa, synthetic construct
  SITE 3: note = 4Hyp
  SITE 10: note = t-butyl glycine
  SITE 15: note = 4Hyp
CPXDAYLGCXSYCEXW

SEQ ID NO: 220 - protein, 16 aa, synthetic construct
  SITE 3: note = 4Hyp
  SITE 10: note = t-butyl glycine
  SITE 15: note = oxazolidine-4-carboxylic acid
CPXDAYLGCXSYCEXW

SEQ ID NO: 221 - protein, 16 aa, synthetic construct
  SITE 3: note = 4Hyp
  SITE 10: note = t-butyl glycine
  SITE 15: note = cis-L-4-hydroxyproline
CPXDAYLGCXSYCEXW

SEQ ID NO: 222 - protein, 16 aa, synthetic construct
  SITE 3: note = 4Hyp
  SITE 10: note = t-butyl glycine
CPXDAYLGCXSYCEPY

SEQ ID NO: 223 - protein, 16 aa, synthetic construct
  SITE 3: note = 4Hyp
  SITE 10: note = t-butyl glycine
  SITE 16: note = 3,4-dihydroxy-phenylalanine
CPXDAYLGCXSYCEPX

SEQ ID NO: 224 - protein, 16 aa, synthetic construct
  SITE 3: note = 4Hyp
  SITE 10: note = t-butyl glycine
  SITE 16: note = L-4-carbamoylphenylalanine
CPXDAYLGCXSYCEPX

SEQ ID NO: 225 - protein, 16 aa, synthetic construct
  SITE 3: note = 4Hyp
  SITE 10: note = t-butyl glycine
  SITE 16: note = 4-carboxy-L-phenylalanine
CPXDAYLGCXSYCEPX

SEQ ID NO: 226 - protein, 16 aa, synthetic construct
  SITE 3: note = 4Hyp
  SITE 10: note = t-butyl glycine
  SITE 16: note = homo-tyrosine
CPXDAYLGCXSYCEPX

SEQ ID NO: 227 - protein, 16 aa, synthetic construct
  SITE 3: note = 4Hyp
  SITE 10: note = t-butyl glycine
CPXEAYLGCXSYCEPW

SEQ ID NO: 228 - protein, 16 aa, synthetic construct
  SITE 3: note = 4Hyp
  SITE 4: note = L-gamma-carboxyglutamic acid
  SITE 10: note = t-butyl glycine
CPXXAYLGCXSYCEPW

SEQ ID NO: 229 - protein, 16 aa, synthetic construct
  SITE 3: note = 4Hyp
  SITE 10: note = t-butyl glycine
CPXDAYSGCXSYCEPW

SEQ ID NO: 230 - protein, 16 aa, synthetic construct
  SITE 3: note = 4Hyp
  SITE 10: note = t-butyl glycine
CPXDAYTGCXSYCEPW

SEQ ID NO: 231 - protein, 16 aa, synthetic construct
  SITE 3: note = 4Hyp
  SITE 10: note = t-butyl glycine
CPXDAYDGCXSYCEPW

SEQ ID NO: 232 - protein, 16 aa, synthetic construct
  SITE 3: note = 4Hyp
  SITE 10: note = t-butyl glycine
CPXDAYEGCXSYCEPW

SEQ ID NO: 233 - protein, 16 aa, synthetic construct
  SITE 3: note = 4Hyp
  SITE 10: note = t-butyl glycine
CPXDAYNGCXSYCEPW

SEQ ID NO: 234 - protein, 16 aa, synthetic construct
  SITE 3: note = 4Hyp
  SITE 10: note = t-butyl glycine
CPXDAYQGCXSYCEPW

SEQ ID NO: 235 - protein, 16 aa, synthetic construct
  SITE 3: note = 4Hyp
  SITE 10: note = t-butyl glycine
  SITE 11: note = homoserine
CPXDAYLGCXXYCEPW

SEQ ID NO: 236 - protein, 16 aa, synthetic construct
  SITE 3: note = 4Hyp
  SITE 10: note = t-butyl glycine
CPXDAYLGCXTYCEPW

SEQ ID NO: 237 - protein, 16 aa, synthetic construct
  SITE 3: note = 4Hyp
  SITE 10: note = t-butyl glycine
CPXDAYLGCXDYCEPW

SEQ ID NO: 238 - protein, 16 aa, synthetic construct
  SITE 3: note = 4Hyp
  SITE 10: note = t-butyl glycine
CPXDAYLGCXEYCEPW

SEQ ID NO: 239 - protein, 16 aa, synthetic construct
  SITE 3: note = 4Hyp
  SITE 10: note = t-butyl glycine
CPXDAYLGCXNYCEPW

SEQ ID NO: 240 - protein, 16 aa, synthetic construct
  SITE 3: note = 4Hyp
  SITE 10: note = t-butyl glycine
CPXDAYLGCXQYCEPW

SEQ ID NO: 241 - protein, 16 aa, synthetic construct
  SITE 3: note = 4Hyp
  SITE 10: note = t-butyl glycine
CPXDAYLGCXSYCDPW

SEQ ID NO: 242 - protein, 16 aa, synthetic construct
  SITE 3: note = 4Hyp
  SITE 10: note = t-butyl glycine
  SITE 14: note = L-gamma-carboxyglutamic acid
CPXDAYLGCXSYCXPW

SEQ ID NO: 243 - protein, 16 aa, synthetic construct
  SITE 3: note = 4Hyp
CPXDAYLGCYSYCEPW

SEQ ID NO: 244 - protein, 16 aa, synthetic construct
  SITE 3: note = 4Hyp
  SITE 10: note = 3-hydroxy-L-valine
CPXDAYLGCXSYCEPW

SEQ ID NO: 245 - protein, 17 aa, synthetic construct
  SITE 3: note = 4Hyp
  SITE 10: note = t-butyl glycine
CPXDAYLGCXSYCEPWC

SEQ ID NO: 246 - protein, 17 aa, synthetic construct
  SITE 3: note = 4Hyp
  SITE 10: note = t-butyl glycine
CPXDAYLGCXSYCEPWC

SEQ ID NO: 247 - DNA, 24 bp, synthetic construct
  source 1..24: mol_type = other DNA
aaggagtgtaccgctgtactgttg

SEQ ID NO: 248 - DNA, 21 bp, synthetic construct
  source 1..21: mol_type = other DNA
ccaaagctgcactgtgctgta

SEQ ID NO: 249 - DNA, 30 bp, synthetic construct
  source 1..30: mol_type = other DNA
acaccttcagggactggagctgcttttatc

SEQ ID NO: 250 - DNA, 18 bp, synthetic construct
  source 1..18: mol_type = other DNA
agcctgagccgggagatg

SEQ ID NO: 251 - DNA, 21 bp, synthetic construct
  source 1..21: mol_type = other DNA
gcgtagttgactggcaaagtt

SEQ ID NO: 252 - DNA, 21 bp, synthetic construct
  source 1..21: mol_type = other DNA
aggccatccgcatggccaacc

(The sequence listing continues in the following parts.)

1. An oligomeric compound comprising a modified oligonucleotide and a conjugate group, wherein the modified oligonucleotide consists of 10 to 300 linked nucleosides, and the conjugate group comprises a bicycle ligand and a conjugate linker, wherein
the bicycle ligand comprises a polypeptide consisting of 13-22 linked amino acids or amino acid mimetics and a molecular scaffold, wherein
each of a first, a second, and a third amino acid of the polypeptide comprises a reactive group, each of which separately forms a bond with the molecular scaffold, thereby forming two polypeptide loops attached to the molecular scaffold; and
wherein a portion of the bicycle ligand binds to a type 1 transferrin receptor; and
wherein the modified oligonucleotide is covalently linked to the bicycle ligand through the conjugate linker.

2. The oligomeric compound of claim 1, wherein the conjugate group consists of the bicycle ligand and a conjugate linker.

3. The oligomeric compound of claim 1 or 2, wherein the oligomeric compound consists of the modified oligonucleotide and the conjugate group.

4. The oligomeric compound of any of claims 1-3, wherein the three reactive groups are each the thiol of a cysteine.

5. The oligomeric compound of any of claims 1-4, wherein the polypeptide has the following formula, from N-terminal to C-terminal:
[B]n-[Zᵢ]-[J]ₘ—[Zᵢᵢ]-[O]ₒ-[Zᵢᵢᵢ]—[U]ₚ, wherein:
Zᵢ, Zᵢᵢ, and Zᵢᵢᵢ are the first, second, and third amino acids comprising a reactive group;
each B, J, O, and U is independently selected amino acids or amino acid mimetics;
n is from 0 to 5;
m is from 3 to 7;
o is from 3 to 7;
p is from 0 to 5;
wherein the sum of m+o is less than 12.

6. The oligomeric compound of claim 5, wherein m is 7 and o is 3.

7. The oligomeric compound of claim 5, wherein m is 2 and o is 9.

8. The oligomeric compound of claim 5, wherein m and o are both 6.

9. The oligomeric compound of claim 5, wherein m is 3 and o is 8.

10. The oligomeric compound of any of claims 5-9, wherein n is 0.

11. The oligomeric compound of any of claims 5-9, wherein n is 3 or 4.

12. The oligomeric compound of any of claims 5-11, wherein p is 0.

13. The oligomeric compound of any of claims 5-11, wherein p is 3 or 4.

14. The oligomeric compound of any of claims 1-13, wherein the polypeptide has an N-terminal modification.

15. The oligomeric compound of claim 14, wherein the N-terminal modification is an acetyl group.

16. The oligomeric compound of claim 14, wherein the N-terminal modification is an azidopropyl group.

17. The oligomeric compound of any of claims 1-13, wherein the polypeptide has a C-terminal modification.

18. The oligomeric compound of claim 14, wherein the C-terminal modification is an amide group.

19. The oligomeric compound of any of claims 1-18, wherein the conjugate linker is attached to the N-terminal amino acid of the bicycle ligand.

20. The oligomeric compound of any of claims 1-19, wherein the conjugate linker is attached to the C-terminal amino acid of the bicycle ligand.

21. The oligomeric compound of any of claims 1-20, wherein the conjugate linker is attached to a side chain of an amino acid within one of the polypeptide loops of the bicycle ligand.

22. The oligomeric compound of any of claims 1-21, wherein the bicycle ligand comprises a C-terminal extension.

23. The oligomeric compound of claim 22, wherein the C-terminal extension is selected from PEG10 or PEG24.

24. The oligomeric compound of any of claims 1-23, wherein the bicycle ligand comprises an N-terminal extension.

25. The oligomeric compound of claim 24, wherein the N-terminal extension is selected from PEG10 or PEG24.

26. The oligomeric compound of any of claims 1-25, wherein the conjugate group is attached to the 5′-terminal nucleoside of the modified oligonucleotide.

27. The oligomeric compound of claim 26, wherein the conjugate group is attached to the 5′-position of the 5′-terminal nucleoside of the modified oligonucleotide.

28. The oligomeric compound of any of claims 1-25, wherein the conjugate group is attached to the 3′-terminal nucleoside of the modified oligonucleotide.

29. The oligomeric compound of claim 28, wherein the conjugate group is attached to the 3′-position of the 3′-terminal nucleoside of the modified oligonucleotide.

30. The oligomeric compound of any of claims 1-25, wherein the conjugate group is attached to an internal nucleoside of the modified oligonucleotide.

31. The oligomeric compound of claim 1-25, wherein the conjugate group is attached through a modified internucleoside linkage.

32. The oligomeric compound of claim 28-30, wherein the conjugate group is attached through a 2′-modified furanosyl sugar moiety.

33. The oligomeric compound of any of claims 1-32, wherein the bicycle ligand has an amino acid sequence with at least 80% identity to any of SEQ ID NO: 26-27, 36-56, 58-65, 67-76, 79-88, 90-152, or 192-246.

34. The oligomeric compound of claim 33, wherein the bicycle ligand has an amino acid sequence with at least 85%, at least 90%, at least 95%, or 100% identity to any of SEQ ID NO: 26-27, 36-56, 58-65, 67-76, 79-88, 90-152, or 192-246.

35. The oligomeric compound of any of claims 5-34, wherein [Zᵢ]-[J]ₘ—[Zᵢ]—[O]ₒ—[Zᵢᵢᵢ] has an amino acid sequence with at least 85%, at least 90%, at least 95%, or 100% identity to any of SEQ ID NO 26-27, 35-56, 58-65, 67-76, 79-88, 90-152, or 192-246.

36. The oligomeric compound of any of claims 5-35, wherein [Zᵢ]-[J]ₘ[Zᵢᵢ]—[O]ₒ—[Zᵢᵢᵢ] has an amino acid sequence of CXXDXXXGCISYC (SEQ ID NO: 35), wherein each “X” is an independently selected amino acid.

37. The oligomeric compound of any of claims 1-36, wherein the bicycle ligand comprises at least one, at least two, or at least three non-natural amino acids.

38. The oligomeric compound of claim 37, wherein at least one non-natural amino acid is selected from a _{D}-amino acid, allo-isoleucine, 2-amino-3-ethyl-pentanoic acid, aminoisobutyric acid, aminobutyric acid, azetidine, 7-azatryptophan, 6-azidolysine, β-cyclobutylalanine, β-methyl isoleucine, 4, 4-biphenylalanine, cis-hydroxyproline, cyclobutyl glycine, cyclohexyl glycine, cyclopentyl alanine, cyclopentyl glycine, 2,6-dimethyl tyrosine, 3,3-diphenyl alanine, 4-trans-hydroxy-L-proline, 1-napthaylalanine, 2-napthylalanine, N-methyl alanine, 1-methyl histidine, 3-methyl histidine, N-methyl-tryptophan, pipecolic acid,4-pyridylalanine, sarcosine, t-butyl alanine, or 3-t-butyl tyrosine.

39. The oligomeric compound of claim 38, wherein at least one non-natural amino acid is selected from 4-trans-hydroxy-L-proline, 6-azidolysine, and t-butyl glycine.

40. The oligomeric compound of any of claims 1-39, wherein the molecular scaffold is 1,1′,1″-(1,3,5-triazinane-1,3,5-triyl)triprop-2-en-1-one (TATA).

41. The oligomeric compound of any of claims 1-39, wherein the molecular scaffold is 1,1′,1″-(1,3,5-triazinane-1,3,5-triyl)tris(2-bromoethanone) (TATB).

42. The oligomeric compound of any of claims 1-41, wherein the bicycle ligand does not inhibit the binding of transferrin to the transferrin receptor.

43. The oligomeric compound of any of claims 1-42, wherein at least one nucleoside of the modified oligonucleotide comprises a modified sugar moiety.

44. The oligomeric compound of claim 43, wherein at least one modified sugar moiety comprises a bicyclic sugar moiety.

45. The oligomeric compound of claim 44, wherein the bicyclic sugar moiety comprises a 2′-4′ bridge selected from —O-CH2-; and —O—CH(CH3)-.

46. The oligomeric compound of claim 43-45, wherein at least one modified sugar moiety comprises a non-bicyclic modified sugar moiety.

47. The oligomeric compound of claim 46, wherein the non-bicyclic modified sugar moiety is a 2′-MOE sugar moiety or 2′-OMe sugar moiety.

48. The oligomeric compound of any of claims 43-47, wherein at least one nucleoside of the modified oligonucleotide compound comprises a sugar surrogate.

49. The oligomeric compound of any of claims 1-48, wherein the modified oligonucleotide comprises at least one modified internucleoside linkage.

50. The oligomeric compound of claim 49, wherein at least one modified internucleoside linkage is a phosphorothioate internucleoside linkage.

51. The oligomeric compound of any of claims 49-50, wherein each internucleoside linkage is a modified internucleoside linkage.

52. The oligomeric compound of claim 51, wherein each internucleoside linkage is a phosphorothioate internucleoside linkage.

53. The oligomeric compound of any of claims 1-50, wherein the modified oligonucleotide comprises at least one phosphodiester internucleoside linkage.

54. The oligomeric compound of any of claims 1-50 or 53, wherein each internucleoside linkage of the modified oligonucleotide is independently selected from a phosphodiester or a phosphorothioate internucleoside linkage.

55. The oligomeric compound of claim 49, wherein at least one modified internucleoside linkage is a mesyl phosphoramidate internucleoside linkage.

56. The oligomeric compound of any of claims 49-55, wherein each internucleoside linkage is independently selected from a phosphodiester, a phosphorothioate internucleoside, or a mesyl phosphoramidate internucleoside linkage.

57. The oligomeric compound of any of claims 49-55, wherein each internucleoside linkage is independently selected from a phosphorothioate internucleoside or a mesyl phosphoramidate internucleoside linkage.

58. The oligomeric compound of any of claims 1-57, wherein the modified oligonucleotide comprises at least one modified nucleobase.

59. The oligomeric compound of claim 58, wherein the modified nucleobase is 5-methylcytosine.

60. The oligomeric compound of any of claims 1-59, wherein the modified oligonucleotide comprises a deoxy region consisting of 5-12 contiguous 2′-deoxynucleosides.

61. The oligomeric compound of claim 60, wherein each nucleoside of the deoxy region is a 2′-β-D-deoxynucleoside.

62. The oligomeric compound of claim 60 or 61, wherein the deoxy region consists of 7, 8, 9, 10, or 7-10 linked nucleosides.

63. The oligomeric compound of any of claims 60-62, wherein each nucleoside immediately adjacent to the deoxy region comprises a modified sugar moiety.

64. The oligomeric compound of any of claims 60-63, wherein the deoxy region is flanked on the 5′-side by a 5′-region consisting of 1-6 linked 5′-region nucleosides and on the 3′-side by a 3′-region consisting of 1-6 linked 3′-region nucleosides; wherein
the 3′-most nucleoside of the 5′-region comprises a modified sugar moiety; and
the 5′-most nucleoside of the 3′-region comprises a modified sugar moiety.

65. The oligomeric compound of claim 64, wherein each nucleoside of the 3′-region comprises a modified sugar moiety.

66. The oligomeric compound of claim 64 or 65, wherein each nucleoside of the 5′-region comprises a modified sugar moiety.

67. The oligomeric compound of any of claims 1-66, wherein the modified oligonucleotide has a sugar motif comprising:
a 5′-region consisting of 1-6 linked 5′-region nucleosides;
an internal region consisting of 6-10 linked internal region nucleosides; and
a 3′-region consisting of 1-6 linked 3′-region nucleosides;
wherein each of the 5′-region nucleosides and each of the 3′-region nucleosides comprises a modified sugar moiety; and each of the internal region nucleosides is selected from a 2′-deoxynucleoside and a 2′-substituted nucleoside.

68. The oligomeric compound of claim 67, wherein the modified oligonucleotide has a sugar motif comprising:
a 5′-region consisting of 1-6 linked 5′-region nucleosides;
an internal region consisting of 6-10 linked internal region nucleosides; and
a 3′-region consisting of 1-6 linked 3′-region nucleosides;
wherein each of the 5′-region nucleosides and each of the 3′-region nucleosides is a cEt nucleoside or a 2′-MOE nucleoside; and each of the internal region nucleosides is a 2′-β-D-deoxynucleoside.

69. The oligomeric compound of any of claims 1-59, wherein each nucleoside of the modified oligonucleotide comprises a 2′-sugar moiety.

70. The oligomeric compound of claim 69, wherein each 2′-sugar moiety is selected from 2′-OMe, 2′-MOE, or 2′-NMA.

71. The oligomeric compound of claim 69 or 70, wherein each nucleoside of the modified oligonucleotide comprises the same 2′-sugar moiety.

72. The oligomeric compound of any of claims 1-71, wherein the conjugate linker is cleavable.

73. The oligomeric compound of any of claims 1-72, wherein the conjugate linker comprises 1-3 linker nucleosides.

74. The oligomeric compound of any of claims 1-72, wherein the conjugate linker does not comprise any linker nucleosides.

75. The oligomeric compound of any of claims 1-74, wherein the conjugate group comprises:

[chemical structure]

76. The oligomeric compound of any of claims 1-74, wherein the conjugate group comprises:

[chemical structure]

77. The oligomeric compound of any of claims 1-74, wherein the conjugate group comprises:

[chemical structure]

78. The oligomeric compound of any of claims 1-74, wherein the conjugate group comprises: [chemical structure]
optionally

[chemical structure]

79. The oligomeric compound of any of claims 1-74, wherein the conjugate group comprises:

[chemical structure]

80. The oligomeric compound of any of claims 1-74, wherein the conjugate group comprises:

[chemical structure]

81. The oligomeric compound of any of claims 1-74, wherein the conjugate group comprises:

[chemical structure]

82. The oligomeric compound of any of claims 1-74, wherein the conjugate group comprises:

[chemical structure]

83. The oligomeric compound of any of claims 1-82, wherein the modified oligonucleotide is complementary to a target nucleic acid expressed in muscle.

84. The oligomeric compound of any of claims 1-83, wherein the modified oligonucleotide is capable of reducing the amount of a target nucleic acid through the activation of Rnase H.

85. The oligomeric compound of any of claims 1-83, wherein the modified oligonucleotide is capable of reducing the amount of a target nucleic acid through the activation of RISC/Ago2.

86. The oligomeric compound of any of claims 1-83, wherein the modified oligonucleotide is capable of modulating the splicing of a target nucleic acid.

87. The oligomeric compound of any of claims 1-83, wherein the modified oligonucleotide is a guide RNA, a tracrRNA, or a scout RNA.

88. The oligomeric compound of any of claims 1-87, wherein the modified oligonucleotide is complementary to the complement of a target nucleic acid expressed in muscle.

89. The oligomeric compound of any of claims 83-88, wherein the target nucleic acid is associated with a muscle disease.

90. The oligomeric compound of any of claims 83-89, wherein the target nucleic acid is selected from CaMK2d, NLRP3, PLN, DMD, DMPK, DNM2, DUX4, or HPRT.

91. The oligomeric compound of any of claims 83-90, wherein the muscle target nucleic acid has a sequence selected from any of SEQ ID NO: 1-15.

92. The oligomeric compound of any of claims 83-91, wherein the target nucleic acid is expressed in at least one of expressed in at least one of the following tissues: skeletal muscle (including but not limited to quadriceps, gastrocnemius, tibialis anterior, triceps, masseter, extensor digitorum longus (EDL), soleus, diaphragm), heart, sciatic nerve, aorta, or liver.

93. The oligomeric compound of any of claims 1-92, wherein the nucleobase sequence of the modified oligonucleotide comprises at least 12, at least 13, at least 14, at least 15, or at least 16 contiguous nucleobases of any of the nucleobase sequences of any of SEQ ID NO: 167-191.

94. The oligomeric compound of any of claims 1-93, wherein the modified oligonucleotide consists of 10 to 25, 10 to 30, 12 to 20, 12 to 25, 12 to 30, 13 to 20, 13 to 25, 13 to 30, 14 to 20, 14 to 25, 14 to 30, 15 to 20, 15 to 25, 15 to 30, 16 to 18, 16 to 20, 16 to 25, 16 to 30, 17 to 20, 17 to 25, 17 to 30, 18 to 20, 18 to 25, 18 to 30, 19 to 20, 19 to 25, 19 to 30, 20 to 25, 20 to 30, 21 to 25, 21 to 30, 21 to 50, 22 to 25, 22 to 30, 23 to 25, 23 to 30, 20 to 100, 40 to 100, 50 to 100, 50 to 200, 100 to 300, 150-300, or 200-300 linked nucleosides.

95. An oligomeric duplex, comprising a first oligomeric compound comprising a first modified oligonucleotide and a second compound oligomeric comprising a second modified oligonucleotide consisting of 16 to 30 linked nucleosides, wherein the nucleobase sequence of the second modified oligonucleotide comprises a complementary region of at least 12 nucleobases that is at least 90% complementary to an equal length portion of the first modified oligonucleotide, and wherein the second oligomeric compounds is an oligomeric compound of any of claims 1-86 or 89-94.

96. The oligomeric duplex of claim 95, wherein the first modified oligonucleotide is complementary to a muscle target nucleic acid.

97. The oligomeric duplex of claim 96, wherein the duplex is capable of reducing the amount of a target nucleic acid through the activation of RISC/Ago2.

98. The oligomeric duplex of any of claims 95-97, wherein at least one nucleoside of the second modified oligonucleotide comprises a modified sugar moiety.

99. The oligomeric duplex of claim 98, wherein the modified sugar moiety of the second modified oligonucleotide comprises a bicyclic sugar moiety.

100. The oligomeric duplex of claim 99, wherein the bicyclic sugar moiety of the second modified oligonucleotide comprises a 2′-4′ bridge selected from —O—CH₂—; and —O—CH(CH₃)—.

101. The oligomeric duplex of claim 100, wherein the modified sugar moiety of the second modified oligonucleotide comprises a non-bicyclic modified sugar moiety.

102. The oligomeric duplex of claim 101, wherein the non-bicyclic modified sugar moiety of the second modified oligonucleotide is a 2′-MOE sugar moiety, a 2′-F sugar moiety, or 2′-OMe sugar moiety.

103. The oligomeric duplex of any of claims 95-102, wherein at least one nucleoside of the second modified oligonucleotide comprises a sugar surrogate.

104. The oligomeric duplex of any of claims 95-102, wherein at least one internucleoside linkage of the second modified oligonucleotide is a modified internucleoside linkage.

105. The oligomeric duplex of claim 104, wherein at least one modified internucleoside linkage of the second modified oligonucleotide is a phosphorothioate internucleoside linkage.

106. The oligomeric duplex of any of claims 95-105, wherein at least one internucleoside linkage of the second modified oligonucleotide is a phosphodiester internucleoside linkage.

107. The oligomeric duplex of any of claims 95-104 or 106, wherein each internucleoside linkage of the second modified oligonucleotide is independently selected from a phosphodiester or a phosphorothioate internucleoside linkage.

108. The oligomeric duplex of any of claims 95-107, wherein the second modified oligonucleotide comprises at least one modified nucleobase.

109. The oligomeric duplex of claim 108, wherein the modified nucleobase of the second modified oligonucleotide is 5-methylcytosine.

110. The oligomeric duplex of any of claims 95-109, wherein the first oligomeric compound comprises a 5′-stabilized phosphate group.

111. The oligomeric duplex of any of claims 95-109, wherein the second oligomeric compound comprises a 5′-stabilized phosphate group.

112. The oligomeric duplex of claim 110 or 111, wherein the stabilized phosphate group comprises a cyclopropyl phosphonate or a vinyl phosphonate.

113. The oligomeric duplex of any of claims 95-112, wherein the first modified oligonucleotide of comprises a glycol nucleic acid (GNA) sugar surrogate.

114. The oligomeric duplex of any of claims 95-113, wherein first modified oligonucleotide comprises a 2′-NMA sugar moiety.

115. The oligomeric duplex of any of claims 95-114, wherein the second modified oligonucleotide comprises a glycol nucleic acid (GNA) sugar surrogate.

116. The oligomeric duplex of any of claims 95-115, wherein the second modified oligonucleotide compound comprises a 2′-NMA sugar moiety.

117. A method of modulating a nucleic acid target in a subject, comprising administering to the subject an oligomeric compound according to any of claims 1-94 or an oligomeric duplex of any of claims 95-116.

118. The method of claim 117, wherein the nucleic acid target is expressed in at least one of skeletal muscle (including but not limited to quadriceps, gastrocnemius, tibialis anterior, triceps, masseter, extensor digitorum longus (EDL), soleus, diaphragm), heart, sciatic nerve, aorta, or liver.

119. The method of claim 117 or 118, wherein administration of the oligomeric compound of any of claims 1-94 or the oligomeric duplex of any of claims 95-116 results in reduction of the nucleic acid target.

120. The method of claim 117 or 118, wherein administration of the oligomeric compound of any of claims 1-94 or the oligomeric duplex of any of claims 95-116 results in a change in the splicing of the nucleic acid target.

121. The method of any of claims 117-120, wherein the oligomeric compound or oligomeric duplex is administered via intravenous or subcutaneous dosing.

122. The method of any of claims 117-120, wherein the oligomeric compound or oligomeric duplex is administered at a dose of 5 mg, 10 mg, 15 mg, 20 mg, 25 mg, 30 mg, 35 mg, 40 mg, 45 mg, 50 mg, 55 mg, 60 mg, 65 mg, 70 mg, 75 mg, 80 mg, 85 mg, 90 mg, 95 mg, 100 mg, 105 mg, 110 mg, 115 mg, 120 mg, 125 mg, 130 mg, 135 mg, 140 mg, 145 mg, 150 mg, 155 mg, 160 mg, 165 mg, 170 mg, 175 mg, 180 mg, 185 mg, 190 mg, 195 mg, 200 mg, 205 mg, 210 mg, 215 mg, 220 mg, 225 mg, 230 mg, 235 mg, 240 mg, 245 mg, 250 mg, 255 mg, 260 mg, 265 mg, 270 mg, 275 mg, 280 mg, 285 mg, 290 mg, 295 mg, 300 mg, 305 mg, 310 mg, 315 mg, 320 mg, 325 mg, 330 mg, 335 mg, 340 mg, 345 mg, or 350 mg.

123. The method of any of claims 117-122, comprising administering the oligomeric compound or oligomeric duplex once every 4 weeks, once every 6 weeks, once every 8 weeks, once every 12 weeks, once every 16 weeks, once every 20 weeks, once every 24 weeks, once every 6 months, or once a year.

124. A bicycle ligand specific for transferrin receptor 1 (TfR1) which comprises an amino acid sequence selected from: CP[HyP]DAYLGC[tBuGly]SYCEPWK (SEQ ID NO: 245, herein referred to as BCY21757) and CP[HyP]DAYLGC[tBuGly]SYCEPWC (SEQ ID NO: 246, herein referred to as BCY21758), wherein HyP represents trans-4-hydroxy-L-proline and tBuGly represents t-butyl-glycine.

125. The bicycle ligand of claim 124, which comprises an N-terminal acetyl group and a C-terminal CONH₂ group.

126. The bicycle ligand of claim 124 or 125, which is a pharmaceutically acceptable salt.

127. The pharmaceutical salt of claim 126, wherein the pharmaceutically acceptable salt is selected from the sodium, potassium, calcium or ammonium salt.

128. The bicycle ligand of claim 124, wherein the first, second and third cysteine residues within said peptide ligands are covalently bonded to a molecular scaffold such that two polypeptide loops are formed on said molecular scaffold.

129. The bicycle ligand of claim 125, wherein the molecular scaffold is 1,1′,1″-(1,3,5-triazinane-1,3,5-triyl)triprop-2-en-1-one (TATA).
